United States Patent Application Publication US 2011/0014706 A2 - sequence listing, part 26

SEQ ID NO: 52853 - DNA, 2605 bp, Arabidopsis thaliana landsberg
gcacgtgtaagacaacccaactaaaagttaactaactcacaagtgcgtgctccacacgtgcctatctgttgataagaatgccacaattttcatctcatattctcattgaacaaaaataataaattctcagtgatccttcgagagattgattataaaatccggtcggcgacgagacttactttcgccgcaaaatttgttctccggtaccggatatttacgtatctgttctcaaattttaccattcccaccactaaaaccctagattaaaagcttcaattaccggaaaaagtctctacttaagagatttatctgtttgttgtcttaaatcacaggaagagaatggattttcttaaggcaacgattatagttgccctaatttgcaatttcgcctcactggcgtcttctgttcctttcatagttctgcatggtaatttgcaatctgatttttttcccttttctccttttttgcccttttgagtcagcaacaatcatgttcttatttgtaaaagtatcaatcttggaattttactgaagattagtttagctttagaaagtgtccttcttggaattcccaaatctctggaaaaagtaaagagaagattgtgtcttactttctcaggaattggggataaatgcagtaatgcaggagtgacacaattcacagagcttttaagcgattggtctggttctcaaggatattgcttgtatgtctattatctcctctttatacaactagcatattcaaatatggcttaaatttggtattaatccattattgtgtaaatttcagggagattgggaatggctcatgggactcatggactatgcctctccttgatcaggtactgatgtcacatgttggaagaatgaaaattgtatgagtttataccggaaaaagaaactgactgttggtctcatttttgtgtgtttttgcagacatcagttgtttgtgagaaggtcagacttaaactactatcatcaagtgtttaccaaatttggcttttaaaagttcattatcgttagatatatgtttaataccacaggtgaaaagtatgccagagcttagtgacggttacagcattgtggggctttctcagggtaacatgattggtcgagctctcattgagttttgcgatggagcaccacctgtaagttcccacaaacgtccatatgcctatgtgtatgtatgtttttatgcttttattctagcttgttcaatcttatctattcctctgatgtttatggcggttaataggttaagagttttgtttcggtagcgggtcctcatgctggcactgcatcgattccgttctgtggtgtaagtaactaactccctccaaaaaagttggtttcttctatattgacaagggaatttttttaaatatattttctcgattttgcaggctacctggatttgcatcatgttggacagtatgatcaaagcagagatctatagcgactatatgcaggtactatgttcatgagtattttaccacttctgcgcaattttctgttacggggatcaaacttagtacatctgtttgagtttcaggaacatttggctcctagcggttttctcaaaatcccaactgtaagtatttttggttaaaggttcaaaagtttcgacttttcattcttgttgtaacttaatgttttttcataggacatagcgggttacatggaaggctgtaggtttctcccaaagctaaacaacgaacttccagtcaaaaactcgacttataaggagaggttctcgagtttggagaatcttgtgcttattatggtcagtcatcgaaccaacttctctgcgtaacttataagtttctttttgatggtaacgttttatttttgatcgaatatcagtttgagcatgacacaatattgatacctaaagaaacctcatggtttggatattatcctgatgggtctttcaagaccattcttccgccgcaagaggtaactttaacccttcaatcattgtttctaaatggctcaatattgcagatacattgagttgtagtaaatgtttggatttttttcctattgtagaccaagctatatactgaagactggattggtttgagaaccttagatgaagctggaaaagtgaagttcgttaacgtctctggaaatcatcttcagatatctcatacagacatgaagaagcatatagtgccatacctctgtgataaatcatcgtcgtcatcatccacaacaatggcagtttccggatcatcttcctcacaccagtggcttccaagtgtagggaacattattatggatcttattggtccagaagtggatcagcttcagcttgtgctacgtcatgtgtaaatctgatgtcctgtgttgttgtttgttctcttactaaacacgatcgtctcgtgatatgtttgtaacttgaagataaaacaagaaaactgttccaaaatccctctcaaaaaagttcttatagtcattgataaaatgtcaaatatatgtcacaagaaatggacagagccttataaagggatgatgaagaacaccattgatccttaaggtctgttattacagaaaatctcagaacgagacaaagaaacataagtccacatatatatattcaaca

SEQ ID NO: 52854 - DNA, 542 bp, Arabidopsis thaliana landsberg
  unsure (1)..(542): unsure at all n locations
aatagtatataccaaattcttatcaaggcaataatcatttgtctcaccatgagcaatattttcaagaaagggtttacacatatttctctgtttactccaaaaaccctcattcataattactaacgtaagaccttagtccattaacaaaacaagtttactaacctaatgagcataaaaaccaaacaaatttacaaaactacaattttttaatttaaattgagatttcacaacaattaatttcattaggtaattttatatctaataaaattcttgtcacattgctaatttagagaatatggaaatattactttgaaatgagctttaatggtagataaacacgatgaaaaagaaaaagagaatagatatggaagattcaatatcgaaactgaagaagaagtgaagagacgagatctnaaatctncaaatnnatgttgtgatangaaaaggaaaggagtgtttgtattggtacttnntattgtaattctaatttaatgttgttaaaataaaattctataaaagagaaaggaattttgaaatgatta

SEQ ID NO: 52855 - DNA, 451 bp, Arabidopsis thaliana landsberg
  unsure (1)..(451): unsure at all n locations
agggggggggacgtgcatgcgatgcaaggcaagtcctggatccctttctttgctttaggaaagaaaacctaagannggggagtttggaagattcattcatcatcccaacccgtcggatgggaactgtttgctcgggatgcactaaggaagggagattggaagattgtgcacttcgacaagacagagggtggtgcaggagagggtgatgagggctgggaactgttcaacgttgcacaagatccaggagaggtaacagatttggccaagactgagcccgagaagctaaaagaactcctgctacactgggacgagtatgtgattgagtgcggcattgtgcggggagaagtggctttgatttcaggcgtcagcagagatgatgccccagagttgtgggaggacaaggtatagatgaagaaggcatggatgggtgctagatgaagagattgtccag

SEQ ID NO: 52856 - DNA, 882 bp, Arabidopsis thaliana landsberg
cgttctctcaaccattctatcgtctcataaaccaaacgaaattacgttttaacatttaaaacaacagaagaggaagtggagctcgaactccggtgacgtcaaaagctcaaaatggacaagaatcactagaaacctttggacttttggtcgacattataacacgcttttaaaaatggactcggagactcaaaattgacgacccattctctagaagcaatatcgggacacacgcaaaaatggagtatatgtcaacgtgtacaataatattatatattgcgaatcatagaaagaggttgcgagtggggggccacgcgccatttaggtgaaagttccaccgtggaagtctcaagtctctccactttgtttactttgaaggggaagtcaaaatctctcacctacacctgaaaatgaaaactaaaggttcgtagttgggatggttgttgttagccagggttgccaaattcaatatatcccataattccgattcttcattcgttatcaatgtttcgtgtatctcatacgaggaaaaatgcatagtaacaatagatatatagatttgttgatatttgtatatccgaaaaatcttatcgagtaaaaaattaattcaaaagattaaatgaaatctaagtttcatatacggatgttggtcgttggaattggataaaccttttttctttttgtcaagaggaattggataaacctataatataataactctcatatacatttgataatattattggtataaaataaaatccttgaaagaatagacgaaatatcaaaagtatttgttaagaaaatattatatatgattggtacgtagaatattgttttgtctgctatatattacacaactcgcgtatgataagaacaaacgcgtac

SEQ ID NO: 52857 - DNA, 667 bp, Arabidopsis thaliana landsberg
ttttaatatctcaaaagaaatcatatttcttaggtaaaactatcatacgttgagtttttctttttccttttgcgattttccctgaaatatatttatgttgtgtgtgtgctttgtaaacaaaataataatgaacgtaataatagtaaaacaaaaagtaacctatattattatcatacttgatataacccaatagagaaataataatataaattaaaattttatttcccaattccaaaatcataatcaaggagtgaatgctgccagtagaccaaagtaacaatatttggtgtgtacatcaaatgataggaaacaacaaaaactcattaatatacctaaatccatatatatatatatatatatatatatatatttcaatatttcacattgttataattaggtttaatagataccatattagaaatctcagtatggtggttcccacaagcaaagaggggaatgagattgctatctacctatatttatatctccgcaacttcactcttttcctcaatcaacacacacaaacacacacacacacacagcctttttccttcgttgatcgattgttaagctcgatccaatggcggataacaccgataatcggagatccttatggggagttccggagaagcttcagcttcacatagcgatgctgacgttgcaattc

SEQ ID NO: 52858 - DNA, 546 bp, Arabidopsis thaliana landsberg
ctaacttggcttctttgcaagttgagatccaaaagaaaaattgaaccctatacctaatgctctctattatccggttttttcttgcgagtttcttcattgtcgcttttgaaattgatgaatcctagtgttgtagtgatttttctaagtctgctttgattactaattgcattatataatctgttcaagcaaatgcatgagttggtgttttgtttttctttcagaatgttggctttatgttgttcctgttccataaatgagtaatgagagtttgcttatattgtgtactgtgtagtgtcaatgcataaatgagaaaagtctttgcgtttgagtttgaagaaatcaaattgtgaataggtttcttggtactagtatctaatgtgcttcaccctgaagtccacaaatgaagtcgtgatatagataacaacggagatgaataattgctaaaatgtttgtttttctactgaaatggttgatcttaattaagttgcttaattggtgttatatcatctgattttattctttgttggttcgatctctagctttgat

SEQ ID NO: 52859 - DNA, 418 bp, Arabidopsis thaliana landsberg
agttacctaaacgcataccaatgcacttaatcataataatacgtctttcagtttatctatcaaataatcagtatagcttaacatccaaataaaagaggacaacatagtagcctaacacatcagatgatgcagatcacatgatatcagagttatgataaaatttgcttctacattcagtccctagtgatgactacatgatactctaaatcaaaccaaaatataatttagattctttcaaacagtttatgaacagaatcatctctatagctctatcccacttcacctgaagtttaattgctcactcaaactcaccaaaagccatgtgtctccccatttgttatctgttttatgacttcaaagaatgatttcagtgtgaagtccttacacaccaattctggtacttaagcaaatttacaat

SEQ ID NO: 52860 - DNA, 849 bp, Arabidopsis thaliana landsberg
gtaaagtcggaagtatctcgacggtttgtttctgtgcttaagtgtgaatgatagttttgaaacatgtttgggaactcttgatccttagattttaaggttctaggctaagatctccctatatgaccttgtgcctcttgaaacaagtgaagcaagtccagtgtgcaccgaactatagatgttgtagatatcatgtcaatagaatctttgatggtttgtcgaaatagagatagtgattctttctcttcagggataatggttcttgtgtcatcataagaaacatcttaggtgtacattaagagatggaaatctagaactccaaaattagtctccatagctttcatgttacgcgttcagataagtcaagtgtggttaatttgtattcttttacacggatatgaaactacaatgacatgcaaaaccaggaccatgactcgttagcaaaaaattaaggaaacaagatgattcaatcctaataaaaagatagaaattatcctacaagtgacaacagtggaaccaaaataaagaccctaaaaccctataaataatactaccattttagtaaaatcctaatgtagataaacaaccaaatcaaacttgttaacagaaaatacagagaaagattggacttttcaagttacattgacattaatatcggtatgcttgtttcttggatcggaagctaaagaagtctgccatgtattattattgaccggaagagacgagaccgaatggattgtccggtgatcagctgcactagagataggaattgcagcggtaggactcgacaacatgaaatcatgtttgttctttatcggtttctgatcttgatggtcagtgccagctaaaaaa

SEQ ID NO: 52861 - DNA, 855 bp, Arabidopsis thaliana landsberg
gaaaaaactttgcactttgttgaaactcccatgcaacttcacttttccaacaaatatctttagagattagatatgtagcattagaaaaccaactaaattttgcgaaattacacatctaaaattcgcttgagtgactatttacttaccaaaaatcatagagattaacgatattatttgtgtattcacattataggagattgagagataatgttattaacgttattaaactattaaattaacaaaaacgtttttgttcagcgaacgggaaggaagagggaaatagtttacgttaccactagtttacgttgaaacagttttggccgaaaaataggccatcattaccactataggccattccgaaatagtttacgttgtgaacgtaatatcgtgccttatttagtacaaagttgcccactaaacttacgaaatcgaatattccatagatacaaaggttaaaaaacatataaaatcatttacaaccaagtcccaaagtttttgtgctagagaaatatttattatttaggcttatttggtggtagataaccaaaattaggtttatttggtagatagccagaattttgaggtttacttgcaaaatatgataaattataaataatgagatgttaatttcgcggatttttcttacaaataacttaataatataaatatttttgttgtgtataatatttatttaagtgttaaaaaatacaataatttttgttttgtttttccgcctagtaaataacgacgtacgttaaaatatttaagagttcagtaagaaaggggaagaaagcgtgacacaatgttgtgaatcacgtgattaaaaaagtggagttttgtccatttgtcaaacac

SEQ ID NO: 52862 - DNA, 521 bp, Arabidopsis thaliana landsberg
tgatttggtcaaacagtaagatttcctttctatatattttggcataagaaaaatgaacgaccgtgctttcgatgtgttgaataattttatctgttgatcatccgtcatgtgaatcagtgagtggatgacaagatgcggcagacgtcgatagtgtccatgagccggcctgacgataagaacgagtgtccgtgctttcgctagtacgccaaagctgctcgcatcagtgatcagatcactgatcagtcagtttagtggaacctgaaaactcgggccgaggcgccagcacagtgctctatgcagctaatgaatagccaataggcccattgaatattattcttgtggtcgccgggagacagcggctgcccaaccatataactgtaggggagactaggagagcaggagtacattacaaccgcgcgcggacacgtcgtcagcagaagagagacgacggagagcagccatggccgcaggagccgcgttgtactaccacccaggcgccgggaaggtgagccgggtacgag

SEQ ID NO: 52863 - DNA, 303 bp, Arabidopsis thaliana landsberg
  unsure (1)..(303): unsure at all n locations
tacagccttacnnnnnnnnnnnnnnnnnnnnnnnnnnnnnnnnnnntatgcattcaggatcagctcgcaggacccgacaacactcagnnnnnnnnnnnnnnnnnnnnnnnnnnnnnnnnnnnnnnnnnnnnnnnnnnnnnnnnnnnnnnnnnngagctcaatgcacgtggtccatgcctgtgacttgtagtagcccatgcattcttgcgtctacccgctcactctgcaatgcatgatacgaagtatgccgcacagtggttcaacgtcgcacctgtgagacgttcatcagcacgatgtgagctt

SEQ ID NO: 52864 - DNA, 590 bp, Arabidopsis thaliana landsberg
  unsure (1)..(590): unsure at all n locations
taataaatggcannnnnnnnnnnnnnnnnnnnnnnnnnnnnnnctaaatgatcaatgggatgaaataagatggaatactaaaatccatatgagttaagagtaagaggatgaatgaactatgtaaaaataaatgcccatgaaagtgaatgttttatttggttaacccgaaacaacaaaattcaaatatgtgtggctctaaaggaaaaaaatggaaatgtaactaattgctaactttgtgaagtcctagaaacagtctagcaaggcttaatgtaaaatgacaagtttttgttagataacatctaaggctttgtttgggtactctagtattgaccccaatccacatgtgttgaggtagattggggtgtaaattagtttaagttacaccctaatccaccttaatatatgtggattgaggtcaatactagaatacccaaactaggcctaaggaggttttggggtggaagtccctccacaacgaatgggctttggggggactactgcgttaaaatttacaaaactatgatacaacatgtttactttgttgttattgtatggggttgtggattatagaatgaaatgtcttttgaaaa

SEQ ID NO: 52865 - DNA, 1089 bp, Arabidopsis thaliana landsberg
  unsure (1)..(1089): unsure at all n locations
aacacaccattcaaaaacacccaaaaagacaccaactttgaaaaactaaaagaactaaatcaaaccaaacaaggaaactctactaatccccactaacttaccagcttccactacactagagttaacatattcctcatcattttcattgaaattttcagcagtgcttccattaccatcagagtgagagctgaaaacacacttgatactcttgttgcacaatctaagagtgattgttgtggtagtgccctgagacttgacaccttttgtccgattaccccaaaattggcttctaggtttcagaccagtgtagttgactagtgaagcacatgcacctacttgtcttggtcgaattgcaggacaaacaactggtgcttgaaccgatctcatcttccttccttcaatcaaacagagtattttagtgtcaaacataacgaaatccaaaatctcataaagtaaacgaaacatggcaaaattctagatcactgatccatacaacgaaacagtagtttccatatatattctcaaaaagtcaaaacaatcaatgatcatcgaattataccatagatattcacaaatattttgatgatgatgatgatgatcaataattagaaagattgtaaacagtttttgattcacttacgatttcgtgagtaataattgaaaccggattagatcgtgaatggtataaacagtggcacgtagatcgatcaagaagaagatcgaagagctctgaaacaagccagagagaggaaaggatcaatggaagaagatagagatagagagagattcttcacttgagagatcaaaggagtgaaagaatctccgttactttatcgacgcagtttttgttttaattgtcgattttaccctttcaccaaattttgtttcattttgcctaattttttagtcatgaaaataaaattttgccaactttttatgtaaaccataatcttctattttgtttttttttgtatataaaaaacaatattgaagctaattgatttntggaagactaacctaacttatttgtataaaataattgaaaaaatatactacgaaagacatcacatatattatatatatatatat

SEQ ID NO: 52866 - DNA, 169 bp, Arabidopsis thaliana landsberg
gtggatcccccgggctgcagggggggggaaagccacgttgttgttacaaaacttttcgttgacacacatgcacaccgataataaatatcatcagcgtatgaacaatcaaaccctggcctgcttaccataaacacgtaatatcaagcgggttgttatagtagccataatt

SEQ ID NO: 52867 - DNA, 554 bp, Arabidopsis thaliana landsberg
gtaaaatgacgcgcggcatcttccggaagaaacatcttggtaaagcctggatcaatcaggcggtcattggcgcgcgatataagctggtaggtcattttgtagctggcatgacgccgaatgatctcgaaaagtcgctgtgcacgtggaatggcctcgatgtcattcagaatgaatccgaagaagtcatccatgataagttctatggcatcgataagcagtgcctgttttgattggtggtagttgtataaagtagacggcttcaagccaacccaactggcgagagttcgcatactgaggttttcgtaaccgcgttccgcaaacaaagcgatcgcaacaaggagaatgcgattccgcatggaaccccctccggagcgatcattgattttctttacatcttcttcaatattctgaccaaagaaaagcggctcttggcgattgtaaggcagtagtgccccactacgtccctgccgcgctttgaactctgtcatcgtgctttccgcttcgttgcgtcttcatgtaccttaaacaagactgaccttcatcgtcgacgcgcg

SEQ ID NO: 52868 - DNA, 723 bp, Arabidopsis thaliana landsberg
ggtgagatttcttatgacggggaagcgatcaaagactatttagttctgcttctcacaagctcttcaaggatggggctaataaccgtgttgatgatttgcaaggcatgcttttggatcttcagtttgcgaggaaagagagtaggcctactgatgttactcttcttgaggagcaagtgaatcagatgcttcgtgagtggaaatctgagctcaatgagccttctccagcttcatccttgcaacaagtatgctttcgtttgtttcaaatttgcaatcttgttgtttcttctgacttgcatgggtgatttagttttctttgttgtttcagtcattgttagctgtgtcattttgttttgcttaagcagggtggtactctggggtctttctcatcagacatttgtcggctgctgcagctctgtgatgaggaagatgatgctaccagcaaattagctgcccccaagcccgagcctgctgatcagaatctcgaagctggcaaagctgctgtcttccaaagggtgagttgctctttagaaccagtttttaatggtgctttagttgtgtttggagtccattattttgtttaaatactgagatcgtggtgaaagttttcagggatacaatttggttcaggggaagtcagaacatggattaccattggttgataattgcaaagatttgtccttagcagctggtaacaatttcgatggaacggctcctttggagtat

SEQ ID NO: 52869 - DNA, 534 bp, Arabidopsis thaliana landsberg
gattcggatgatttcgccaaatgatggcctattcaatggatattttaccatcaaatagacatcaatgcaaacaccagagccgagcacatgtcaggcgttgatagtcggcttcctttctcaataaatctcattatatccctgttctcaatattggcgtacggttcaactccatagctatacatttcccataagagcataccataggaccaaacatcctatacgtgggtgaatatgccgtacgtaagcgattccggtgcgtaccatctgactggccaacgatcacaattactggccttatagatggcctaaacttttgctaggacacgggataggccaaagtcggaaatcttaatctgctctaatgacacaatcagtacatttcttgcggccaaatctcgatgaacaaagtgctgactctccagatatttcatacctattgctatctgaatggaccagagtttcagatgacgagtgatgtccacaccgttacatttatccatcaaataaacggaaagactacccattggcgccaac

SEQ ID NO: 52870 - DNA, 580 bp, Arabidopsis thaliana landsberg
gtttaaaatagaagtgcaatatagcctgataaagtttaaaataggagacgtgatggaatttagtaaggataattaaactttatgtaatacttctaactaacataaaatttagtaaggatgtcatgcaatgtagactgtgataaagtttaaaatagaagtgcaatatagcctgataaagtttaaaataggagacgtgatggaagttaagattagaaagataagacaataaagtataaaataagaggatggaagataagatgattaagataagacaataaagtataaaataagacatgtgatggataggattgtcattgcccctcgagtggaataaataccagcaaacgaacacatgaaaaattcgacaaactacggaccaagttttgaattaacttggatagctcagtatgctactgattcatttaaaagattttgtttactgtaaagaacgttaacatgaacgtttcatacaaaataatttaaaacaaaaaatatgtaattttttaacacagacttcgatttgcgtctacttatattgtgtaaccaagttttgatttaaattgtggggcacgaaaaaaag

SEQ ID NO: 52871 - DNA, 626 bp, Arabidopsis thaliana landsberg
tggagttgtaaggtggtaattgttgtcagctgtataacttgaatatctctgcactgtaggataccactcttgcaaatgctcttgtccaaacgtagtgctagagaaaatgttgaaacttgaaaactgcatagccagaaaatttttccctttgcataaaattttgggttttggtctttggcggtttggccatgccctaaaactctaaaaaaaattgggtttggtttagagttgctgttgctatgttcctgtttttcaaacttgcatataaaattctggtcactcgtgttttgaattgcttcaagtttggtgatatgcttttgcaattgcttgtattttagaatttgttttggttactgtatatcacataagtcttcttttatatttcagatacaaaaacttctaggtgttcaccgtttaccatacaagaagttggctatgcaaggtccactgaagcacagcgatttttgctgcctgtttctgaatgtgaatttaacatcacatctgcaatagaggacctgagctccatgtctgcatgtccacgtgggcaccgcccatttaagggaactggcgcacgatttctactgctattgctcatctagagggttgctgctcacccagtaccggtg

SEQ ID NO: 52872 - DNA, 856 bp, Arabidopsis thaliana landsberg
taataccagcctggtacgcttcctctcctcgtctccttcttttggaattttacaagttgtgagatttgttgtattgatttaagtaatttgaaatagttgataaccaaagaggaaggattggagttgtatgaagatatgatactaggtagatctttcgaagacatgtgtgctcaaatgtattaccgaggcaagatgtttggttttgttcacttgtacaatggccaagaggctgtttctactggctttatcaagctccttaccaagtctgactctgtcgttagtacctaccgtgaccatgtccatgccctcagcaaaggtgtctctgctcgtgctgttatgagcgagctcttcggcaaggttactggatgctgcagaggccaaggtggatccatgcacatgttctccaaagaacacaacatgcttggtggctttgcttttattggtgaaggcattcctgtcgccactggtgctgcctttagctccaagtacaggagggaagtcttgaaacaggattgtgatgatgtcactgtcgcctttttcggagatggaacttgtaacaacggacagttcttcgagtgtctcaacatggctgctctctataaactgcctattatctttgttgtcgagaataacttgtgggccattgggatgtctcacttgagagccacttctgaccccgagatttggaagaaaggtcctgcatttgggatgcctggtgttcatgttgacggtatggatgtcttgaaggtcagggaagtcgctaaagaagctgtcactagagctagaagaggagaaggtccaaccttggttgaatgtgagacttatagattcagaggacactccttggctgatcccg

SEQ ID NO: 52873 - DNA, 531 bp, Arabidopsis thaliana landsberg
  unsure (1)..(531): unsure at all n locations
cgatgcagctacccttgatgttattgaccctggtattaatacgctttccggcgaatgtgactgccaatgttacttgtaatgtnnnnnnnnnnnnnnnnnnnnnnnnnnnnnnnnnnnnnnnnnnnnnnnnnnnnagaagcggtgccaatatcgtcggtgctactggcagcagcctgactatcaacaacgtttcggatgcggatgaggacaattactccgtcgctgtaacaaactcgcttaactccggcttggttagcggcttggcaattttgaccgtcaacgacccggctatcatcgctcagccagtcaccgccattacgggccccggtagcaatgctgtattcaacgtcaccgccatcggttcaactgcccttacttatcagtggaatcgcggcggaacacccatcagcctcgttgactcgcactattccggtgcggataccgcgagccttaccatcctgggtgctgccgaccctggggatcaccttgctgaattctccgtcaccgtcaccggtgctgatatcgtgaaca

SEQ ID NO: 52874 - DNA, 551 bp, Arabidopsis thaliana landsberg
  unsure (1)..(551): unsure at all n locations
tcttgtgtnnnnnnnnnnnnnnnnnnnnnnnnnnncccaacctatagaagcatatgagcaacaggagtttgctaaggaagtcaagtgtgtccttgatcatgttgtttgacctatataatatttaatagattgttctcacctatgcattgcaaagttacattaacttgtcataatctaatagtttatacctagatttgttttccctatgccttgtttacaccaaggttacttgttattgggtagacctgctaatcctcaacttagtttttgggacaatgatacatatgaatcatgatgatattttattacgatttattattgttcatttatttattatgcatgataaggtcacctttttaaattagaacatggagtggcaacacgagaagggtttcactctcggaggtggtgaatgcgatgcaaggggcgcttcgggttgttcccttgcgtgagtctgaatcagtcgtctcctgcctcgaaggcctcatcggttagttccgggagctcgagaaggaaccttctgccacatgatctgccagactttcacagtc

SEQ ID NO: 52875 - DNA, 848 bp, Arabidopsis thaliana landsberg
tatttatatctcgtagtctgttggcgagaaatgcatgcctaaaggaagcatcgtgtagttagtttatgaattaaaaactgtaagtcattgtaaacatttcaaactaagttatcaagttaatatagttgttttaaatgttaaaataaagtaattaatcaagagaggttagttactattgttttgtataagttaggtctacctctaaatcttcagaaggaaaaactgagaaaagcaaaacaataattgtatggaacataatggggccatgaagttatatatatgtatataggtaattaggtttgtatcttaactttttgaaaagaaagataataaatgcagagctttaattggtgtgaagcatgctggggccatgaatttagacgctaacgttttgtggctcgcatgactctacaattaaaacctcatcacagactgataggtgccaccaccatagtacgacttggtgccaccatcgcttctttcggtatggactaattggtgccaccacccatagtacgaataataagtctataaatgaaaaggagaaaatagatcaaaataaaattgtataaaagtgtatttttcatttatctatatgaaggaaaaaattgagcacgtaagactgacagtatactattagaataagaacaaatttgtatgcatatttctgtttttttttttaatgtatttccgttttttaaaaaattaatataattttatgtataaagtaagaaattaccaacaccagtcgattttttttatgttttaggaaccaaagtcttgaatcacgtgcgcttgtatactagcgataacctcttggttgaacgaccaatgcgaatttggttttt

SEQ ID NO: 52876 - DNA, 641 bp, Arabidopsis thaliana landsberg
gtcagaagataatattgacgatgatgatcaggatccactctttggaatgggttctcgacgagaccgtgagaaacctggatattcaaggcctggaaagaaacacaaatcttcaagagatggagaaccaatttctgaacattttatgggtccaccatattcatcaaggcagtaccacagcaattactcaaaatcgagtagatatgctaataatattcagcctcacgcatttgccgaccagatgaagcctgtaaaaggtagtctagcagaccttcgtggtgacttatatcggcatgggaagaatcatggagatggcttttctgttgatcccagatatatatctgatgacttgaatagtaaaagcaaaaagttgaagtctgagagggactcacctgatactagtttgagatcttatagagcttctatgcaacaaatgaacgagaggttcttaaattctgattttggcgagaaccatgtgcaggaaaagattagggtgaatgtggtacccaatgcaaggtctggtgttgcggctttcagagatagcaggatgttcatgggaaatgatgatacagagtcggattcatcccatggctatgatgatgaggaggagagaaatcgcttaatgcggaacaaatcttctgtct

SEQ ID NO: 52877 - DNA, 714 bp, Arabidopsis thaliana landsberg
atctattgttcgaatatgataaggacatccatttcgaacaaatagataatttagtctgccaattctgaaaacattgttttgacactgagaatatcaaattaatgtatgaaattatctattttatctagtgcccgtacctagttgaatccgaagtaatcgatccctgtgtattgatttgaaagcatttggtcataaacattggcgtgttcttgttaaagagcagtcgtcagatatcttagaaactaatggcagttaccaacgatgttccaacgagcacccaatttgcctacaatgacgaaggctggggacttaaaattgattcgaaaaaacttgtaaaaaatatattatacaaaagtattggtcacaaactttgttatcaccgttagtgattcaaaggtagtcagattgtatgaactttttagtcttaatcaaaaattggtatagttgaagaaaaagaaaaatccaaagaccggcaatccaaaacgtttagttactatggtaatttgtaacttccgtataattaacagtttaatacagttcagtacttagcagagttccgttgtaacggaataacgggatccagttgattacgttttgaaaccagtaaagtcaaagatattattttgttgttaagaagagaaaaaaagtcaaagttatcctgtttgtttgttttccccaaattaagaaaaaagcaaaggcgtagagggcgttaga

SEQ ID NO: 52878 - DNA, 743 bp, Arabidopsis thaliana landsberg
gtagcaaattagcaaccgacattaaactagtactaatataaaatagacatagttattacttaatgctaattaatccaaaaggagaagtatactcatagtaatagttagagctcacctcatgttttcctgtaaaacaataattaatatttgcagacattacttagcaatcattatctttgtgactttatttagtttaacgaataaagtgtaaatcccttttttacttgtgaattaaatgtgtcctatgcaaagtccaaacaaataaatctactcatttcttctacttgttatatatgtataggtgggtttttactttttagtttatacaaatatttctgaaaatcccttattacaaataatgataataatttgttagcacatgtgacaatacttgcaagttgcaacgttttaaatcctttttggctttttcggttaaagcttgcaacatttctttggcgacactaaatctacatgtcatttttttataaatatacatatatcgtccgtaaaaatgtctgaggaaattttttgtttcttgttttgttttattcaaatttggaaattgtgttttattggtccaagcaaactaaaataaaatcagacacatgcattggatgttgatgtggaaattcgatcgcttatctgttatatattggtgtaatacatattttcagaaaatattcaaatagtaaaatccaagtggtgcatacttatttttaaaaaaattcatttgtaaaaataca

SEQ ID NO: 52879 - DNA, 948 bp, Arabidopsis thaliana landsberg
caactcttaatcactaagagtgacttgattttgaggagaaaacattccattttgtcaggaactatcctcgatttttaagtgatgtaaatactctcgtctaatcaatctaagcaagtttatacaaatgtataacacataataaccaacataaaagtttcatatagttaacaagtcaagtgccaataatcaaatatcaactttgacatcttcaaaggattttagtgcaatatatgaatcttctccttactacgatgtcattacatatgagagtctaagaataatgaactgaaacttcaaatctcttgggtaaattcctgaagacaatccatgaaatgagtgatgtcgagtttttccttcctaatgtaaaccggctcttcagacctgccatctccataagaaggtataactgcttaattggaatctgaaaaaagatgtgataaacccgtgggacaaaatgtttagaaacgacgataattaataaataaaagtgtgaataagatcaaaatcgtaagtgaataaaaaaaggatatgagattgatagaacaaaaacttctccgacgttagcgaggaagagatcggcggtttcgggaacggcgaaacgatgtagatcaaacggagaacaatatgcgaggtttgttaaagctaaatctgactccggtgtggtcttcactgtcatcttcatgacaaaagaatcggaaaaatcagccatcattgttttttggtttccttcgttacaaagttttgtggtttatttgtgagagtaagctagaacaactgtatataagtctcctacaatatattcccgacacttgaaaaagggaaataagtcattcgacaaatagtattacgacacgtacacaaatgttatggcaagtaaaatcgtgaaattgaaaactttttttacttaaatacggttttccggggtaataagtattttacttctaatta

SEQ ID NO: 52880 - DNA, 1032 bp, Arabidopsis thaliana landsberg
gaaacccgagatcgaaaccccagccatggcgggtcgttacggatcgcaagtcatgacgatgactgtgaccaatactccgtccgcagatctagcttttactaacctcgcttactgctcttcttccgatctccgtcaattctccgttcccggttccgatctcttcctcgccaacgttgccgatagcttcattctttctctctgatatcctttcttatttccattttacgattcgtttcttacattgcaatgcgaaatgcgatcctaggagttgattgtttatgtgatatggctaattactgctaaatttaccaaaatcgatcttcgaatttgaatctcggccttatgaatggttcttataatgattgattgatctatgagcgtagtaaaagttaggtttttctggttttcatggatgataaaaatctgggctcctttggtcgttgacaatgttgaacttgttgttcattgtgtcatttgtttcgatttttgtgaacttaactggtgattactggacatggaagcatccgtgatggaaatattgctctcaatgctattcaaaggcgacacgctagagtttcgactggtgatatggtatctgttagcaggtgattatacagcttgtttttatattaattttctggcatgaatacgtttttggtttctgaatattgtcttgttcttgcagatttgttcctccagaaaattttgatctggctatgctgacgctggagttggaatttgtgaagaaaggaactaaaagcgagcaggtttgtttgatgtctatgatgtgtttcttgagatatttgtaggctttgtgattgaactcaacttctctgtacaatattactttacaggttgatgctgctctcctttcgacccagcttaagaggaaatacaccaaccaggtagagatattcttgttctgctgtctctgttattgctagatgtttggttttaaagatacatgcatctcgtgctgggtttaagcatgcatctgagaggcaaaatgagagtactgggtttctaaacaga

SEQ ID NO: 52881 - DNA, 910 bp, Arabidopsis thaliana landsberg
actccaactctctatttatttttgttcataattaattttattggttttcaattatatatatattttgactagtaatctataggttaatttagtaacgaataaagatagatgaacggatggaccattaatccactacgacgcttagggaccaactttccacaagtgaggaaataggaccgcgactaccacttcctacacacccgtgataatattgtcaacgtcattcatgctttttcacctaaatttctttatcttagtggactaggcaatcaatttgaaaactctactacactgagttccaaagtttaacaaaaccataaatgaagagtgctacaaatatgtcatgtttcgtcgtacaacaagtttcccctttggctatacactaaaaaaaaccaacaattttccctgattatacactaaaaaaaactaacaattttccctgattacggtcaaatgctagctgatacacagtgtattttacacacctcgtcgtaatgatgaaagttagattcttgtttcttgacagtcgacttgtcttcgacgtaaattcgtcaaaaaagtcaatttccaatggatttctaaatgttgtatccgtcaaaactcagaaatgagttcttttattgtaatatatatggttatactatagagttaacaatcgtaaggtgttttattaacatcggaaacttttcaaggagttccacccctctttcatagtccctcatttaaaacacaaataacataaaacttgtcctaaggaaacctaaaatcgataactctatagaaaacacaacacatctttttctgttctttataaactgaaatttttcaattgggaacaagtttgtttacttagtatcatttggtaaaaaaaaaaaaagatgctccaataaacccacccgcatcggggttg

SEQ ID NO: 52882 - DNA, 147 bp, Arabidopsis thaliana landsberg
tgatttaggatagtccctaatataccaattgaagtattagcacagaatcattttttttattggatgttttttgattgtaacgacactgaatcatgtaacaccagtttgtgaaaagattagcacatgtatgtatatagatcattttgt

SEQ ID NO: 52883 - DNA, 668 bp, Arabidopsis thaliana landsberg
tcgtattcctctcgcaattcctcacacattctcaagcttttaaacacctaaatcaagatctttgggattgaaaaacatatctcttataatctacggatgtagatatacataatatttcttttaacgaaaagaaatcaaagacaccagcgctcgcatagatgatttgttttttagaggattaataatcttgtttttgtttgtttggtatataaaaatatacacttatctctggtcccttacaccaatacataccatatataaaaagtaaagtacatacaacaataaataaatataaacatacaatacgaataattgtaatagcttatgaaactcgaagtttatattctgcattccaaataaccgattgatgcactatataaattatgtcgtaatgtaaccaataattatataatatagaaataaaaatcttaactaaacacgcttagtaatgactaatgagagtgtagatgaatataatgattcttgattcgcaacgctcgcaaattgcccatgtgcagcatattccttggttacttccaaggctacaagctaattaaaatatataaaaaaaaaattagatattgaaatcatttttaatataaaataaataaagtaggtaacaaaccccaccttgttcacagcacatagttgaacaaaaaacacgtgat

SEQ ID NO: 52884 - DNA, 1321 bp, Arabidopsis thaliana landsberg
  unsure (1)..(1321): unsure at all n locations
gttttctttgttgacttcaaagtttaattcgagcgtacgatacatttggtcggtgataaatatcgtgctatgagtttaatttgttgacttgaaagttttataaacattgtgaaccattgtaacatgtgtttcttgattatacatattcctaaaattaatttcatatggtaagagtgtaaaattatccaagtaatggtgtaaattttaaaagtcttttttttttttttttttcatcaattttaaaagtctttctctgacgttaaaaatagtcttgtcttaggtttgaataatatcggcattagccattattggtcgttactatgggatacttaattttgctaaatctttcagaacctgtacgagataagcgaaaaagccatgaaccacggtcacgcgtgtctcgcacttcccaactttcaccatgcatgctctcactaaagcctgtctttttttttctttcttttacatattttaaaatcataataccataatttgcactaattcttatggtaaatccgttttatgagatactcaacttagttgtccattccttaagacacagattaaggaaagtattcaattctttttgaagttatggtaataactcaaattcttcttttctgccttgaatacttggtacaatatcacaaacatatctctaaattaattacatgatctgcagaatcatttacataaacactttcacatttttatccatttaaaaaaaaaaatattatgatcctctttccttttcaattaattatcactaaactaaaaaatattattcccacagtcaaaagaaaccaaactaatttaaaaaaggtggcgcgtgattatcacgctcaaatgaccgatcggttccactgaattttctcagagattctcctctgaaaatgttttttgtttttttcttatgtcaaaaagaaaatttaccagaaatgattaaaatttgaaaagagaattccataaatgagttaattcgccagtcttgaagatcattacagagttttcagaaaccatatgtagtcttagattctcttttgccaaagaagaaaattttactctgccatacaactttttgtctctttctctactaataataataatccgaactttgtttggtcttctacttcaattcataatctttgacggcgatgactatggagcaagaaattgaagtcttggaccagtttccggttgggatgagagttcttgctgttgacgatgaccagacttgtcttcgtattctccagactttgcttcagcgctgccaatatcacggntgggggccttctctctctctctcttggttttttttaat

SEQ ID NO: 52885 - DNA, 482 bp, Arabidopsis thaliana landsberg
  unsure (1)..(482): unsure at all n locations
tccctgcaggagaacaggccggctcctcatcccctccccctttcttcttcctctgcccagcgctccctcttctccccggcattcagagcagggagctcgacgcccctgtgcagcccccacaccttcttcctcccatggccgagccccccctctattgcagaccgaactccatctccggccagcggtcacggcgccctgcacagtgttccctcacccctgttttcccccttggtcgcacatgagctccttgggccgacctcggcgaggtccatgtccatggcgccgagcagcagccccctccctgtccatggccgccagcccctgctcctcttcaccgagccgagctcgtcgtccctgccactacctcgctccctcgtcgcgcagagcntccatcgccgacctgcgcacgaagctacgcgctgcagcagcacgcatgagatcccgtccgtgtcgccagcgtcgacccgatctgcacagcggtg

SEQ ID NO: 52886 - DNA, 1100 bp, Arabidopsis thaliana landsberg
aaaatcaagaaattgagttcttgaaaactcttaagaaaaacaaaagagaagaagacattttcatactcttcagtcgatacatataaacaaaaaaaacaccatgaatttatcaagtttggggatgagtcgttgtggctcgacctctttcgctaatgctggtttccgcaaatttttggcttccgatatgtaagttcttttctttctcttcatcgttccattcggcgagataatagtcttcttcagttacttttttggaagagggtccacaaaacatacctccccattgcggaaagtaaatcaagcatattggtaatgaacatgcgattgacattacccccattagagttatacccgtctctctcgtgtatgtcgatcctttgaagaatatcaactgtgttaagaccgcgcctacattgcctcccgcaccagtcattcccgataccaccccaagagatctgcataaacaaacttttgtaagcaaaaatgttgaataaccaatcaagcaactcaataccaaaatgtatgttaccttctagaaataaagggaacaacgccaaaggtaagtccacaagcggcttggacgaatacagagaagacaagcataacaattatagacactgtcaaggaagaaatctggccaagacatgcgcataatacacctcctgatgtttgcacaatccaccaagcccacaaccttcctctcatcccaaaccgtctcgacataaaatcagagaaaattcctccttcaggtctagcgaaaaaattggctagtccaaaactcgctgctataatccctgctgtctggagctttaaatggaatctatcgaagaaatattctgcgatgatgttgtcaatggtaagctctactccaaaacaatagccatatgctaatgctgttatccatcccctatagttcttgattccattagatatcacttttcccacattatctttttccctttcttcaaatttatgcatcgcccaaatattctccatcaggaaagaacctacctcattttccaaaaacatatagcaaaccatagacaaaacaaaggtatccttttactattccttggaatagacaccacttagatgattaa

SEQ ID NO: 52887 - DNA, 1503 bp, Arabidopsis thaliana landsberg
accctaacggcgaacctaaatattttccgggaaaaaaaacattgacgaataagaccaatagagcagtagcacacaatatctttagagggatcccatcttttgattaagatattcgatagcatgtttacaaataaaagtaatgttttcataatgtctctccaaatatgtggtcttctcgtgattaattctatgaaactattaagttcatgggtaggtagggttgcttcaaagtaaatgacgttcgtggttactttttgaaagtaattaatgtatgtgggatcatcttctggtaccttagtatctttatgaggacatttatgattcaccgaagaaatttaaataacttctcccattttttcaccttttcactaaagagtaaagagtgatatactttgattcgttcttgtatataataaagtttgaaacagttctaatcgaaaaaaaaaaatcttcaatcaaatagttagaatctatgacgaagtcggactctagaataaaattatttagaatctataggtcagccaagtttttttttagtttgaaggtgaaaatggaattgttttcacattaatcattggaatattggaagcatatgatacattgaatatatttattcgaaccaaaagtcaaatcaacaaggaaaaatcaaagtcgtgaaagttttacggttttgtttctagctgtacggtaacgtatagttattaattatagccactaatattgactatgccattttagtatcattattgttttgcgcaacttcttttcaacttcagaatctgtagcaacaataaatgaattatgaatattacagttggagtgagtctttctagatggagtattgtttcatctttgcatataatagtgttatgttatgctcttacactaatttgaccatgaggaacatttttgcatctagatgctttatttaggtattgataaagagatacaaaggtccaaattgcacttttagagacgtcaaaaacttgggtaaaatctcttttttctgacttataaaataccaaaattacccataagaactcatgtatgtacggaataaccatttatgatactgacaacgatatcacgggctccaacgaaattgtgatctcttttgtgcgaatcttatctttcttattagtaaaatattaggatacacgtcgaatcttgtggtatggcaacgtggtacgtatctccaaagttgttcgttcggttaactaaataatgttgaatcaaataaaacactgcatgtaatgacaagaagattcctgttcggttggttcaaagtttgtaaaacgccaagttctgctgcaactttccagcattgaaaattccaataatatatgacaacacagaattatttctataaatcattataaaattttcgtgaagacatgttagggaaatacggagaaagagggggtggttaaggaaacacacatgaaccaagccgttgtcatctcgattattttcttccgagtagataatgattatcaatgtaga

SEQ ID NO: 52888 - DNA, 360 bp, Arabidopsis thaliana landsberg
ggtgtctgaggcgcaaaagaaggtaatccggagtctgggttttcaagtggtaaatggacatattgatggggatacgcaggatcagtatagcaagctgttctgcaatcccattcctgatacacagctggctgtgttggcagcaattttcggttgggcagtagaggaagggctggagacccgtccgagtctccccctggatgtgctctgatctgggaactctttagggtcgtcttcttctgttttaatgaatccaagttccattcttgtttggaatgttcgcgagctgaacatgaaggcccgtagggactctgtacgagatgtgattgtctcgtcaggagcagatattgtttgccttcaaga

SEQ ID NO: 52889 - DNA, 1031 bp, Arabidopsis thaliana landsberg
cctataaccccttctctgtcacagactcacacatcacgcatctaactatagttcccaattcattcttgtcgcatatatataaaatttttgtcaactaaataagtaaattagcaggcttgaaccaatttggaaatgtgaaacctacaaatgagaatttttaaccctaatagaggttgtaattttggctaatcatgtgtgttttttttaacttgagcgtcggagaattttcgataatatctattccaaaattatcctatcggtgttaggtatgtattatatgtttgctcgttagagggcttactgctctatagtgagttcctaaaactagcaaaacttctatcctaagttgatcaatctattcattcttaaatatttgcatgattcataagattaagataaattaacaaaaccctttgattaacctatttggtctcaatgatttttcctcatacatatacatttttggcatgtcgtcagtgaatattgttctgaacacgatcaacaatttttgtttatatttatcaagtgattttctaattttgaatttaaaagtatatacttccaaaaataatgagttgtgatgggacaaagaaagaatgagacgaataccaaactacatttcaaggaacaaatacactttttcataacattaacctttgaatatcatcaaagggccaaaccagtaagaactcacactgtgagatggcatgtctttttttttggatacgtctttgtctttgtccaaatcttaactcaacattacctggttttggacctactatcttttaattggttcctcttattttgttttcagcagtttatttctatgttatgctttacaaaaagtgacaaatattgggatccaattaaacattattaagatacgaatcttagatctaagtcacggagcgagaagaaaacaataattctgtgaaataacaacaattgatattaaataactttgtgaagatttattaaccaaaaatactttgcctcctactcttatgtattcggcaaccactctgatgtta

SEQ ID NO: 52890 - DNA, 547 bp, Arabidopsis thaliana landsberg
  unsure (1)..(547): unsure at all n locations
gttgaaagtcttttgtgtgcatataatgattcaactttatggctctgaaaatgcatcttgttcttaaggtaatgtaattaaagagatatattacaaactctgtgaatgcttacttagaaaagttaagaaaaaacttgtgattaaaggcagcaaatacactcattaacaactgaaacctccactattctcagagaagtgcaaatacaaatataaacctgtggaattatgcttattttcaacgttttaaagcttttgagaaaacaattgatatactagcgaggtagcctcaccaccaatcatcatcatttgagtcttccaaaatcgtctgcaatttcatcaatagaggcttctgagtttgtggagcgagcaaacatcaatcgaccttgtacattgaaaccttctgatttatgagcaagaagagtagtaactcaaggcgttgagaactgaagcgattctatgattccgattccactctcttccaggtaaatgtattaacagcagggtgtctggtccggtggtctcatcaaganaagacagagacagagag

SEQ ID NO: 52891 - DNA, 318 bp, Arabidopsis thaliana landsberg
  unsure (1)..(318): unsure at all n locations
tgttcacgattagtatgaaaatccacctcaaccgtaaactcacctaagtctatttctttatgttgagcatacatgcgcaatgtgatcatggtacatgatgctaggctagctgtaagaaaatcatatnnnnnnnnnnnnnnnnnnnnnnnnnnnnnnnnnnnnnnnnnnnnnnncaaaaattgatgcgttccactagtcacttcccctttccacggttcaggtaaagttagaacttttgcacttgcgataacactcattttgaagccctcatttgatcaggtagcgttggtgcttccaagcgtttgccttgataatctg

SEQ ID NO: 52892 - DNA, 1094 bp, Arabidopsis thaliana landsberg
acaaaacaatataatccacatcagaataagtaaaataaaagcaaagtagcaaacacatagattttaaagtttcgtagcaaacacatagatatcaaagcaacgtagcaaacacatagatgtcaaagcaaagttgcaaacacaatagttcttaaaccattaataaatctaaaaaccagaatcatcgaactcataatcatccttgtccaaaagagtgtcctcatactctgctccaagaaaatcatcttccatctcttcatcctcatcaaccaaagtcataggacgagaactattaggtgtcttgcgagatgctcttgaattaccatgtccaccagaatcactagcaataccttttcctttctcaaatctacttgaagcagctgctgatctagttgcataataaggatcattagctcctgcggcctcgccaacttcagcccatgtcaagtcatcattttcaaaaacaagctcatcattttcagtatcagatgagtttttctccattttccagtcagccactcattgcattgatcaatttcattcacaaaataagatcgaaggtgtcatttctcttgtatcgacgttgcagagcgcgattgtatttcacaaatatcatgtcgttcaatcgacattgagtcaatctattccttctttttgtatgaagctgttagaacagaagattataagttgtataattttttgtgcacaatataattaaagtaaataatagaattaaggtaaagttacttactagttgaaaaacaccccaattcctctcacaaccggtagcactacaagtgaggctaagaacttttatggaaaagttttggaggtttggagttgaagatccatacgcagaccaccattcagctagtaaaatgaaattatcgttcgcttttatgaaagattaaattacgaaaagaagatgttagacttgagagttatacctggtgacattttagttctcagccttattgccattggaataccaaagagacctgtagcttttttaaatgcatccaactcggttattatcttatcttgagtctcaatttttggaaccaaccttccaaggcaaccaagaaaacctcccaaga

SEQ ID NO: 52893 - DNA, 1784 bp, Arabidopsis thaliana landsberg
aacggcttagattttctgggaaggataatgaaagggaagaaactgatgttcgtaggagattcactgagtctaaaccaatggcaatctctcacgtgtttgctccacaacgccgcaccaaaagccaattccacatccacacgttccccttctggcctctccgtcttctcattccccgtaacgttttctaactttatcaaactcgttccggtattgatccggtttaataattcaggttcggttcgtatttaaatgcatgcaatgcaggcttacaattcttcgattatgttttcaagaaacgcgtttcttgtggatatagtcggagccccaccgaagcgagtgatgaagcttgactcaatctcgagtggttcgttgtggaaaaccgcagacgttttggtcttcaactcttggcattggtggcttcacacagaccgaaaacaaccgtaaaatcatctttatgtcgtcaaacatatcttgctatggactatggacttattagtatctaactaatgtaatcatttggggttgcagatgggacgcaattatgtccgggaatgtaacggttaaagacatggaccggttagtggcatatgagaaagcaatgatgacttgggctaagtggattgatcaaaatattgatccttccaaaaccaaagtcttcttccaaggtgtttctccggaccatggccggtaagttctacctctatataacttctttttgattcgatacatacattaaatcaacgataaaaacttaacacgattgatatatgttggattagtctataagttttcgttagaaccaaataatttcatgttgatattgttaacaataatggtacataatgttacagggcaagggaatggtcgaaacaaggtggcaaaggcagttgcataggagaaacaaagccgattatgggatcgagttacctggctgggccgcacgcagccgagatggtggtggcgaaagtgataaagacgatgaagaatcaggcgcggttaatggatgtgacattgatgtctcagctaaggaaagatggacatccttcagtatacggttttggcggtcacagaatggcggattgtagccattggtgtctctctggagtcccggatagctggaaccagctcttgtattctgagctgtttcattcttaaaattttgatggttttgacacaaaactaaattcattatatgatttatacatttatttgtgacctaaccatgtttgtgttgttttacacatttattttatgtcataaacatgtttatttagaatttcaaattcatttgtcaaccaaaatgtttaaatgagaacaagattctttgactggtcgaacaatttataagagaagaatttgcaagaatataaccttatgatctcgttataattgaatggactaaatatgtgtcctgaatctctaagtgagagattagaggaagaccaaaactagaagtaaaccttattccacgagaggggataactagcgtagcttatataataactttgtacaatgatttggggttaagttatttttggattgagcgtattacggtttttcaccgagggggtggctcgaagcgattgctgcgggctcgcctagtttgttacgtcagctccaaaaggataagttgcgttggaatctaatatagtggtgcaagccccttgacttgggtcaatgattcaaaagcttatacaaaaaaaaaacgaaaaaactaatagtaaaacattactttagaaaaaagttctaatcaatatttttttaaaattcagattctttatagt

SEQ ID NO: 52894 - DNA, 560 bp, Arabidopsis thaliana landsberg
gtcattcctttttgtcagcgttttacaaagtaagggtttttggggtttagaaggtacagctcagggttttttatatcagcacaaccatgtgtctctcgccaattgtctgaaaattctgccaaaacagaaacaaaaagaaggaaaatttggcattgagagaaaagaaaagagtagtactgagtatgaagagcatcaaaacgattctttctatctgaatatagccataccagaagcagaagcagaggcagaggcagtggttgtctccttgtgagaattttttggtgtagtaggatgaaatggttcagtttcaggttcaacttcaggaggtgcatcgatgatctcgttcccatcattcttaaagatttgcacttcaagaaacatcttgtcatcgtgtctgaagaacacgttatcatttgggcctaaatggttgtcatccacaaactcatcccaatcttcttctatcataaacagatctttttcttctcgctccagccagagttgccaagaattgccccaacgaacactgaacacaactctgtgctcaaaagcccaaggagagc

SEQ ID NO: 52895 - DNA, 257 bp, Arabidopsis thaliana landsberg
ataatcctcttaataaacccagaaatcaacaaaacaatacttacattcaaaagaggaaacatgagactaaaactaataacattctacagaaaaaacacaagcagcaaaaacacgagcttaaaagattggattgtaggtcaagaaatgcagagaaaaggactagaaccaacactagcataaacatgagctaagggcaaacgaaacctgcgacgtaaaagtacccataacggtagctaaaacaggtcaataaggtacaa

SEQ ID NO: 52896 - DNA, 1222 bp, Arabidopsis thaliana landsberg
  unsure (1)..(1222): unsure at all n locations
gggggagaccgcggtgccatgaaagagccagggagaagagatgaggttggtattttacaggtagctttgtcttgtttgtattgtggaatttaactaagtaattctcctattgttgtgggaactggtgatagagttgatgtctagctcacaaggtccatgggcccttgtgtctccccaagatggaagttaaagccagcctccatttagtaggatgtaatgggttgacattaaagtagatgccttggttttcggtttctgtaatgggttgactttaaaatagatgccttgcctagagtcattagttaacatcttgtcatgttgtttaattcagctttcacagtctgagtccctttcttggttttcactctcttgattccttttccaatttcctcttttgcagaacaaatatcatcctagctcactgaaccatcaacggtatggatcataagtatactgtttttggtagataattagtgtcctgttaaaatctttatctccgtcttaatatttgccaatatgtaaccaaacttctacttatatatcagttttagctatctagttttctggctacaataaacctctctgtgctcagtaggtaactctctgattcttgtatattcttttgctgacagacaggcaggagtccgcattttgaagaatagcaaaaaaattactgatgttcatcaggaggataacgttagtcttgcacataattggttcattctgtttttcaagatattgctcagcagctgcttattattatatttacctattgcaggttgaagccagaagctcaagttgtagctgtgagttcctttttgggaaaaacttttttattttacttacagaaccatgatgaactcttttctgcttcctttttgacaagaaaatgtttcctgacatgtgtctcatcacgtgttataatgacagtggacaacatgtctgaacgtgtaaagccgatagaacaagagaaaatgccggaaccttctagtaatggttttcacgatgctacggagagaccctcgtcaactgaaaatttttcatcacagagcactactgtggatgaaaactcaaaagtgagtctggttttggtggtgtccnctggttgcttncctcctncgcgtgcttcaggccctcncctcaaggcttccccggtganggattcgggttggtttctcngagtcactatctgtgaaagtaaatggtgctcgtctcggttctc

SEQ ID NO: 52897 - DNA, 714 bp, Arabidopsis thaliana landsberg
gttcatagattacttcccccaaaatgtaacaaaatcatcaacctagaagtcaaagtaattgaagcccacaaattctaaacaccaacagatctttcatgcctagggaaaccaggaaaaaaaagtttcctttttgcatcaagagccctacttttttatttagacctagctatgcaactagaagaaccctcaagaagatgataaaacagaaattagcgctccgaattagagagagggagagagagaccggaggatgatgaaagagcagagacgattcctgacgagagagagagagtgaaagaagcaagtggctacgtgtacagagacgccctttcattaaagcattttcagatttgactatttgctacagatgaaataagcaaaagacgttggtgttacagagagaatacggtccgttagattcacgtttgcgtcatctccgccgtcaaaaccatattctgtgtcttgaaaatgatgatgagatgaaattttcttacacaacctattgctacctttcctttctttcggtcttcgtgtaaactgttgtcacttttttttttttatccaccaccaatgaaagatgatgcacaacaatctatacatgaaaacagagtcatatatcttgttatttccaaaagatatccgaatgttttttttattatttcaatccttttttatacaaatttcaaaccatgaactgaattttgtattatgtaa

SEQ ID NO: 52898 - DNA, 1166 bp, Arabidopsis thaliana landsberg
acatgcttttctactgggtctgtgcagataatggacacactttctgagattcaggaacgccatgacggtgggagagatttagagaagaaactccttgacctgcaacaggtaaacctcgatccgattcaccaaaaactctcaagaattctcatcattgattcttctcttttatgtttccggttaggtgtttctcgatatggccgtgctggtggatgcacagggagagatgttagacaacatagagaatatggtaacaatctcttcagtacctgtttaaatccctgagcttagatctcttcaaaatcctttcttactctgtttctgttctaacaggtctcaagtgctgtggatcatgttcaatccggaaacaatcaactaacaaaggcagtaaaaagccagaaaagttcaaggaaatggatgtgcattgccatccttatccttcttatcattattatcattactgtcatctctgttctcaaaccatggacacagaaaaatggtgcttaaggttctattctctctgccctgcttctgaggcttctgtatacaacagtatatacgtgtatcatcgcatcaagtactattgaccttacactatcactataaaaatgatgtattcttttgatctgatcaatgaatcaactattttacagaggccaaagtcgaataccatttcagtgaacaatctcggcccaacgaatatgagtatgaatatgaatatgaatcaggactcagcaagtttatattaaaattctgttgaaatatacctttatcttttatatctgtagtgtgtcaaaacaaatccagaaaaaaactattggagaaaaagggataaagaatctgaatatgaacctttaatcagatttactatgatgagaaaaagaagagcaaaagatacctccagcttcttatttgcttcaagggaagccctcagagaaggatgaagcataacggacatcctttgctgcatcagttggccgtccttcgatgcataagggcgtccggaggcaataccgatatctttgagaaggtctgacgtataaagagtatgcaactaacttgcaaggagctactaaccaaagaaataatactaaaagcttattctcagaaaggggaaaaaagcccggaaactgtaaaaaacaataaaaaaaacccttgatgtttgc

SEQ ID NO: 52899 - DNA, 961 bp, Arabidopsis thaliana landsberg
aagattcatctcagctaatatatcacaatggatgtgtcctcaacgagccaggggttccatgtgatgaaaacagagtttcagggtatgaatcagattcctaattacaggaaatagaagatctgagatcagataaagaaaagatggcagtggatatcgaggggctgaaatgtcagttacaagcatctgagcagctgttagctgacattagatcacagtttgattcagctcagaggtcaatcagattggcggatactcaactcagatgtatgactgagtcatatagatcacttgaatcacgtgcagctgatttagagatcgatgtgaaccagcttaaggaaaagatacagaagttggagaacgagcttgaggatgaaaaatgcaaccaccaagaagccattctgaggtgccatgaacttgaagaacatattcaaaggtatcatctttaccagaatatgtaagagcctgaatttacttactgctttttacatgtctatattttcacttttttctcagacacagaaacacttctttggttgctgaggatgatgaagaagctgatatcaagagcaaacaggtaatgttttcgcagactctattcaatgcgaattatgttttgcttctgatatttcagctttttctgcattttgattcgtagctcatgattcttgatccaagttaatttgaattgaagctaatatatcatctacctattcattgttcaccgtatactacatgcaatcagtttaggtgcatatacatatcgaatcacagacacaaaaacaaacacaagcatacacatttataagagaatctacaggcagaaattcctgagttcataggactttgaagcttttgagtaaaagagaaaactaacatgaaaatactcatacaggagagagagttatcagcagcagcagtatagttagcagagtgtcaagaaaccatatttgtgttggggaag

SEQ ID NO: 52900 - DNA, 1095 bp, Arabidopsis thaliana landsberg
tgtccggaaacagttttatatcaaaatctctgcaagaaactctatatgaatattaacttcttttcttctctcttgtttgcttttggttctttggtttcagtaattcaacagtagaggtattggttttaagactctctttccatttctaacgtctatgacatttgccaaagcctaaatttatacaaaacaacattttttcaggacttgagtactcaagcaaggattctgcaggctcggatttctgagatacatggaagattaaggtaaagatcttgctgaggatgatagttctttgttctcttgatgtctgtgctcttttttatacttgtttgtgtcatgttctacagttattggacggaaccagataagattaacaatgttgaacacttgggacagctcgaaatttcgattaggcaatcccttgatcaattgcgtgcacacaaggtatcttttgtttaaaacttttccatttcacttcatccgcgaaacaaaaaactaaaaactcttctgttgataggaacattttgggcagcagcaacaggcaatgcaaatagaaaacgcaaactttgttaaggattggtcaacatgctcggtaatttactcgaatgactcttctttagttctcatttgtaacaaaacaaattgtaaacccggctgtacaactttcagatgcaagatgggattcagattcctttagaacaacagcttcaatctatgtcatggattcttaatagcaacaccaccaacattgtcaccgaggaacaatattcaatcccgcagaggttagtgaaaactctcaccgagagaacttttctttcttttaatattgaatcatatcttaaaaccaaatctttgtctatcctcaaaagggaagtcgagtgctcagcgagttcttcattcgtgagctatccaggctactttggaacagggaaatctcctgaaattacaattccgggtcaagaaacaagctttcttgatgaactaaacaccggacagctgaaacaggacacaagctcgcagcagcagttcactaataataataatatcacagcatacaatcccaatcttcacaatgatatgaatcatcaccaaacg

SEQ ID NO: 52901 - DNA, 727 bp, Arabidopsis thaliana landsberg
agtggtccattggcattgctatcagcccttctcagaataaagcttagacaatttaaaatctctaattatcattctctgttgcccatgccaaaagtttatgagtaacatttctagacagatcacgtgttatgaatctggctaagacagatcacgtgttatgaatcagtttctaaaaaaaaatattttttagagttttcacacgttaagaattttattaatgtttaattataaatatactattttgcattaaacaatttccataattctaacccaatagtaattcaataaatataaaattatcaatcaatatttcttgaaaataacaatatcttgttattatttattgaaaatacattgaaaacctaaaaaatacatctttataaaacagttttttttctttctagaaaatacactaagaaaaagctgaggcttcacaaccgaattgttaaccatcttgattttgggagtagtttgtgaattgtaagccaaaagaagaattgactaaataaaaataatagacggataaaactgaaattatgtgcattttagttaatcacatactcatattttttttaacacaagtacatacttatttatataaaaaaaattgccgatattatacgaattactgaaattaggtgtataatgaaataaatgttaaaaaataaaaaaatatataaaaggttacgaattacacaacttcaaaggctcgttaaaccctaaaacc

SEQ ID NO: 52902 - DNA, 462 bp, Arabidopsis thaliana landsberg
  unsure (1)..(462): unsure at all n locations
aaacctgctataaacaaaatccttctcattgtgtaggcggattaaatcatcaaccaacagtctccaccttgattctagcttgaatggcctgatgtgagttatttttaattcttgtttgaacacatttaatctcagctctatgtattgttgaatgttccacgatggttacaagtgggactaacctctgggggtggngatgacggaagaataactttagacacccaccatggtttgaagggggttgtgtacgcacacacatattacatgttgatgtttgcctttgcttcaagccatttttttagtaaatctgaagaatagttcgggtttgatcaactcttgaatttaaacagaaaacaagattactaaaaaatacctgacactgaaacataaaactaaaacattaaactaaaactgcattatttaaaaaaaaactcgaaacttgcacataatcacaaactcaag

SEQ ID NO: 52903 - DNA, 471 bp, Arabidopsis thaliana landsberg
ctattctatcatataagcatgtcccgtaaaatttaatattattttttattttcttataaaggtcaaacaatataatatttgaaattttatacaagtattaatatcgactcaaactactcgtagtataacgtcctgtattaatatatttatatccagcggttagacggaccgacccgcggatctgttgatgtgtagtcggcgaatcattatacacttctctctatatatatcaccattgaagaaccttctttcattcttgaaactaataatacggctcacctattggctcctctcttttatagaggaacagagtcagtgcttgggtttaacaaaccctaaagtcttctcacgtgtggttaaatgaacctgtgacattctgcatcattttgaggtattgctacactttttaaagtttaacctaactcaaatctgcaacttcttaaacctgctataaacaaatgccttctcatt

SEQ ID NO: 52904 - DNA, 832 bp, Arabidopsis thaliana landsberg
aatgatcgaatatttatatatcttggtgcttatcttatatgtatgattaaaattgttaaatgcaggcttcggtctcgacggtactgacgaacatcatagagagcctaaggaagattcgcggcggatcatcgaagaaagttattaagattctcggtgttccatgcgacgccgtttcagtcttcgtcagattcctctattcaccgaggttggtctttctctctttttcatatcttcttgatcgtcagatttttttttttaatccgtagatttattacttcaaaaatacaaatcatactaaaaagaatgcttgattaaatacatcatcttaaagatctttaccaaactcgacttttccaacgttttaatcatacattaaaatcactacaaccagattgcgattgatttagacttgtttcatattcaaaaacgtgtgaaacacaacacaaggaacacgaaactagtaccaacatcaaatttgaataaatcaacggcaaattttacccttagtatgcaaaatgactaaaatacccctatatgtatcttttgtttagtgtcacggagaatgagatggaaaaatacggaatccatctactggctttatcacacgtgtatatggtgactcagttaaagcaacggtgcactaaaggcgtcggtgagagagtaaccgccgaaaacgttgtcgatattctccagctggctcgtctctgcgacgcacctgacctctgtctcaagtgtatgcgattcattcactacaagttcaagaccgttgaacagacagaaggatggaagtttcttcaagaacacgatccttttattaaacttgacattctcc

SEQ ID NO: 52905 - DNA, 560 bp, Arabidopsis thaliana landsberg
  unsure (1)..(560): unsure at all n locations
tgcgactttagaaggttaaagcggtcgtctaggcgncacctcagncattaaatgacccgnatgatctaagcgaccgggtaagccgattttttgaatactgataaatactagctaaaatcctttgttatccatttaatgatttatttttggattttaaattgcatattaaattcttaatagatttgaaagtaaaatatataaagattcaattatgtgggtttgccatattagtttaaaattcatatatcagatttcaaaattaatgagaatttttaaatcacatatggatttataaataaataaacctataaagacttttaaatttcttttttccagtatgctcattcacgtggtagcattctcattcgttacctttctaaaattggaaaagcaacttcatcatacttaatattaatagatttgctcatgtatgaccaaggctcttacctaattgaattctatgaagcgttcaaatgtgtgtaatttgtgacgtattaatgaaatggatacttctttaaattatatcaggtcttatgtttatgattatggtgtttacagca

SEQ ID NO: 52906 - DNA, 1378 bp, Arabidopsis thaliana landsberg
  unsure (1)..(1378): unsure at all n locations
acaaacactctctatctctaacatctatcaaacaaacttgcattaacatattattataccttcttttgtctgtcttgagcaatagtgatcaaatcctggctgtatatatagcaaagagaaacttaaatattttcaagtcaaccttttctttaagccgcaatatgaaaaaaatctgtaattacatttgcatttgtggatcgtttcacattcacttgtcaaagatggtcaaatcctcctaagtcgtaagtcctaacacatacatacacacatacaagttatgtttgcaacgagggggagactactccacgactcacattgactgtatggttttggttgcttactacctatgcgtgtctctgccacttgtattatatataaacgggatcttgagttcatgtaagaaaaactaacaaaagcgcaaatatcatatgaaaaatggataaattatcctcacaagtttattgctgtaagagagacagacaacatagctaaagtttttaaaatggataaattatccgcaaaaggagactcatgttcatttgctatagcagcagtaacctgaagagataaaagagagtttgatccttgcttcaacgggttttcttcttcgtctttgtctcgacgttgttgttggcaatggcagcagctgcacaaatctttttccagcaacggaaagaaatgagtgaaggtatcaagacccaccaacagttagccccgatgtagtaagagtaatagtagaaagagtttgtggcaaagttgtctccttccaagatagcagtaatgaaataaaccaaacatccgtagagctggcaaaccgaaatcgcaagctgaagcacgtagctatacgacttctccttagcaatggcataactgaatttccatcaacaacaacaaacttcaattactttttagtaaacacaaaaaccaaaatggaaaagaatgaaacttacatagctaggagagaagctgggccaacgataacagcagtgatcccttcaacagatacaactgcagaatctctacctacgtatctcgaatcacctttgctatattctttccctgtgaaagaaacaaactttagcttcttacgaattggtctaattgaacaacaatgacaacactaagaagaagataaagaacttacaaacttcagcaagataagcagaagtgttgtccttgaaaaactcaggggagaaaacgaaatagccctcgagaataacatgagtgagaccagtgaatgtccaccaacacataagcaacttatcaagtttagctttcttcctccctaaaaccaaccaatcagcaaaattctcagaattgggtcaatttggcagagtaaatagatcaatnttggtacttncatctgtcagtttcaact

SEQ ID NO: 52907 - DNA, 729 bp, Arabidopsis thaliana landsberg
gacttcaatgacctttcctacttaaaatttaattaaataatatgatttgatacatcataccaaggaaccaagaatgctactgtctatacatttcaaggcttatttttatcatcagtttgtttcgtgattgaataataatatctttttagatgaaatcgggttggcccgttgatgtcaagcaacgatgccacattcgactattaggatccactgattttggatatgcaattacctcagtgattggcaaatatgcatagtgagtgttgattatgcctaccgtgattccactgtatccagcaaacgcaccatgaacctgttttttataagatcataagcttaacaaattcaatggacttaaaacaaatcggaacatttttagtttctacttctaagattcttatctaaagtgatgagagagtgacttgaagagatgtgtgtgtgagtgacttacagcgttttgtccaagaacggtgcagaggataccatccgaggcatttgcacgtacagcgcgaatcatgtatgttggatcaatatacttcacatctattggagtacttatttctttgaaatacttcttagtctattcgacaaaacaagaagaagatagattgtcaaatcataaagaagcaacaaagtttacactatggaaatctcaaatctcaaccaaatgttgcttatatctaacctcttgttgaatatacacaccatgatcgccaagatcggcgttta

SEQ ID NO: 52908 - DNA, 1143 bp, Arabidopsis thaliana landsberg
taagctcatctgaggaactcatgtagtcagaagttaaattcaatttgctctcaatgatattatgtacaaaagagtaagctaagtttgttgaattattaatttcaattatgaaaataaaaaagtttgatcagcatttatcaaactcatatcttagtttcacctattttcaaaaacttcatactgtgaaattgcaaaaagcttatgtacaattttgatttgcctataggttttgtaatttatcgaatctgacaacacttaattttgaagatacactaattcgtgtagactctctatctatatgaagtagaatatttaataaaactttaattattgctttgttaaaaaaataaaaataaattatgatcgctcgtccgcaaatatgaatccaaagctacatacggagaatgaagacatgcaaagtacatcaataggattaaaatacatacaaaattaaattatcgggataactacaatgttttactattcgctttataaaaaaatattgtaggttattgtacgtaattcttttagccagggtcaataattttttcttgaagatctttcgagaaaaacatacacgtgataggctcctattcgttttctcgtcaaccaaaaattctatcactgttttaaaaattccacgagccgcatcacaatgaacgtgatatgaacgtacggttagattcgtctaacggtaacacatgaacgaccacgatcgataaaagtgagacccaacaaaaaaacttctctcaggtgtggcatgacgtcactattcgacgaaacaagacaattaaacagaaagggaaaaacaaaaataagtgaaagctgattggttgatgtctttctctgtcgatacgccacgtgttatattttattttccttatgcgtgattgagtgttccataaccactttatttattccctcccttcgatagatctttttggaattttatattattttgtttttctttcgaactttttgctcagccaatgagatttcttcatatgttgggattcaaaagcccacgaagatttttagatgtgatgtaatcatcattattggctactgcagaatgggtatatctatcatgcgcacatagcatctcgccacttttttatatagcaccagttttatacatatatg

SEQ ID NO: 52909 - DNA, 530 bp, Arabidopsis thaliana landsberg
  unsure (1)..(530): unsure at all n locations
attatttattattacgacttctaacctagaagataacaagcattagttagggcatcaaaatcaacgtggaaaaacctacgaaaagcacgaagtgattaatctgtgtaggggtggcgtaagggtaaagactaaagactgagaatctagggttcaaggcgtaaacttgttctgctttttgggtttcattntattggcgaacaacattgatgtgtgtggactatttggtgttcagggattgagacaagataatatgtttgctctcacctttctaggattactcggtgctaagactcacttagacgcccaccgctaatttatcaaaaataaattaagtactattgctatatcgatatactagttcattaccaaaaaatggagttcaaatttcgagttccaatatctgaaagcattgtttaaagagatttgttttctccctgcacaattagtttataacttcatatatacacaatcttatcaatttacaaccaggtgtgtgtgaaccttcacataatctctcttattcattcatg

SEQ ID NO: 52910 - DNA, 653 bp, Arabidopsis thaliana landsberg
  unsure (1)..(653): unsure at all n locations
atcccgattcatcatcaggaacattccggccagctccgccgataccgattcccaaatacgcaccatccaatagaaatcgtaatcagaaaactaatcatcaaaccgatacaaacccgaagaaaccacaatcaaatccagctcttaagcttccgcatcaccgaaccagatactacaaaccggttaaggaaggagttatctcctcagacggtgaccgcacaatcttaatcggcgattccggcgtctcgtatcagcttcccggtgcaccgttcgagtttcaattcagctattctgagacaccgaaagttaaaccggttgggattcgtgaaccggcttttatgccgtttgctccaccgacgatgccgagaccgtggactgggaaagcaccgttgaagaaatcgaagaagaagattccattgtttgattcttttaatccaccgccggcgggaaaatctggagttaagtatgtaganatgcctgggnnnnnnnnnnnnnnnnnnnnnnnnnnnnaggaatgaatagagaagaggttttaggagagccattgaagagatgggagaaaggaatgttgattaagctcatatgcatgataatcgcangttaatttgggtgagtattgtgttgacttgtctctcttangagtttgattggatttg

SEQ ID NO: 52911 - DNA, 2243 bp, Arabidopsis thaliana landsberg
  unsure (1)..(2243): unsure at all n locations
tgttcctgaaatgggattaaacgagcaacaaaatgttccaagtcagaggaagatcatagtttttatagtcttagcttttataccaatagctctgtttcgactctgttttaataatccattctcctccattaaagacacctctcttcaagactctgcagctaacgttgtgatcactagcttctcttcatcttctcaaggtaattattcaacttcttcaatattgtgtatatccaaaaactgaatggatttttttaactttaggcttgttgtctaaatctgcagaagaagaaagccaagagagttttgatcatatacaagatgaacctttatgcgattatacgcaagggaactgggtcagagacgagattggtccactctacaatggttcaacatgtggaacaatcaaggatggtcagaattgtttccgccatggtagacctgattccggttatctttactggaaatggaaaccaaacgaatgcgatataccgagattcgactcgaaccggtttcttgatcttatgagagataagcatctagcttttatcggtgattccatggctagaaatcagcttgagtctcttttatgcttgctctctaccgtctctagccctgatctcgtctatagaaacggagaagacaataaattcagaagatggcgtttcgagtcacacaacgtcactgtctcggtttactggtccccgtttttggtggccggtttagagaaatcgggaaacttggaccacaatgtattgcacatagaccgcgtggatgagagatggggcaatgatttagaacgttttgatacggtcgtagtctctgtgggacattggtttctgcatccggcggtttactacgagtctggttcggttttgggatgtcattcttgtgaaacaagtaactgtaccgaggtagggttttatgatgtatttagaaaagcgataagaacaacgttgagagcggttgctggaagtggtcgtgaggtgatcttgacgacattttcgccatcacattttgaaggacggccttgggacagtctcggcgcatgtaacatgaccaagccgtacgaagggaaggttttagaaggtctggacttggacatgcgcaaaatagaaattgaggaatatacggcggctgcggctgaggtgaggttagaggtgttggacgtgacggctatgtcggtactgagaccagacggacatcctggtccgtacatgtacgcggacccgttcaagaacggtgtaccggagagaattcctaatgattgtttgcattggtgtctacctggtcctgtcgacacgtggaacgagatcatgatcgagatgttgcggcgatggaaggtttaaatgatgaacattgattgttgaagatcctatgatatcattcatttacacgcatatgacaaaagaacaaaatgtgtaataattttttgggatttcaaaaagtagctaggtagtttattttcttggattagatacgaaaaaaacacacatggatgatactcttttttgttggttatttcttccgttcttcaaacgatggaggagtacaaaaaatagttgaacatttatttattttttgcaatatattcaaattaagtaattacatgtcatgtatacgtagctttttcttgatttggaataatctttcaattattggcattaaactgtccatgtactacagtagccactagcatgcccgttctattatattagggcgtagatagctgtgataatgattagaattccagttgtataacggactgcgtcaagacaaaaaatagtaaaagtaattaatggagttgttgtaacttgtaataattatgtcatcgcaaagaacattgttataacaatttgaatagcatttgacctattaactggtgtattagatttgagttaattataagagagttttgtggaagcaagtggcaactggcaagaaagggatgggcaccgtgaataagaggatatttgagatgttctatgcaattttgcaggtattttttggggtttgtatttgtgcagagcataaatagtaagacctagagatatgttttttgtcttctatttcccaaacttttttttttgtctttcaagagacaaacgatattttgtctcttttttctgttcagaagagaatcttcattttatttgcccttttctagttttcttcccccagattttgtttactcaatgtcacataanataaacaaaatnaaacgatgagattaataaaaatgggct

SEQ ID NO: 52912 - DNA, 195 bp, Arabidopsis thaliana landsberg
taattaactaatatcaaaaaaactataatatatacaaaacctataatgcataatatgtgacgaagtatcaatatactaagtattttataagataacagagaaaattagtcctgtactagaaagagtagttaacagtgtctatagcagatacggacgcatgtgactgatattcaaagtgtatcaagtctgcctact

SEQ ID NO: 52913 - DNA, 872 bp, Arabidopsis thaliana landsberg
gaacaaatatgattatcactattcatggtctgatagccagtatgtatgcacaaggtgcatatgtaagggtatattttgaaagaaacacattaagaaagatgcaatgctttatttacctcttggaatttgtttccagcttcttcacgagcacgtgcacttaacatcttctctaaggcctcaaggactcttgctgcacgtacttttgcatcatctgtaccagacgattgtaacacttccctgactaacaattcaacccagtcatcaccactggtcggggggtttccaccacaaacggcatcagtttcctgagtagcagcacctcctgcggccaattcttcagctttcttctcctcagaagatgcgaaagagtataagctcttcatagcagcattaaaatcacttccattatcttctagtgccttgacgagaacctgagaaagacttgcaaatctagttaaaccctagatactgtacaaaatttacttacaaccaatcgcataaagaacctgtgcaaccgagacgtgaattttcgatgctcaatttacaggcggtgaagaagaagaagaagagagatatcggagacagatgcgtaatttgaggtcaacaaatgcctagtcagtgagatttctagtacaagatgcgaacaaggtaaagctagatctgtgtggattgaatagaaggaagacctaccgtgagttcaatatgaggaaacgcagagtgaagctgatcgagcgatgaggaaggaggagaggaccagattggagaattggaaggcgaaaaacatcggaacctcttagaagagggcggagaagaattatcgtcgaagtaagatctcttggttccgcaatatacggcagacatggccatggccg

SEQ ID NO: 52914 - DNA, 486 bp, Arabidopsis thaliana landsberg
tgatgcatatcgaccaaattggtccaaagatcatatcttagaaatgttttgaactatttttaatgcatgtcgaccaaacattttttaatcgaaacacacaaattttatactaaccaaactgaatgaaactaaacatattcgaatatttgaaaaccaagctggataaatctattaaatgtttgatggaaaatgtattaaagtttttttgacataaaaggaaaacaaaagccataatggtaagagaagatggtgtccatcacctaactaaccagcctcacctacctcataaaccacatgatgaaatcgagttaccccacgaacacactcagctccatgtttttttaagaactaacatgtttgatttgatttggtataattagtactactgttgacaatttgtatatgtaataacaatgaagattgatttactttaacataagagataatggcgatttggtaaaaccatgattaaatttgaggaaaaat

SEQ ID NO: 52915 - DNA, 621 bp, Arabidopsis thaliana landsberg
tgagtactgtcttctcacattatacatgacagtgctagaccactaggaagtaatttttgtgtttgactgatatttggcatatttttttaccttcttctaagggtcaagtgttcaagcttcacttgcgatttctttgataaaatcttgtccgtgtgattaaattttctaaccattatcttttttattttttcttggctagcttcttgccacaaattgtgaactccttcgtgactctcctaaataatggtgcgcataacgatccggagattattcagcaggttgttggtattctatagcatattttacgctcatgccactacctaaatttcatatgttttttttgctgaattttggttctttttcgtgcaggtattcacatcatgggcttccataatagtgtccctgcagaagtatcttgtgtgcgacatcgaaggcattctcaggtaagtgaagtaaagaaattcaatctaatctacaatgtctgtttattgtgatggttctgatgattgcacatggtctttcttttacttactggatcaatacaggctgcccaaaaattgacaaaattgtctgaatcatccttaaaagacaatacatggatatcacatgctgtaaatggtg

SEQ ID NO: 52916 - DNA, 848 bp, Arabidopsis thaliana landsberg
atttcatacagcagttaataatccaaaggcaaatatagccacattcttcatgtcatgtttttgcattctcttggtccattccatatatggtcttcatcaaggtagactccacttattttgtacatttgtctttctgaacaaactaatttctctcgtttttcttgtttcctcaaagctttagctgtttctcatcatttgttcaaaagattccttacaggtcgaaacaaaaatcttttaatacctttttggctttttgaaacacattatatcatagatatccattagtaaagattggggaaaaaaaacaggtaatgcttatttttgtaaaatccattagagtacaatgaaaaagaggagcaacaatacaactgcagagtgcagaccctacatacatttaccaaaatcactaaaatttgtgtataaacattacattcttgaaatatatatatttatagatatctaattaccactctcatgctgaaaaaatcagcttttagttagtaaaaaggctcaagggtaaaagctaaatgccaaatattacagacaaaaaaaggagaaatttttactagtgcttggttcctttccaagtctctaaacgcctcactgttcttccacaagctttagcgtttcagaatccagcgtttaaacagtcatcacaaaggctgccgcagaccgccacacacttagatactaaacacaaaaacaaaactaaacgagagaatccacaggcaatacattcacctgtgtgttagtttgaaagatgtcttggctttgttaaaacaaccttctttctctaaccagtgttacattccgcgtttacaaacgccgaaatctcatccataacatta

SEQ ID NO: 52917 - DNA, 1244 bp, Arabidopsis thaliana landsberg
gaacttgaggttcgactctgcaaattatgagtttgttggaggtcaatcttattttatgaattatatccataagaagctctagcttgtcattaccattaaagtttgtatttattagttttctttgagattatgtttaatgtttttgtttgtgcaacagttgcttctttggctttctgctttctgtaaaatcccttaaaaaggatgtaataattattctttgatttggcatagtactcgttataagtctcttgtaacttttctttttttttttctttgtttgtttccgacgtgttcttcataaattattgaatggtatactgataaaagtctacaacatcatataggactttggaaattatgattttgttgaaggtcaatctcattttatgaatactatccataagctctagcttatcattaccattgaagtctgctacaatgaactgtgaaagatcatacaagtgataaataaacagctgaaccatacctaagtactgtaatcgaaaacaataaaactgagaaaccctattttacaagtaactaaaacagactagaaatttaatctttgacatatcaacttctctctgaagaagtcagatgtccaagctgttctgtaattgcattaacatttctcgaattccaccaacatttctcagtacgtactccggctttatctttatcgtctttcctctctaattgaacttcccgttgctcggttgagccaggattctctgagaaaaactgctgccagaagccatcattcgctcctgctactggaggaggaggaggagcagcaacagtgttctgttctttcgaaccatcgggctcacagttcatatcgatgatccttggagaaggaggagatttgagacgtgaatcgacacttaactgtatgcaagaaagaggagggctctctggaaaagtagatgattcatccacatcaagtgtcatcatacttcttgattgtaacatactctcacaagaatccgatacaagattctcccaaatcgctatcgatgactctaactgttccacttgatgctctcttgtgtgtgaagaagggcttgtagaaccttcctctctcacaacaacacaagttttgttctcttccaacatcggttcatcgggaaagaactcgatcctagggaaccttcttttcctctcgtttgtttcgggaacacacaacgatagaaacaaagcaagccctggcttttccaatacttgagaaacaaacgaaaccattg

SEQ ID NO: 52918 - DNA, 2038 bp, Arabidopsis thaliana landsberg
gatagcttaaaggataaaattattagaagatactattttagtaaagataaaatgtgaataatatatgggctaaatttataatgctaaaaagtattaagcctaccaaaaagtaatagttacaaattaaatatttcagaataaaatgattttattaaacgcgcttttaaagcgaacaaatattctttcggaccaaaaaaaaaaaaaggaggaagaaaaaaatgttggagttagctctgtttctttgttcatcagtttactttatggacgaggtcctcatgtagatttgactttgtttcaaagcggaggaagaaggagaaggcaacactaaagatcaaaaccttagatctttgcttacgctttcctctggttaggtaagtgtttaagaatgttcaatggctttatgctgctcctaggattttgattttgcaattctcttggttggtaaaaaaggcttctgggtgtttttccttcttatttcgagatttgatcgaacccacttgatttctatcttgattagttggttttactagtgttacagaacaatttgtgattttgggctttgattctctgcgactatagttgcgtgttagctctagggtatcttctagcaaaccaaaagtgggatctttggtttatcatggagatctcgatccaatttcggttagaattcaaagaaggaaaaaattgaatctttgagaagcttttgttattgagttaattcagtgatgatcctatgcttgtgatgtgtgaaaatgtttttgttgcttgtccttgtcttttgtataaatcactgagtagcttcgtttagtgtctcaccaatgatttaaccttggtttgctagtttactgaacatggagtacaatgtctagatggagttggaattgtatgtctagtaataatgtgtgtaatgcttcatgatgcaaaaccttgcttttgaattttttgtaggaacggtttttcagaaacaaaagattccatttttagattcaattcccttctggtttgaaaaatgatatcaaaatggtgaatagaagtgatttggtggtgattggcatctcggttgggcttgcacttggtctcttgctcgctctgcttttgttcttcgccataaaatggtactatggccgctctcacctcaggcgatgcgctaatgaacagaattccccgactctacctgttcacactgctaaaagaggtgtagtaatccctgatgatagagcaaacacagaatcgtcacagccacctgagaatggagcaccaactcaacatcagccatggtggaacaaccacaccaaagatctcactgtatctgcatccggcatacctagatataactacaagtgagtattcagtctaaagctttagtttgcgtgaatttgttattgggttgttgtagcttatggtctgaaacttctttagggatattcagaaagcaacacaaaatttcacaaccgttctaggacaaggatcttttggtcctgtctacaaagcggttatgcccaatggagaattagctgcagcgaaagttcatggctctaattcaagtcaaggagacagagagtttcaaaccgaggtaagtgtacagatccactcatttccctggtccatgcacaatggagataacagagcagtattggtttcttgtttccaggtatctttacttgggagactgcatcaccggaatcttgtgaacttgacaggatactgtgtcgataaaagtcaccggatgttgatctatgagttcatgagtaatggaagtttggagaatcttttgtatggcggtgagtcgtcctttgttttcttctatcaatataagacgcagcaagaaattaatcacaagattttctactttacttttcaggtgaaggaatgcaagtcttgaattgggaagagcggcttcaaatcgctcttgacatctcccacggcattgaataccttcacgaaggggccgtgccgccagttattcaccgtgatcttaagtcagcaaacattttgttagatcattccatgagagctaaggtaagagagcaaatattta

SEQ ID NO: 52919 - DNA, 1153 bp, Arabidopsis thaliana landsberg
tacagctaaacctttgcggatataaaatttgaattagtgataaactatattttggtgcggtccataaaatagtaatccaaaagacaagtttcccataccataaaggtcgagacatacaaaagtcacttcagacataatgatgtgatgactttgtctattttctcaaccatccaaaatggccgtgagaattgagacccctcttgaccttacatcacatttattcactatttaatccaactccattcaataagattctctattcaattattcaactcttcgtttattttccctattcgcatgcatctctgtctttttgacttagaaccaacctattggggttcctatttcatcaaatcatagctttttgatcaagtatcgaattatactattttctccattttagcatcacaaaaacttgcaattttctttgctgtgatatatgaactaatgattcttaagacactaattaacaagtcaagaaatgagcctatcatttaggttgagccattctcttagagaactcacaactaaaaattacgtttaactacacatgagactatagtaccgtacataaaataaagtttcgtgtatttatagtctcaaaatcactagtttctcactatactggttcatgttaatcttatagcgtgccacatgggcgcggtaaactccgatcaacccgtggacctttgaacctggcccacttaaactaagaagtaagaaccatgggtgttagataatctgggaggttgttccacaaaaaaggttgatctcacaacccacaaggtgtttaaaagctaaatcaaccaggtacattgtcgtgcatgtgtgtcattaccaaaaaggccatcatgttgatggagacgagtaggacccgagatttttggtaagattccaaatgcaatcccgcgaaaaagtcgtcaaagaacagaaacatagacaaatgagaagacattagtcacacataagacatatatgcacacatctagtcaaaattgatgtgtcgtcgaaattattgagtctaaacaatacaactaatttgagtatttaaaaaaatcagcttactctctacttgttcatcaagaatagagtttggcaaacgaagaatcatttcaactgttgttcaataagacaaagttagtgattatccttc

SEQ ID NO: 52920 - DNA, 1235 bp, Arabidopsis thaliana landsberg
gtttctttatttttaaatgaattaaattgtagaattttctttgtgatattacaacaagttggcctaaattcagttttttttttttttttttcagttaagaaaatcggtcagtttggttttcagattttaagagaatcgttatagttcggttcaacttttaaaccatctctgacgacaatacacagagaagaaaagaaatagtggaccatttattttatcggttagaagttaaaaaaaaaaacgagggtgaacccagaagacgacgtagcattattgtgggcctaaaaaacggcgtgaagttcaaaagaggttgatgtatattctttttgcggcatgtgcgtgacgctgaacatctgctttgacaacgggtttcgcataaatattagctatcctcgaccgttttgctttaccaaattcgacgaattttattattttattttggtccatcgagttgtatctttgacaattattaacctataaaaatgaaggaaaacaaaataatatttaaaatcccttccaagttccaacgaattaaaaaaaactctttacgataaattattgtttgctccaatatgttctttattgcctgaaaattttcggataatgaatttgttatgtagctatatatagagaataatccaatgtttaactctattttgatggtcggctaccgcctaacatcttaaccgcgtccgtgaagttgactaaacttaaaaattgaatttaattgtaactgataacaacaacgtatacaagcaaaggtggtaatttgtttcatactttcattttatggcatctcttgcaagaaaaaaaagagagatgaaagtatgaaacgtttttttggacacctagctattatcgttttttggacaagatagttatatcgcggcagcacttgttttaaacgatatccaacgctattttaatccacacaacacgatctgcataccttttcaacaacattttaaataatgagcatgatagaaatatgtatcatcgaatctaattgatccattccagaaatgaacgttgtaaagtccaaactattgatattcagaactcttgtactgtaataagtagcaatacccttgtattacccaatcattatttacccccacacaattgctacatttaaacatatatagtcttacaccaggctaacccatcacctattccttaacatacaaagaaataacttgatttcccccttgtaatttgactctcaatcatattac

SEQ ID NO: 52921 - DNA, 1284 bp, Arabidopsis thaliana landsberg
tgttcagtacattacctttttggacttatcttagtttaccgtaactttagattcaaaccacataaccttcgcctcccgtttaagcttaacttattgtacatataaaatatatagtctagttctaatgttacattaaaaagtaaaaccgatacattaatgatctgattatcggcgaaagtaatgcgtacaattcgaacatgtcactaggaacatacatatttagcccaaagaatcatcaatttcacatagttgtacaacatggcacgtaaacaacaaactaataaaatgagtcgacgatgtactcatgcactatagggagctcacggtgaaatggctagaaatattcttgtggataatctagctagtaacgaatttcaacttacatctttataggcttatatataagatagataatacataacataatcatagttcatagtatcggttcactccgatgaacaaaagaaaatacaaaaaccttttttgaacttactaaaagatccaataaatatgacgagagtcatatgaaaataaagacaaaaatccttgtcattaagttattctctttttttatttttcattttaaactggtcagtacgtgattttcaaaaaggcgtaggcagcataagggtaaacaaatcatctcctttttttcattatatatattttgtctaacgttatttatgttattcgtaacgcataatattttctaaattttttatgaaaattaaaataaattgagtgtacccaaagaaacaccacatgcacatattatccatccaacaagaatctggtaggcccagccttgagcactgggcaagtagccagtgtagccacaatcccttctcaaataaacaagagtcaagagtactaacatttgcttttaatatatatgctaaatacattattcttgtttagttgttaatatataaacatttttttgtggtgttaatcgtcatatgtaaacttaaaagtacaactaagcataccatagaaatgatgtgttttatctacagctttataagttaaataagatgataacgtttgaaaaattgttcatattaatcgtcgcaagctagtgctcatcttttaacataatagtagagacaatgctggtcatctaaacgttatggcatgttttgtcaaattttggctatgaaaatgtgtttctaaaatcaaaattaactaagtgcaacttctaagcttgttttaataccaaaatttcatagactttacatatgtaagactatgagtatatatatagataacctttaaaagaaattt

SEQ ID NO: 52922 - DNA, 461 bp, Arabidopsis thaliana landsberg
  unsure (1)..(461): unsure at all n locations
tacagataagttgtaatgttgtttgataaatagtacttaaaagtatcttaaatagtacttaaaagtatcttacaaaaccaaaatatgataagccgcttcccagcggaacctttgctttctctccgcagagcccactactcatcatcagcgggatctcgctggaagcgcttgtccaccacgtctacggtgtcttgcacgctcccccaggcggcgtcttcggtatcggccaccggaccggcgatcaccggccctaaggagatggccgggtcgtggctccggaagcacgtcagaatgtactctattatcacccnnnnnnnnnnnnnnnnnnnnnnnnnnnnnnnnnnnnnnnnnnnnnnnnnnnnnnnnnnnnnnnnnnnnnnnnnnnnnnnnnnnnnnnnnnnnnggaaatggacaacgattgcgtcgacattgggatggggctcaccccaatggcacagagc

SEQ ID NO: 52923 - DNA, 1330 bp, Arabidopsis thaliana landsberg
agagtggaagagaaggaacgtaaaagagaagttaatggtcttgtactcttgtagcagcaagagagacttgagagattttgtagataataaatttgtaatatgatgtaagaatttctcagctcgatgatattatgtagaaaagaaactgctttcaaattgttaaattcttcccatgatgcagattttttcttatgaaggacttttgtataacaaatcacatataaatctattttctattatgttcttagttcaaaaataacaaagattactctatcaaacaacagagtaacacaattttcatagagatttattttttagattagtgatgtttgaataattttattattgtaatgaaaaatagtgtatttaaattcaatcaaccaaataattttactaaaatctaaactacatgacatacccaattttaacattagctcaacaaaagaaaaaaaatatatgtatctataaacttttggatttacagtctactacaaataacattttattgtttgtcacaaaataagactaacattttaattttagggattttataagattttggttgttatttctgtgttttttttttaaggtttaaaataaattctaaaaggtatattatgatgcaaatcaaagtttatattattttctttaattatgttaaagtaaaagtaatttgtttttttggtagaagtaaaagtaaaattttcccagagtcgtctgcgttcagacttggggacaaattaaagctgatgatctccggtcaagtactcctctcgacgactcaaaaacacacatattttacgaattcgaatttcaagtttccgattctctaaatccaattgatttcactcttcctctaatgaaaaagccctaattttgatcgtctaaatttcatacatgggtgcgaacgagtttcgtttcttcctctcctgcgatatcaattcgccagtcactttccgtatcgagaagcttgatggaaacctccccgtcaagaaatcgtctgatgcgggtactcaaatatttttgatctcccacagttactgattgaaagaaacttgaattgactatgttctaatttttagcgcaaatgggcctgatttatgtgcgtttttaggagtcgcctccatcgcagaggagacaaaaccagagctttacattgagcgagcattgcacattgatggagctccttttggccttcccatgagacacaaggtggctctctcttatgcccttttatcccctgtagggctgttgtcatatgacgatgttgatgactctaggcacccgtcaacgaggaaccgaagcctatgctctaatatcagactgaaac

SEQ ID NO: 52924 - DNA, 958 bp, Arabidopsis thaliana landsberg
tcgtttttctgaccaaaatttagccgtctgcaagggcatattgtctaacttgtgtatacttttgtagatcaatgatttttcgagttgatagttatcattgtggtttatacttttgcccttttctttactgactatggtttctgttgtcttcttaaattcataacattatgggtagattgactttgagagttactgcaaaactataaacccccttatggaagaagagcaagatgaggaagaagatagaaaggcagactcttgtcaaagattgaagactcttactggtgaaatctcttcttcaactcagcttagttacctagaagtggaaagaaacttggcaaacgtttaccttctttaagttattagacacctttccttttgccattttttatgtgaaacttttaaagaccagtgtgttgtggtgatgttttggccttttgggtttccatccatttgtgtttagatgttcttgttttaactgtttctgaatttgttgttgtgtagttgtattagttgcagccaaatagttagcctggccagtgttactgatcttgtttctccaagttttagccatttgggctgtattgtatgtatctatcatattgtaagctcctcatctgccttaggaacttcagaggtcatgagacatgacaaatgtaacagcatgagcatcctttgggattgtgtttttgtgatttccaaaagtgatgtagtagatcatttttttttgttgttgaaaaggaaatctggtcgctccttgttcaagtgtgtacataatagaagttacatttcttcattttcatggattttctttaagtttctgtagctatgaacacatccacatcaatggcatagatcctttattcttcattagcactggccaagttgattcttccttgttctgccctgctggttagacattgctttattcagtagaataggtttcttttgtttgaat

SEQ ID NO: 52925 - DNA, 1094 bp, Arabidopsis thaliana landsberg
ggtagtatctgggtggattttggtagatcgcatttcatttttgacccaccatgcatcaattaatcttccccctttcacatacccatgaatcaaagcattgtttgtgtaaacatttggtttaacaccgtacgaaagcattagattcagaacagataaagcactgctagtatcaccatatcttccataaccatcaataaccacattccatagcagaacctctgcaagcagagaactttttagcatgcttagaaggaactcgttcgccctgttcacatctccctgtatacataaaccttgaatgataactttgtatgagatctgattaggagcaacaccaacattttgcatggtatcatggagatcacatgcatcatcaaactttccctctttgcacaaggcgcttatgagagtgttgtaagtgaaaacatcaggattcactcctctctttaccatgtcacacatgaacccataagcagctaccatgtttccactcgaacataacccacgaataatgacattgtacacaactgaatcagcagggacatttttctgtgacatctccttccaaacctcaagggcttgaaccacatttccattcttaaaacaactatccatcagaatggtacaggtgactatatccaagggtgcgttcgcctggctactatctaagatctcttcaagaagctttttgatgttgtttcctataacatctttctggcaaagtgcatgcacaattatgtagcaagtcactctatttggcctaataccatatttattcatagtattgaagaggtacatagctttatctacattgttaacactgcaaagacccttgattaaggtgttataagagacacaattaggcgaaggacccatctccctcatctctctaacgagcccatccgccttctcgatataacctgatttacacaacttatttaagatatgattgtgcgtgatcaaacctggaataactccactatatatcatttttctccgtagccagagagcagcgtccaactaacattgcgagcaaagatccctcattatagacgagtgtatagatcaagcatcatcgtaatcacaactctttg

SEQ ID NO: 52926 - DNA, 950 bp, Arabidopsis thaliana landsberg
ggtggatctctatcaggaaagtagtagcagaataatgagatttggaaaaggctggagagagttctttgatgctcatggcgtgaagatagacgactcctttgtgttggaactcatttgggagaaagaagcaagtccggtgcttaagttctgcaccaaagtaccaaagtaaactctgcttgagactgtttccagagaagtagcttgtggtgtgtctcaacacattctctcattccctcgatttctttagcttttgcaactcttgactagatgtctacatatctgagtcttgtttaagagttgaagaaaatgttacgacttaactacttgtgtgttgtgaacatgttgagaatttgtaatgtcttcaatttacgctccattatctagaaatattttattctcctgattgtgtctgagattgtcatgtgggttatgcaggccacaaaacaagaaaatcatttgttatatatataaagtttacgaataatcagagtttacataaagtttgagagaaaacaacactcacagagtcgatagaatttggctaatcatagctcttgagcgtattacataatttaagaggagtcatcgccaacaattgttgcttgtcgatcaaaaaacaagctttaaaacaatggatgtcaggtttttaagcttcattcctactttttgttcttccttattttgcttgaatcaaacatgcagatgcttaagcttagtttgcttgaataaacaagaaaaactactatactgtgtgcctaagcctatgtcatggtcttttaaagtttagtctataaactaaatttactgtgttctttctgctgtcagaaaactgcaaaaaggggcaatactttcatattcatttaatttccagttccgagagtacatactcaaaagtaaaaatctaaatgtacaaaactcatggaggaatagaagactcctctagttgaaaa

SEQ ID NO: 52927 - DNA, 798 bp, Arabidopsis thaliana landsberg
tgcatgccagcgcaacatcagatagaacgttttccaagcatgtgatgatagaggacaaagccatacgaaaacaggaactgagagtgtgtctacacaacacacaaaaatgcaatgtacatatgaaataagactccttctaatatacgacacgaaaccttttgtagatagcacgagtatatatatgcagaatctaatttcggctagaatcgataaccacgctacataaacttctcaacgtttgtaatttaattactacttgagttatggcataatttctctcacaaggatcttatatcaaaaaccccaaatcaccattaataattgtcttttaagtgcaacagactatgatctctactgtcatggggccgtaattaaatgcattcaatttcgttacgtgatcacaccaacaacgatcttctaagaaactacgtcatcaggtaaaacttttatttttctcttttcttgccttttttttaagcaactatatatgaattcttcaagagcttatggaaaattgagcttaatgatacaccattttaatagattaaaaacttcgaatcctataagtttttctcaagaaatggaagatataattgatagtattaataatgttctaatcgttttcatgatctctagatgaatcgctgatcatataaatattgaattaagaacttaaatcttagatcaagacttctgattataaaagacttctttcttttattgctttagaaacttactcaaaaactaaagctctcttacaatctctcaatctcaaaactcattagaaataccacactt

SEQ ID NO: 52928 - DNA, 1037 bp, Arabidopsis thaliana landsberg
acactattaggtaataattaaagctcatttttaagtctaaaattttaattataaaataaagagcattaaaaagttaagacccaaagaaacataaatgcttttttctttcatcaatgtcaaaaaagaagttttcccaccaaatggtcaaacttggatctttgacaatattgttccaatttcatcatgccctatcttttctatttatacacataccttagatataattattaaacccaaaatttgtgttaagaaaaaaaaatagacccaaaatttggaatatatatataagtcaccgctgtgaaaaaaattattgcaagtaatttcttatatgaaattggaatgataatattttgttcaaatatccattactaaaattttacaacgctagataacgagattgcttgaagtcgaacttgtgaacaaattataataatgtaaaactaacttgtattgactaatctttgattttttttacaataatgagtgatattacattcactttattaactaaatacaacgaatatgataaatattcagtcctcttataaactttatgataatgaaaaatgagacattgacaattctagcattctaacattttatgagattacatgaaatgtcaatttagaccttaaaccaaacgaatacatgattcaaaatttgaccgacaagtacatgatgccttccctttgatcacgaaatttccacaaagagtccgtgtctgcgtaattaaccaacaattccgagggtgtttacgtaattgtagcttaacaaataaaaaaacacgaaagaagatggcgaagaaaacggaaagtagtagagagagataaagaaagagaaagagaagagctggattcacatggtcttgttctttctctctccttcttttctcatcttgcggcttctctttctctctctatcgccacaatgatcattaccaaccaaactgattgaaactcatttgttctatctctctctctcaaatccactctctctctttcttttctcttctcctctctgtgtctctatcgacatgg

SEQ ID NO: 52929 - DNA, 944 bp, Arabidopsis thaliana landsberg
tacacttactatcatcatacctgcatcgcgacatacatgcatatattgttatataaacagctgcatggatatatatggatctataggtaaataactaaatcaaattaagaagcattaactctatatacagaatatttatgtgtgtgtgtgtgtgaatgtgttgcattaatgatacatgaattggagataagaacctcaaggaaggaatggtgttgatgaatcttggatccatttcaattatcgtacttattagtgattataagactaaaggagaattatcggaagatggaagatgttgtgtatggatgatgcatctcacacacttcaatttatagagagagggaacttcatcaaggtagcacattatttataaaaaaaacatgaaacatatgccaagtgtactagttgcaaagtcgttcagcttgagacccaaaaacaaacaaagtctgttaaaaattattgattctgaaataatgttatcttattgactttaggctcggttttacaattgaaatgcacaatgatctcagatctgatcttaaaaaacgaattaagcgatagataaaatgagatgttatagtggtttgatgtgatagtcacgtacgtttttctttgctagtgatttcacaaaataaataaacgaaaattacgaaaaaaaacttttctttcgatctaaacagtaaaaaacaacgacattagtttgaataaggaatacaaactctaatcaaaccaacatgcctaaaatattcgaaatacttttaatgaactttcgttattaaaaatgtggtttttatttctaaggatgtcgaatccaagacaaacaaaaagaacaacaaacaaatgtttgaacttacgtgtatatattatatatgtatgaccccaaaaaatgacaaaaacaaaaagcacgatatttataattattgctggtgttgttcatgttgtaa

SEQ ID NO: 52930 - DNA, 2952 bp, Arabidopsis thaliana landsberg
aaaccttataattacgacgacgacgataatctaatcatatatcatggaaattcacatttcttaccgtgtaaaatcattcgcctggttctggttcaattattgttttaactttaattaggtggattggtttgaattctacgtttaccacaccagtcaccacttggataaacctttaggccatgaatgatattatataatttagaaagaaatggaaactaaatcgtgattgaaagataaaagtatgtcagccacaaaactaggaaagatttcctttacatgataataattttttcgagattcattagcaacctgcaaaagggaacaaagataaagcatgagtggtcactagtactcactgagtacccaaaaaaaacacaattaaatgctaagaaaattccacaaaataattttttggttaagatattttattttatatataaaaaggtatttatccgattggggggttgcacaccattcaatacacttaattacgtcagccgttcgaaaaggccctccgatatatcctcctctctcacaaacttcttcaattttgtattcactggcaatatctatgtacggtttggtgcactgtatcttcttacacgactgtctcgtatcgtatgaagatgagattaaaatgaaaaagtattggaatctaacctaatcgaataaatgccaaaaataatttagtacaacgtcgaatcgaatttgtgaaagtactatagaatcgattcacattagagacgaatacgagtttttatgccactttaaatttcatcgtaaactgaaaagttttttttttttttttttttgctttgcatttttcttttttgctttatctgacacgtagatattaatcagcacacggatgtagttttatctctttgccaaaaaaagagagtcaaatcctcaaatttaatcctacataaatgagaattttggtattgttaatcatagcttttacaattatagcaagcatttactttaccccaataaagtttatggcaagcatttatatatcgtggattggtaaattaacaattttatacagatggcctgttttaattaaagggttagatttttcactatggctttcatttaaacaattaaaaaccctgatattttaactatgtatttccatttatcctaatcatgaaattaatacaaaatgatttaggctcttaactatatcttctttttttattgttcaaagctctttactatttatccatatttgataatatgtacactgaatccatctttgtaaaataggaagagagaattaaatgatatattttagaccaaaatacacccgatttggtaaatactcagaatataccatatggatcagataaatcataatcttcacctaactaaattaattttctaccacgaagggggattgactacaaaacccgaaaagtactaatcatgtacttccagatccgacggctaaaaacgcatcgatcaacacgtagtaggtgtctttcgccctaaactcaacgaccaagatgaactcaagctttactttgctgccgtgtccgacaactaccggatagatgaggatgaatctaaattcggacaaatagagcgtagtcaacacgcgcgtaaatgagttctgatggtgtagcgtaaaaaacgtgtacccaaccgtaccggattccatctatctttctggatgggagcatccaaagagaagaaggagagagctagtcttatataacgacacgatatcctcacctatttacgcctcattttcttcttcacctctctctctgtgtgttctttgttctctctctcgcgcgaagcggttctctttcttttgtttatttgtttttatttgtttttctcttatacggaggagagaagatggtggcgcctgctttgttaccggagctctggacggagatccttgtaccgatttgtgcggtgattggtatcgccttttcgcttttccaatggtacgttgtatctcgcgtgaaactcacctctgacctcggcgcatcgtcttccggtggagctaacaatgggaagaatggatacggtgattatctaatcgaggaagaggaaggtgttaatgaccagagtgttgtcgctaagtgcgctgagattcagactgctatttccgaaggtaagatctattgatactttattcagatctcactgttctgtttttagatctggctctgttttttgattggtggttgtttgatgatgttttggattgttagaacgttgaaattactaattcagtatcttgtgaaatctgagatgatgtgtgttttctgagtgaataatattgggatctgtttggttgttgtgggaacaggtgcaacttcattcctattcacggagtacaaatatgttggtgtcttcatgattttctttgctgctgttatctttgttttcctcggctctgttgagggattcagcactgataacaagccttgtacttacgacaccaccagaacctgcaagcctgcattggctactgcagctttcagaaccattgctttcgtgcttggtgctgttacctctgttctatctggtttccttgggatgaagattgctacatacgctaatgctaggaccactttggaggcgaggaaaggtgttggaaaggcgttcattgttgcattcaggtctggtgctgtgatgggtttccttcttgcagcgagtggtctattggtgctttacattactatcaatgtgttcaagatctattacggagatgactggaaaggtctttttgaggctattactggttatggtcttggtgggtcttccatggctctctttggccgtgttggtggtgggatctacactaaggctgctgatgtcggcgctgaccttgtcggtaaaattgagaggaatattccagcccatcgtccaagaaacccagctgtaagtacaaaataaactgtgtataacacttgccttttttttcaataa

SEQ ID NO: 52931 - DNA, 504 bp, Arabidopsis thaliana landsberg
tgcatactgaggtttccatgtaatctaaacatgacaagttaaggaaaaacaaaatcagatcctgcaaataaagctgcacataataagtaaaaactacaatagcaagttttacagattatactctccaatttttacatgaacaaccttttctatttcaaataaaaattggaaaaagtaaacattagtattttaaatagaatcaaggaaactacagcgtataacatgattttttttcaaacatgcatgagggcctacatcgcgatattataagaaacacagtataaaatggcaaagtgcaaaaattatacaaaagggaccatatggataggaagtacatcaagggaaaaagggaatcatgtttcacttcctttctgttaacttttgacaattagagaatagaaacaacagatctcctaaaaggttctaacaccaaatggccaactggacaccgtttttacataaaaaaaacttgagtttctttcccaagtggtacacatatctgta

SEQ ID NO: 52932 - DNA, 569 bp, Arabidopsis thaliana landsberg
tgtggtggactcagattccgagtctggttcggatctggagattatccctgaagcggctgaggaagattcagacgaagagatgggaagtgacgaactcgaagaggaagaaaacggcactaccgcacatgaagtcttgtacggtaatggcgaagatgaagacgaaggtttcattaacgatgatgatgcacctatcggtattccagctgaacacgctctaccgcttcagttcagcagcctttctaacgccaaacctcgcgacttgttcaaatacgcgatcgactggatggtccagaaaaagataaatccggcgttcaattcggaggacgaggtatacgaaatgagtttcaggaaacttgacgacgaggtcaatgctctagccgggtccaagtaccattcttcaatctggacagccgagttcaccagagcaatcaaggcgagaccagaaattgtgatcaacgacatcgatccgcgcactcgcgcagtcatggaaccccattgcgaacgtgcaaccgcagaagccatccagctacattcgagctatcgttcaccggtcaaccgtatcataagga

SEQ ID NO: 52933 - DNA, 570 bp, Arabidopsis thaliana landsberg
tattccaatttgcaggcgattcgatccttatctgtttcgaaagattaaaagacgaaagcgacgaaaacaatttgcgccgtgcgtcgcggcgatgatgctcatcatcgatctgagcaacaattacaatacggtttccgaagaatttgttaattttacactgaagccgaaaatcggtatggggcagggagaaatctttcagatatttctcggcgatacggaatattcgatgacgccggtgcttaccggagcggcagtcattcaagcgatcaaaatggaagaagcgtgcacgacgcaggagatcgtcgtgagtattcccgtgtggaatcttgcgtgtaaaatgggactcgaacgctgctttgccgagcaggaagggttttatcacctgaccgatatccccgaagatttcgcctcgtcggtcgaacgccccgaatatatcgacgtggaaacgtggtttacaaatccgcgtttttacaacgcctctattcgtttataaatccgatcatcttcagtcagataaaaaacaacgtgcagggtttcgacggcgaatactgaacgtaacgtgctgcatgg

SEQ ID NO: 52934 - DNA, 439 bp, Arabidopsis thaliana landsberg
cgaaaaacaaatctttaaagctgactaatgcgatatcaaaactttaagacaacaccataacaaccacaaatcgattcagttgacattcaggatcgagtttcggaggagggaaagagcaaaactttacatagcaacaggtagggagaatgaagcaactgctccctgacaagggaacttacctacaaaagaacagaagagcccaatggaatgagagctttgatgacgacagcaatcttcaaacgcacccagaaaacacccttccccaagggatctgccatggccccaagccccagaaacaaacacaggataatatctacaaagctaaacactcccctgagaacagaacccgaaaacccaaccacaagaagcacaagaccatgtccaaaacccagcttgcacatatcaaaagacctacaaaacccatccaacccaaacacaa

SEQ ID NO: 52935 - DNA, 776 bp, Arabidopsis thaliana landsberg
ggtgattgattacttttagtcctttacgtaaatagatatttagtttcagctgatttgtggaacttgatgagaattatcttattttatggattttagtgagtcttaaagtattgatgtgtgacattatgcatattgttattagatacttgaacgttatggaatcgatagacttatcgtcctttttcttcttactgcagttgttttaagagaaacgttgcatagcgaagcgagaaagttgctaggagttgttactatgagcatattgcatcgaagcttttggatcatgtctgtgatatttgatttcctgagatgataatgagttatatgatggtactagattatctggtgaaagtagatgaataacacatgttaagatactctgtcttcttatgttattttggcaaatcatcagtgcattgccttttaagcagaagtgtgagatagtgatgagttgttattacattcgttattttgggtatggaacaatgagtgaaaatgtatctttggctctacaagttgtgacaccagtatgacaaactaaagatcagtaccaacaccaacatcagtgccttggtctttaacgcctgaaattatgaatcttttctttagttagttagatatctataaagttacaaggttttgagtttttggagataattttttgtttgctacctatctatttatgttttgttttagatcagagaaggaagtaaccaaaaaatgaagagagaagaagagagagacaagaaccaagtcaagacagcgaatgttgctgc

SEQ ID NO: 52936 - DNA, 743 bp, Arabidopsis thaliana landsberg
agctcgctttgcgcgaccacgtatctttgctctatcagagattgcactctcccagttgtagtaagcctatcatacgtcatacataaaagttgaagccatttattatgaactgaaagcgattatattgcatttgcagttacataaaccagaaacaaaactaacagatatagaatcctattaatacatacatcatacagcgtcgggcagagacgggttgcctcatcgtacttcttacaagcttcctccagcaaatcatctttagaaggtgaaacagaatccgggctgacattatcagcactttcctgtggagaaagtatggcaaatgatgaattcagtattattcccagtaagcatacgaacgaaaaaagttctaatgtccccaaagaaagacacttctaagctcttacagaaagactcttatttcattcccagtgtttaatgaattttggatgtatgttttagcttcttatttcagtgtctttcaattctttccttcaacagtttaaacaacacttgcaagcaagtaataagcaaaatcaaatccatctcgttaattatttccatatgaatacgtccaactaaagccagtcacatataagagagaccaagaaagggattgaaagagagaagtgctaaataataacgaaaagaaaccaaacctggagaataagtgcccagttgtataatgcatcatgatcatctgggatttctctctatcgcacttgcatacctacaaaagttgc

SEQ ID NO: 52937 - DNA, 1112 bp, Arabidopsis thaliana landsberg
tgacctattaaatttgtttgtttatatcatgagatgtaaaaacacgtatttttacgtttgtggtgaaatatatgaccaataacaagtttcttagaggtttcaaaagtttgacatcggtggtcagacgtggatgaagcctacgggctaggagtgaacagaaaggtccacaaataattgtagtcggatctttccaagtgatatcataaccaaacttagatgagcgtcaagcattgtatgctcacatcgtttgagggtaatagtaacatttttttgcaatatgcaatacgttttatgagtgaagtgattgtaagacttttttaaaattgatgtttgcatgtggatgtctaaacaattggtatttttttaaatcgcaattttttttttcataacctgttcctttgttaattgtgtctaaactgtagtattataggatggatgaactatgattttcagtacaacgtaagtgaaaaaacacacacggtgaagtatctcttggtgctttgagggacaagtaaagaaaattttcaggtttcattggctgccagacgagaatgaaaattactcggtgacctatattggacattatgaactaagaatgagatgatcagaagattttgaagaagagaagaagggaaaccaacaagtgtacttttggagaaacgagacttatgatctgcattgatttgtaaattgacttcttgaataatatttagtccctctgttagtcttggataagtatgtttgataggaatactttccctagatctaggactcatgtccttagatatgtcgttggattgaccctccatgccacaccggtttggttgttggtattaaatgagaagtttgtgacatggtcggaattttttccgtttttgcatgttgcgctaatgtatatccacattaaatatggtactgactaggaatgtctggaaaagatcttgacaacatcttcacgtctacacacttattgaactatgcatgtttggattatccatggtatttttttagtcggactaacgaccgttagttatttattcatggaaaatcgcatgggtcttatgtggagacttaaaacatgtcataagagcattgatcacattcaaacatta

SEQ ID NO: 52938 - DNA, 595 bp, Arabidopsis thaliana landsberg
  unsure (1)..(595): unsure at all n locations
cggacaacgcgttacccgcttcatggcagacgtcgcgcgccgatctggccagtaccgtgacggccagcttgtatacggcctggccgtccatgcgcaggaacggatcgcccacgacctggccgttgacgacattgccggcggtgcacagaatgtcggcgtggccgtctttcgtntttattcttcttttttttttttcttcacaatttatttactttttctttttcatcattattcttttttttttctattttttcttcttttattttaattaattcttttttttttttgtttcatgctttttttatcttaccattctttgttatttctttttttgctcttattttttcttcttttttttcttttctatctttcttttttaccttgtacttttttttttttttctttttttctatttttttttctgttttttgttctcttttttattcttttcttcttaattttcttctcttttatttcttacttttttattatgttttcttttcttattctttgattttttttttttaacttttttatttttttaattttttcatcttttattttttctttcccttatcattttttttttcttttt

SEQ ID NO: 52939 - DNA, 588 bp, Arabidopsis thaliana landsberg
tcggccgcacgcagacgccccaccagttcgtccaccgagagctgcttgagatcacagaacatttcaatcgtgacaactacctgggtgaagcgcgccggaaccacccgcaggaacttcttgacgacgcggacttcttccacgacctcgccaagtgctcgaaggttaccgacgaggttggtgattcgcatcccgaaatctttgaccgattctccgtccttgaacttgatgttctcgaactcttggagcatcttctgggcgttcacctccttcacccgatcggcgccgagcctcattaacttcaccgcctcccacgcctccttcactgtcgcccgggcgccgagcgactgccacatctccttcggcaccgagcgcaggagcgcatcatggcttggcgatcgtgcgctcgcttgggattgatcctggactgatcacatcccagatctccagcgcctcaaagttacactgcattaacatcgcccactcggaataattatcacgagtgaggagtggcacatcagtgaactctccttcacgccgccgccggaacctgatgcttgattcatggtgtcgacggttgcgtcgagggag

SEQ ID NO: 52940 - DNA, 2469 bp, Arabidopsis thaliana landsberg
ctctagtagccagaacttatattttggtttcaagaaatcccagaagctgaccagtgaccttccaactaggagtcataaaggtgtgatgatacatgttactactggaaacgccaattcaggctcccttgggagaatgaactttcttgatatggcaggttgagtattttaagatcacaatttagttgtcttgtctgtgtaatgatcttatgtcagcatctgatggcccgtgatgggtgttgtctttctctgacaggatatgaggattccaggaaacaaaacagtgctttaggtcctctagagattgctagagttaataagtcgatatatgctttacagaatgtcatgtatgctctaaacgcaaatgaatcccatgtgccatatcgggagagcaaactcactcgtatgctgaaagattgtttaaaaggatccaacataactttgctaatcacatgtttggtatactttgcttgcttatgagttcgttttaagtatatctatcactgagtgcaactggcgatgctaacccttttgtttttcgtttcagccccgggaatttagccaagactccttttacatgctaaacttagcatcacggatctgtctaggcggtaaccgagccatcactaatcctaccaagaagaagatcaatggtctcgatagatctgtttcattatcctcagccgctcaaaggagacagacacctttgactatgtctgctgcttctagaaaacagacagtgctgaggggaaatgtgacagagagaaagactaaaatcaacactgctacttctgcaattaaagcaaggtaaatctttcagaatcagctttctctcaactctaagcctcaatatccctgtactcttgttgttcagttttagaacatcaaagaatgacctttttttctcaatgtttgaaggaaactgttcggtgaagcaaatgattcggtgaaatgtaaaaatagctctaagaaggtaattgatcttttgttgttatcgttatggattcagaaatagttcagttagacttgttttggattttgtaggtggaaggcaaagcaaagatggttctgaaaaaggtaaagcatcttcattctaattgctgaatatttgagtaatgctctttaataccttttctcaccttgaatgaaatttgtgttgattttgatgcagggaatctccacttcaaaggttgtcttgagcgttcaggcctcttcacctaaagaagtaaatccttgcgagcctgaactaaatggagctgcgtggttatttattaccatggcattacttacaaagtctcatgttcttaatgtaggaaatctgttcgtcgattactgttacagattttcaatcttctttggtagaagaggtaatattttatataacgtcaatgctaaatgaaaatcatcaagacattacttacattcagtgggtttcttttcaggaatattctctggctttttcaagttctacggttgccatggaaccggtaaattttccatctgcaacttctctgtattttaagcagatgccaaaacacgttcaaagaatcgaagctgtctcctttgtttcagcatatctaatattgcttcttgtcatttataagggctattcaaatggtgcatctttaagctcagaagctatttacactacagataaggtaatttgtgtaggtttatgttttgtttcaacatctggatatcaattgtgctgacagttcttccattattcttcaggagacaccccggaaacaagaggaaatgtttgctggagccactcattgtgatgatgcttttgtagacaaaggtgagattggaaaattgataaagaagggtctggtataaaggaaaggctgactttgatcttaattgtttttttttctctgtatggcagcacaaatagtagagagagatgaaaacaattcagtcattgaagaagatctgactctggttattgatgaaggtaggttgtgagtcctgtgacattaatctaagaaagtaatataatgaaaccttttgctcaattgatggtctttctctttatggtaggtgaaaatctggacaaagaaaacaacagtttgctagcaaatgaaactgcatcaccacccctcagcatgcgacttcaagaactatcaaacaatttgaagtcgatatgcaaattctcaaaccaactatcagtacttgagaaacatcaaactcccttaactatattacaggcggaagaagcatcagagcacagtgatattactgctgaagctgctgttagtatagaactaagaacgccggagaaaactatgccttcgaacattggctgcagtccttggaagacatatagcgcacacagctctaaattgaaggtaaaaagagttaacaagtttgattaaaaatgacttttcattgaaactaacaaaaaatctctgagactgatataatgcttctttttttgtttctggaaatgttgcagaattgtggtgt

SEQ ID NO: 52941 - DNA, 715 bp, Arabidopsis thaliana landsberg
gtgtataaaattggtatattttagaaaatgtatatgtttttatagaaattataaatgctcattttaaaaagatatgtgataatacatatttctattaacaagactttttaacataaccaaactagatcttagtcctaatctcatatactaagccgaaaccggtgaaaaatcgaataatttttctatataaaatgtttatagtaatcaaaaaaaaaaaactacaacgattttggtagataatggaatttgattcctcgttttgatccatatgatgagtttgtaatcctttagaacaaattattggatcaatcacacactctttctggttttagatctcattttctgatattattttaatatatatcatacgagctatattaaagtttatccacaatagacggatctttcgatttatagtggacaatatatgacttatatcatttggtttatattcccatttttccttaaaatatgaatgaccgacatagtatataatgggaactgttaattgcgtgatggaaaaaatatgtttgattgtatggggaattgcgtacgtatttatgaaactaaggtgcaatgttatgcatgggtttgttggagttatatatagcatctttacgcatatatatgtattcgagttgctattttattgatactgtgtagcgtaatataaaatgaatactatttggatatggttgaactttggatttcatgc

SEQ ID NO: 52942 - DNA, 495 bp, Arabidopsis thaliana landsberg
  unsure (1)..(495): unsure at all n locations
tgagtccgggagccatctgccgtggggttacttcgacctcggcccgccgttggacgaccagcgaccggtgtgactcaaagtgattcccgggtgcgcgtcctcgttgctgccaggccgcggccgagcaattgctcgtcgccatcacactccatggcgcatccgccaaacgcccatgaccgcgttgtccgttgtcatgttgatggtaaggaaccattcatctcgatctccgtacgatgccctgggtgtagtatcgaggaagttaaccatggggcttggaatcgcgaccatgcaatgcaccggtgatggtctccgccggtgggggcgaccgcgctggtgcgggatctgctgcgcgcaactatcggtggtggaagacaannnnnnnnnnnnnnnnnnnnnnnnnnnnnnnnaggattagaagatagggccacttgactagagctatctcatcgttcgatcatttatgacgtgtaggatagatgcgttcaaagtgacctg

SEQ ID NO: 52943 - DNA, 631 bp, Arabidopsis thaliana landsberg
tgagacgggcaaaggaaatgatacacaagaaaataagtatgcagaaattttggtgtcatttgttgaaaatcgctatatttgattagaggttcaatgagggtttatgagttattactcctaatgtgtgtctagtgctgcgagaccggttcaactacaagatgtgttttccctggagaatgaagattctgatgatatgactcttattgacaagaaggtttttggcagaccatgctatattttttatactgatctcaccatttatttgtagttgcagctaatgttcttcattatcccactctgcagaataatgtttttgtcatgtcaaacaagaaatctaagtatccgatacttcaagtagatttgaggttagtctctctcagatttcctctgtattggagcatcttgttaaatgcactgtttcagacttgtgatggataggttcttcacattgttttcagattaatatcagatttggtggtcattattgtttttgctgcaattggtggcatcgtcttctcttgtcttggacaaccggtatgcaaccttacatattggcattgaaatacttctgatattgggttccttggatttcgagctacacactatggtcaattatctattctgatgttat

SEQ ID NO: 52944 - DNA, 971 bp, Arabidopsis thaliana landsberg
tagtttatatgaagcagtttgaaagatcgtcctgtaacctgtatgatgagctgcacctagtcgcggagatagtattgttgtttactcctggtactgaaagaatgttaatcttcaattgattggatgatttttatgaagcaaaaaaaattgtgattgatgtaggtgatggatgtgtacacaggaacaaatgggttgcgtcttggagaaaatgatataagacctgctttgtttatagattcatccactattgatccacaaacaactcgaaagatctcacttgctgtttctaattgtaatttgaaagaaaagagaggtaaagcttagataggatttggaaggaagttagtttcttcttatgagttaacaacagcttcattttgttcttcttgtgaacaagtcgagattgtttcattttcactagtttcaagcatctttgatgtagataattgggaaaagccagtcatgttggatgctcccgtctctggaggtgttcttgctgcagaagctggtacacttactttcatggtatgttgacgactctcttatcttctacattatttgaatcacatcctttatataacatcaagtttgaagattatgtgtgcttgtatacctacaagagcacaatggcattgatacaactgcacgttctgtaggttggaggtcccgaagatgcttacttagccgctagaccaatacttcagtcaatgggcagaacctccatctactgtggtggttcaggaaatggatctgtaagttcgctttataccatgtttccgtaactctgttacagtatctctattatcttgatctttggtatatttgtctctacaattcttaaggataatagactgagaaacgacatgttttgttttaaacttaggccgcaaagatttgtaacaatctggcaatggccgtgagtatgctcggcacttcagaagccttagctcttggtcagtcaacttggaata

SEQ ID NO: 52945 - DNA, 404 bp, Arabidopsis thaliana landsberg
agcttcgttgtcgggtgtaggggtccattcatcagccaggttcattgaaggaggaggcttgaaaagatccagttccccaccaaatgcttcacctgctgctctagaaggtccagctcccattccgacagggtcgacaggtacgtcggggtgcagtcacgaatacaattcatgaacttcctcatgcaatgtattgcagtacacctggaagttatcaacggttgtgctaagcccctccacacgggctcgagctttagcctcccggtcctaagcaatggaacacgagttgacagcccaatcgagtgccaaatctcgttcggcaagctcatcttgcagatgtcggatgtcagttcttaattcatttatgcgctgaccatcctcgaccacacattgtttctttggcatag

SEQ ID NO: 52946 - DNA, 312 bp, Arabidopsis thaliana landsberg
aaaaaaaaacaaaagaaaaacacaaaaaaaaagaaaaaaaaaaaaaaagcaaaaaaaaaaaaaaaaaagaagaaaaaagaaaaaccaaaaaaaaaacaaaaaaaaaaaaacaaaaaaaaaaaaaaaaagaaacaaaaaaaaaagaaaaagaaaaaaaaaaaaaaacaaaaaaaaaaaaaaaaacgaaaacaaaaaaacgaaaaaaaaaaaaaagacagacaaaaaaaaaaaaaaacaaaaaaaggaaaaaaaaaaacaaacaaaaacaaaaaaacaaaaagaacacaaaaaaacacaaacaaaacaaaaaaa

SEQ ID NO: 52947 - DNA, 544 bp, Arabidopsis thaliana landsberg
  unsure (1)..(544): unsure at all n locations
cacaaacaagagaggaaaccgttaaaacctgaatttctgatgcttaaccacaaagaaataaggaagatgttggtggtgacctgaacatcaatgtcaagctcgacttcnnnnnnnnnnnnnnnnnnnnnnnngttgctctctgaaaccatttttaacgccttagacagatcctcaggtgagagacgacctagagctgcagaaagtcctttcttttcttgagtggacagttttctgtttatttccaaaaccacaccaaaaactcggttacgaacccttcattaagggtaaaaatgatcaacagaagaggttatttatacctgcatctctgaactactgattcccggagtttctccagctgcagatcaatctcatatagctaaagatacgtacaaagcaaactcatcaacccacagctataataaatggcctgaaatgaaatagatcaacagctgataatcggctttgcatttgcttacttcgttgcttaaatccctagccatttccgcttgtgcagcctccattgtaagctgcttatnggcatgct

SEQ ID NO: 52948 - DNA, 1246 bp, Arabidopsis thaliana landsberg
aaccatccaccaaccaatgaaaccttgtccagcaccaagcgcaaataaaccagagagctgaactccaagacgtagagtaatataccctttacgcagaaaataagaaaacggcaaagcaaacatgattcccaatcctcttccccacattcgatgagcatactccatccaatatatgaacttaaaatcttcaaggttcatccctttgttcacactacaaaacaccaaatcccaaaacacaaacagcattttcaagatcaagacttcgtccaaatacagaaaacgcaaatgcaagcaacagctttagctaccaaaatcgaaacactaaccgcttatattcaggtgactgcttatatttctcaaactccttagcccaagcttcatctgacagaggagggaattcaccagtaaatttccaatcagtcatcgataaaccagatcgagttaatcgggttacaccgccaagtacaaccatgctgaaaacccaagcagccgaaccaaaaagccaaattccaacccatttctgagcttgaggtcctccagtgacaagaagcttcaaaccctctttactctctgagcttatcgacgctacagttgacatcctcctaaacattgaagcattttgaccctacacaaaacataatcctgatcagagcccaatctcaggatcctctaaaagtaaccaaaaatctcaagtttaacataaccctgatcaaaagtctcaacctttaacgaaaaagtatcaacctttttgggaaattattcacactaccttgagcagagatcgcaagccatagaaggagtttccagctaaaggagaagacgaagcagaggttacagaagcagctgtaatgttagaagtgaaaactcgatgagacgaagtggtgaatcctcgagcaattccattaaacgcttctttgttcctcttcagagccgatccaaccgcccgaaacatctctatctctctagggtttaagcaaggtttttgcgttcaggcgacaaaaagtatggcaaatcaaatctcattctgcaacttcgacccgacccgaatatttccgggttcgggttttgctgtggtggctatatggtagacactaacaatgtccgggtataaaaacgacacgatgtgttgaacgaaaacaggaaacaacatacatcaatagcaaaaaaacattaattttttttttcctttattttttatgataaaaaaaaataatttttttttttttatctgacttactaatgattt

SEQ ID NO: 52949 - DNA, 947 bp, Arabidopsis thaliana landsberg
ctgatgtctctactcgtagtttaaaattttaaaataatcattttctcataaagctaatattcagcgtgtcctatgggcttttgtgcttgtattgtctattatgtccataggaattggaaggtaactgtctagtccatttaacataaaattaaaaaatcttggtaactatagctttaattcagcttgaatgtacagtttaactacattttgcatctttgcaaccttaccaatgtttttttccatttcatgattctttgtacccttcatcattagtctctttaaacaacattctttcttctaactaattaatttcaccatcttattctttaattacatatctattctaccataagctttatttcttttatattactcatctcattatacttgtccgagttagttgcttgtcaagaagacgattattctataacaacattcaaatgatgagtatacttagaacataaactgatatctataacctctttcacatgtattattagatcattgaccatcacattcagtcaataaccttgtttaataacctcttttcttaaattattttgtcttataaggtgatttaagatttgggaacacttagtctagcatatgggagggtaaaaatatcaaaaacaaaaacatataagaaaagtaaatgaaaccaaaaaaatcattgggcaatatatatcgagaaacttaatatgatttttcaactacaaaaatatccctagatgcttacatgatccatacggtaattagtgggattagtatagatgtgtatgtcatgaaagtctatatattgagaataagtcaccaaatgttgtatgtcacaaaataatttgtaatccttaaaaaccagtaattaagcacaaagcaggttatatgtgtatatatatgttacaaacctgagcaacagtagctaaaaattgctaagatggtgaaagacaaac

SEQ ID NO: 52950 - DNA, 584 bp, Arabidopsis thaliana landsberg
cgggcgccggcgtctcggtccccttggccgcgaggcggtacggcgcggtctcggcctgcaccgcgatcatcgacatgtggtgcgcgaccacgtcgtgcatctcccgcgcgatacgggcgcgctcctccaggaccgcgttgcgctcgccttcctgctccgctcgttcccgctgccgctccgcccgctcgcgctcgcgcgcggccagttcccgctcgcgggcggcgtgctcggtctgcgcggcgagtgcccggcggtcccggcgccagtacgcggcgccctgcacggctatccctagcacggcgagccacgcggtgttggccgccgggtacacccagtcggggccggtccacagccagaccgggatcagcgtcagggcgatcatccaccacaggtgccgggggccgtaccgcagccccgccaccgtcagcgtgatggcgaggaccgcgtagaagccgccgtcggcgcgggactggcccgggagcagcggggagaccagcacgctgaggaaggccacgcgccaggccaggagcgcgagccgcggcgccagcggcagcgcggcggcgaccactagggcgacggcgagc

SEQ ID NO: 52951 - DNA, 1121 bp, Arabidopsis thaliana landsberg
ataaatcaaacataggacattggatactgaaataatatacagtatatacagcagttgtatatttcagaatatatttttcattaaatcatatctagttctaatcgagtagagcaatttaatttttcttaaaagaacaaaatagaaatttagtgtgaatagaaaatagatgaaagaataagagaagtaagataaaaaggcccaataaacaaagcctgggcatattgtgggctctgatccaaaccataaccacctgagtcttcttcttcttaactaacaccggtcttctacggcggaaacgagcaacggcttaggtcaatcagacaatggcgagcagagtttacgttcattaccaccacgccgatgcctgtagcaaagctcgctggaacgccaggtttgttcttcttcttttttctcttaaaccttatcggagaaactcggacaatgattgttgttcccgagaacaagttcattgaattaggaacacactataacactaaacacttctgagtcctttggggataattttagcttcacacatgcttttatgttttgttttttggcagagagacatttaggtttatgtatgataggccttggcaacatgttcttgatttctactcaaatgcagtggaagggaatctttctgtcctgagtttgtttcagcctaaagttagtatcttttagcaccaagtacaagtctttattcagttgtgtcaagatggcttgtattgtatcatccttctgatgtaaatgatttgttcaaaattcagaaatctttggttcatgatgatgggataactgaagagatgcttcttgaatcggaaccggagacttctactcggaaagacaggaggtcggggaggtgggaaagagtgaatttcaagatcgttctttcgtataatggggcttcttttgatggatggcagaaacagcctgacttacatactgttcaggggtaaggtatttagagacgcacaagcacttacattccttagtttcaaagacttttagttccttatgtactttagtattttcctgaaaaaatgattgttctagcgttttgtggtttttaaagtgtagtagagaagtctctagggggatttgttgatgaaaggaaagct

SEQ ID NO: 52952 - DNA, 670 bp, Arabidopsis thaliana landsberg
atgggtttaatgtggacccaatatctccctccatgtgttttacgtttcatctctacgagactacgacattccatcgtaaggaaaaaaaaaagaggcactagtcgatttactagtaattttactatagatacagtttttatccggttaaaaactaatactatagtcttcatttaaagaaacatatgtagaatttagaaaattaattctcaaagtttccgacagaaaggaaaaagaggaaattgccttttacagaatttaaaatcatttgacaattagaaaaggtgaaaagttaaactttacatagcttgatgttatatattaatcttaaagaaaaaatcaaaagacgcaaaaggtaagagcctttctaaacgagtaacgaacgaggtacttgaaacgaccgcgtatcagaaaggctataaataaaaggcaaattagcgcccaaaaggttaacaaaataaaagcgagaagctaaaataaaataaatttaccatatattaacataacaacaacaaacgggtctccgacttggtcacatccttcgacggctccactcttcttctctatcttcttctccgaaatcgtctttgtcgtcgttacctccacctccagaattccgaaatttctgggaatatcgattttgatttctatttcctcacgctctaatttactc

SEQ ID NO: 52953 - DNA, 276 bp, Arabidopsis thaliana landsberg
gagacaccacagaaaacaccacccccacccgcaaacatgctagcgaatatcgcaatcaaaagaggggacccccccaaagacaccgagtgccaccgccccaaaggccatacccgacaacgtcacattccccggaaaacactcaggaacgccccccagggcgaggaaccgaaacacccaggaccgccccacggagagccgaagacggcccaagtttcacggacacccgacgaaaggcccccacccgccagggaaaaagaagacacggacaatgccgcc

SEQ ID NO: 52954 - DNA, 547 bp, Arabidopsis thaliana landsberg
ctaacgggtgacagcaagcaagccgaagcatggtatgtaaaatcgataaaagccaattatactgatccgaaagcgtaattataccttgcagatgctaaaaaagcacaggaaaaatacaacgaggcacttattgaataccagaattatcagacagatgcaccttctgacccaagaggtgaaaatggggttaaatcctgtgagttagctactaaatggaaagaaaatcctacacgctataaggttgaaaacatggcacttataaacagtaaggacccggattttgctcctacctatgcagataaaaagtacaataaattatattttacctctatgcgtcccggagtaaccggaggtgcttttgatggtactttaggtgaattttacagcgatatatttgaaacccagcaagataaaaacggaaggtggagcactccgactcctgtggccccgcctttaaatactgaggacaacgaaggcttaagtacgattaccaaaaaagggaatgtgattgtatttacacgttgtttgtcagaaaaagggtctacct

SEQ ID NO: 52955 - DNA, 151 bp, Arabidopsis thaliana landsberg
  unsure (1)..(151): unsure at all n locations
tctagctatatgttgtgtccattctttggatattcttataattttttttatattgcttgtttcatntgctatcacggttatgatcaggcgtttaattttaaagtgcgattgtcactctctcctgcagatattggaacaacgttgtttagtc

SEQ ID NO: 52956 - DNA, 1632 bp, Arabidopsis thaliana landsberg
tgcaacccgtacaggcaacctttacccgtgcgttgtgtacgtggtgcagggaggagccattccgtatagctgttgcaatggcatcaggatgctcagcaaacaggcaactagcgcatcagacaaacaaggtgtgtgtcgctgcatcaagtctgtggtgggaagagtgtcttactcgtcaatctatctcaagaaagctgctgctttgccaggcaagtgcggtgtcaaacttccttacaagatcgacccttccaccaactgcaacaggtaaacaacacacatgctttcacattttttaataaccaattcatccacattaatttatatattctctgttctaataagtcatctatctatacagcattaagtgagagaaataagttacgggaacgaccaagaataaaggacatgtatttcgtctaatgtaaccggagtttagtgcttttcagcttcttactaatatatgtgtaatgcaccaatcaaatataatctatagactatttatctacatctctttttccccttataagtcgcatcctttgtttctacggcaaattaagtcttgattgattttatttctttggaccttttggtagtttaatccaccaaccctacaagtacaaatacaagatactaaaacaaaaacagacaaaaaaaaattcaaccccatgaataaactaaaacaaactaagagtcccggccacccgggcattgcggcgtcggggcaatagacatacacatggccgccaagggagtattatgggttgaatatgggccctggatttggatgtcaagtatttaagtgggcctcagacataacaaaaaaagaagagataatggcatgtgatgttatcattcactagattagtcatttatcacaataataaagtacacaatctagtcataagagtaataagatctcaccaaaacatcaacctcttggatggaaaatgagctagtacccaagaaacgtgggagttacaccaacctggttcgcttacataacttcttttatatataaagaaaccaataatggaaatgaggctgacgcaggcatatctgcgtatcatttgtaaatgtgagtgtagtgggcgttgttatgaatcaccaaatagtttgttgccacttctgatgatttcatccttaaagattgtttcttctcagtgctttgttgttgtaatattcacctccttcttttcctttactttataatttacttcattttgatatataaagattacatgtacaaatcctgatccgagggacccaacacagttaattgaaaactgacgcatatatatatacacacaaataaatgcaagtgatttatgtgtatatatattttcttgttagagacagacaaaaaatatcttccaagtgccaagaacagagtctgtagttgtcttattctcacttgtgaattgttattatttttctcccgtaactacatatccatagattgttccacatatataataaatatatgatgccaagaaaacaaagaaaaaaaagaaagagaaaacagaaaaggaaggtccccacttttgtctaaaaagataaccacaaacctcagagacaatcaaagagaccaaagcagagtttaacttaaagagtcctgtcctcttcatcatcacg

SEQ ID NO: 52957 - DNA, 1208 bp, Arabidopsis thaliana landsberg
aaccaaactaacaatgtttcctctgagagatcaaaattgaaagctaaagagcctttgatctttaaaatccacaaacaccattttaaggagatggttcatcgcctcaccggctcaacctgtggtcgtcgtttcgacatgttacgtcctccgccattcgttgttaacaatagcccaccaagtgcctctcgtattactacacaacgtccttatcgatttcctacggtcccgactatgaccgatcccatgatcacctcaacggttgaatcactcaacactcgacctccgtctccaccgtctcttcctcgagagaaagattctgtggaagcgcgagtgatggaagacgatatgaaccaggaacagttacatgggtctatgttgcctcccctgttcgtaaatggtgatgagtgccaacaacaagagagcattcctcctccaccagttccagcgaacattacaccaccaccagttccagcgaacattacaccaccaccagttccgacaagtgcaccgttcggtttttttgagtggcttatgtctcctgataatctacaaacggagaacattcaacaaccaccacttccgacgactttaccgtccggatcattagattgggccaattctatgaccgatctactatccgagggcattcctccaccagttcaggtgacttcaccggacgaatctttatattggcagttgccagaatctctgaacggtccactctctccgagcttgatgttgtctccagttcaacgttctccggaaaattcactgttagggagtgtagacttgccaaatcctctcaacaatatacgaccagagaatgttccaccacaagtttcggcagcttcactgttatggagtctagactgccccatacaatcagagaacgttctaccgttagtttcagcgacttcaccgttagactggccaaatcctcagaacaatctacaaccagagaacgttccaccactggttccggcgacttcaccgtcaatgagtctagactttcctaactttcagaacactccaccacaagttctggtgacttcctcgttagactggccaaatcctcaaaacaatctacaaccagataacgttctaccggtgacttcgccgctagattggacaccaaatcaactagagaactatgtacaactagagaacgttccaccactagttccggagaatttaccgttagacttgcc

SEQ ID NO: 52958 - DNA, 455 bp, Arabidopsis thaliana landsberg
tacttggatgtgtcgaaaaagagaatatgggaactttcttcttgcaaggaacgtactataagtcaagggttaagggcatgcatgggatggtgatgcgatggacatatgctttagtactgcacacctgctgccttcctctgttgctctctctaattgggatgctcactttcatttttctttcaccatcgtttgaacagcgaagactacatctagttgactccaatttttctgcaatagtaagtcgccaagacattgctctgtaaccactacacactatttgtcatacaaaccgacacagctttgtcgcgctcaaattaagagacatttacattgccttatgcaatagctaaaagactagctcatctcataagctcagatatgcagaacaatttatcaaacttatttaaagtagtcttagagtacatgctaccgcaaatcttctttttacggaatca

SEQ ID NO: 52959 - DNA, 341 bp, Arabidopsis thaliana landsberg
tctgggaagaggacacaaccaaacatgtgcaagatccaagctcgacaatagaactggactgttaggggtggaaatttggctcgggctcgacgagcaggctcgggctcggtgaggctcggctcggctcgagcggctcgcgagccaaaacgagcccgagccgagcctgattttgtagctcgccagaactgcgagccgagccgagccggtcgatccagctcgcgagccggctcggagccgtagctatcaacgtcaagtatactattataccatattatagttatggtttgaactattttattgaatttcgtgaacttgatacgtgatacacttatactgtagtc

SEQ ID NO: 52960 - DNA, 971 bp, Arabidopsis thaliana landsberg
tcatatctcatctgttatgattcttttttcttatatgctcacgttagtgtctctcttttccttattctaaatttaaacctgaatcctgagtctgtctattgtttacacaggtggtgggaaaggagggccgggtttatctgtagaagctttagagaaaatgatggaagatccaacagtccagaagatggtttacccgtaactcatcttccctagcacattgtctttaaatgcatccattaagtttatctttaaaactggttgcttagtggacatttggtaacattgcatgcataaatgcagatacttgcctgaggagatgaggaacccagaaactttcaaatgtaagtcttttaatatttaatcctgctatcattcttttattagtcctcatttttacatatttctaaagactaaaggttacatgactagcttttgaatgatgtaattcgtttataggttgatccaatggttatctaaatttaaaatacagtttggtatttattgtctccgcttggaattttgtagggatgcttaaaaatcctcagtaccgtcaacaactacaggacatgttgtaagagctccattttacgaacaatttagttgtttccattgcttttaagaatgtctaaactatgtaattaagaaatactcttgtttgtttcttttcatgaatttaggaataatatgagtgggagtggtgaatgggacaagcgaatgacagatacattgaagaattttgacctgaatagtcctgaagtgaagcaacaattcagtaagacaaatctcagtttgtaccaagttaatagtacgttaaataggtctgatactcaatgattgaatctgtatttgtcagatcaaataggactaactccagaagaagtcatatctaagatcatggagaaccctgatgttgccatggcattccagaatcctagagtccaagcagcgttaatggaagtacgttttctttc

SEQ ID NO: 52961 - DNA, 1927 bp, Arabidopsis thaliana landsberg
ttcggtgattattaacttatagtattacaagctaatttatcatcattaacttatagcgaccgactaaagaaacttagcttttagggatgctccagagtttttgacctgtgccagatacaagatgatcacaatttccattactaaaattttcagaaagtattatgtttacagtgtcaaaaatcccaatgcagctctggagaaagaacaagattcttaaaaagggacctaaaattcaataaatattgtacttaaaagtgtaattgccagaacagtcgtccacattttcagatcattgaggaatatacgttgcagttttgacagcagacattgtgaatgtcatacatatgccgccgaaagataattgcttgacatgatgatgataatgaagtaatgatgatgatgatgtatgatgtgtgatgtataatgattaactaaccgggtttgttgacaagtgtgtgagtgcttaaggttgggagctaagtagtctttcggcctcgtcgtttgcttcagcctgtattttccatttctgcattcacaaacataaagaccaaagtaacattaaacacaaatgttgttgttagtatgtatgcttctgttgtccaaattgaaactggaaaattgcaggaaaaagatatatatgattaaatgtacatgtaaatgagtttcgaactctatacctcttcaaggttttcaagttccatgatctgctctatctgttgagcaatgttttcctgtgaagcatttggagttttacacacaactctcagattcgaacatgtcaggttcataactaaactcttagaaataacttacagtattgttcactgcctcggctgcaagaacatcactgtccatttccacctcaatctcaatcattgaagatatctaaacgttaaagaaatcgagctgaaaagttaaaaaaacagaagatcaagtgacattttgaagatctaaattggttttgtatcgttttcttactctagcataactatcgatcagctcaatctttccctttatggagttctctagactttctcgtaccttctttactcttgttcttcgagtactatatttgagtaagatacacatgttatcatagttctgttaacaatttcttagatgatgaggttccaatgatctgagaggctcataccggtaagctggctctcccactgctaaaattttgttctcgagctggcacattcgagccaacatccacacctaaatagatacaacgaagttttgtaagtgtttttgattacatattgtgggtttcaaaaggtatggataaatgagacttggtacctctttctcaactgcttcttttagatctctaatgcgacgctggagcacatcatattgagataaaagttgctgcttgataccaaccacatctactgttcgctcagggagctgaaaccgtgcaagggattatgagattcatacccaagagactatcatatgtttacttgacgcagttcatgtgatagagaatataaacctgatttagcttaggaaggacaaaagaatttacggttgctcctatcgctagtgatgtaacagtagcaactgagagtaactgaggcaaactgggatcaataacaccagaagcagcatctccagtagccaaaattgcaagaaggggtattagaaacgagggttgtaagatcttatctccatctttactaggaggccttagcaagatagattctcgtccatccttgtgttttgtgaggctcataggttctccagggtaaaagtttggagctttggagataaacttgaaaggtcccacttgtctgtaaacattagaaggagcagcggatgcaattgtcactctttctccttcttgcgcagggagttcggctgtctcagtggcaaaccggtgcgttcgtgctgtaccggaaggagtctgtacctgaaatcc

SEQ ID NO: 52962 - DNA, 553 bp, Arabidopsis thaliana landsberg
  unsure (1)..(553): unsure at all n locations
cggggatgctggtgctcgcggtagacnnnnnnnnnnnnnnnnnnncatcacagtcacagcctcttccaaactttcactttgcgtgccagttggcacggcagggtgggtcgacatgattaattagcgagtacgtagcgtgtacaggtgcgcatccgtgtcgacccgccacgcgcccgcgggctgtgatgcttgacgtcggggaaaagtctccgctctccgccgcgccgcgccatcacgtccgacgcggaagtcagcccgcggccccaccctctcgagtcgagctcgagcggacgaccccgtccgtccgcgtcgtcgtcgtcgcgatcagggggagtttggagagggtgcggcggtgggtgggtggggctgggcggcggcacatcgtcacgtggtggtcgccgggcggcggtggcgggcctgctgtgtcgtggactcttggttagaatagaataatgcatggcgcgccggcgtgcagtgccgtttccggatcatgcgcgcgtgccgaaagcgagggcgtgctgagacggacacgggatgagcctccggatatttg

SEQ ID NO: 52963 - DNA, 814 bp, Arabidopsis thaliana landsberg
gcgaatgtgtctgttccaaactttgaatcattaatgggtcaactttttacttattgagtgtttgagctttgtattgcatgaggtcaaaaaacatcttatctaatatcatatcatatcatatcaatacctctataattatgtggttgatgtttgtttacatcatatagacgtaaattaattatctctttaaaaaaaaatgtaactgttaagtttaagtccaaatcacttttataaaaccatctaaattctttataagctttttaaaaactttgtataagggtacagttgaaaattaatattattaaaaaatcatttttgaaatttccccaaatcattttcttttatcactttaataaattttcttacctacttctacagttctaattgaaatggagaataatcttaaaatcaaatcaaatcaacgtggttgaacaatcataaactacttcgtacgctttagcatattgaattgccttcttgaagtttaaaagcaagtttttctcttttttaaaatacaaatgcaagacaacagatttaaacaatgatttgcttggtcttgaagaagagaaaaatgaaacgtacgagatccacaatagaagataatacaagagcaaaacgaagcatgcaaatagagacataggaagaggaggttagttctacattcggatgctccggcttgtgttgggattgatacctcgggcttctcctgcatatggacccgtttgtttcctgatatctctgacctgtcctttgcgtctagtgacttttttctcgtaatttttctgcaaacaaaaattcaagatcccaaaaacat

SEQ ID NO: 52964 - DNA, 559 bp, Arabidopsis thaliana landsberg
tttcttgtgtacaaagtagctcaccagtaactgtaattttacctaaaaaaaaagttaaaaaacatgatcaatctgttgttttaccagtagagtttgtccctctcttaccattaatcaaagttttaattgttggttaatgtaactaagcttatactggtttttgctataatattttttccaaagacaatttaaaccgaattcaaacccagagaccaaatcagaccaaagcaacagtcagaatccgaataacatgacacgccgtcgtataggaacgattattgaaacgatggtgtttaagacagcgcataaatggacacatgctccactagacgacgacgtgtgaaagtgaatgtaacaaggagttttattacaactgtatcaacatcgagtaaaaataaacaaaattatttattttttaaattaaaaagtataaaaacgccaacaaacaaaaataatttggtctttttcttagcatatttaaaattttgcaatatattcattctgcttatagaaaatcgtgtcgaccttttttctctcacttacccaataagagcttttt

SEQ ID NO: 52965 - DNA, 516 bp, Arabidopsis thaliana landsberg
ttgatcccacaagggtaaaaaaaaaaattttctaatttcacaaccgcgttattgttttcatggggatgggggctcatgtttctaagttctaacttatgcacatatgaggagcatgacgaggctctctggttacattgcgttcaatactgtggaactggatgggaatacgaatgtccttatccatcttgggcatccctttagcttacaattatttgacactgtaattcttgttaccaacacttgtggcaactgtattgtatacattgttctacaactatgctgattagtgcttacatggaagggtatcaagttgattcattgtattcaaagattctttcatttatcgattcaaagttttatgtcattatcatataaaaccgcgtacaaaaagaggaccaatggaattagattagtgagcctaagctgtagcaaaaagattacatattagatatgaagccgactttagttgccttttatatcttgtgttcaaccatgtcataatttgattttcacaag

SEQ ID NO: 52966 - DNA, 855 bp, Arabidopsis thaliana landsberg
atcccatcaaatatgctacctatattttatccattgaactagattaaccatttataaaccgatcattatttgaaaaaaaaatagatatggacaaaagaattcgaacatacacgaaattcaacccgtcttaaaatggacatgcgtactaatcttcacccgtcctaaaactttgtgactatgggaacgttttgttttgtatattatagtgacttcaaaacgtttccataatcgtatagactgtactagctcgaacaatcaaagtactaaagacttgtcaaacaaacccttaatgaaaggtactaaagaccgagaatgctctgttccaatgatttagtatatgtgttgaaaacaagaagaaggtacattactcgttttaactcttttttcacaatgtatacgtgatcaccttgcattccctaaaacaaagagccattggaacgtctttaaacctttagcaaggaccaatgagtattttgatttgttcttttcatagttgcatacaccaaaagaaaacctgcattccaaacaaaaatgatattagcaaaaaaaaaaaaaacatgtttaagctttgtgacacattcatcatacagtagcagcaagaaccttgacgcgataacataatgtagagattgtaagaagggcttattatctttggttttcatatttgtagaagtagaaggtgagatgcttacctttaccgttgaattcagctgaattcaacggttactatttagagccttcgttttgcatctcacaaaataagaaatctttttaccattcaagggtaaacttatatatataaataaatcacattgaaattgtaaagcccaattgttttgaaacaaggggagatga

SEQ ID NO: 52967 - DNA, 1114 bp, Arabidopsis thaliana landsberg
  unsure (1)..(1114): unsure at all n locations
gtctggcttccagtttctcttgcagagcttgtagctcacgcgcttttgtctctatggatttcttcaacacatcattttcctgcatccagaggaagtatgtaagttgaaaagattcaaagtactttaaatactaaaaatactacaagaaaaattgagctgcttacgtgttcccttaaagcaagatcttttatcctcgaactgacatcgtcttctagtttcttcacagcgaggttagcagcatcaatcttcttttgtgcctcttccagttcttttcccttttgcttgataatcttatcgctttcatttgccctatcttctctctgttttacaatcatttgagatttagcaactctttcttctccttcttgcaactttctttcccattcacgcaagtcctccctctgctttgacaaagttgcctcgtctgcttctcgtctgagaaataaaaagaccaaaacaagttgagtcatcacccactaagcagcaaggaaacgacataaagataaaactattcaacatacaaaaatgatataaggaaagaagtccaatacgtactcagcaatgtaggaaaaccgctccctttgaagagaactttcccgagcttccacttcctttgccttcctctccacatctgaactctttctactaacttcagcaagttttgcatcaacagcacgcagctttgcctcaacttcaagagatttttcttcaacacttctaaccaatgcatttgcctcagtcaactttgaatcagctgtaaatttgatctctgcattttcagcgcgtagctccttcagagccttctccagctgcaacagaacaagagtgtcataaaccttacatgtgctaacaaattacgcttatggccaaaacgtctctcaattagagaaaacaattatatacataaaagaagagtttagaatcttacatcaagtgcacattgcttctcaatccctaaagctttcctcaaaccctcttcccgcttttcaacatctgctatagcaatcagatgcgcattacgttcctgctttagacactcattcacctcttcaaaagcctgngaagcgcttcatactgggaactccactccttttctcaatcagaagaagaccca

SEQ ID NO: 52968 - DNA, 1182 bp, Arabidopsis thaliana landsberg
aagtattgcgatgagcaaatctaccattcaccattcgaaattaatcaacttggattctaaaagagagatgaagagaaaaattacaattccgatcttgaggtgagaagagaaacggccaagaataggcctctctacgggacctgcatctttagctttggctttcggaggcatctttctcaaagtctcgagcttgaaagtgaagcgaagctctaagatattctagggtttttgctgattaacaaagcctagcagaagaagctacaagacgccgacgccgaggttaaagagagattgctcagctggtttacggaccggtttaaatcggagggttaattcccggtttacttttaaccatttgcgggacatttaccaaaatacaaagagctatttttaaccaattttgtggacaaagtaaacccaatattgaacactaaaccgagaaatcaatcattcagcatttcaacttaaccaaattaaaccgaaacttaaattaggtaatcataaaccaactgactaaattttacttcatagatgttcttcaaaattttgctacaaaaccacatgcgatcagataataccacagactcgcacaaaactcatgtcaacttcttttttttagagtttacgcactagctaagagattgtaataagaaacctacattgcaaaattgcattccctctctctatgactattagattaagaaggattcaggaggactagtggatggtctgattcttgaaggcatcttcaagagcctctctgtttctcgcatgaaagagtgtttcggagttgtagacatcgtgttcatctcactatcaagttcaacgtcatcgtcaggttcctccgcactgtctgcatctccattcactatgacctcatcacaaagctcttcgtcaccatcttctccataagtcgttttcaccattgaccagaagttgaagttcggggagatgtagcttcaagaattgacaagaaaacacgtgtgagaaagagagttcaagcctatccaatgcaaatactttgattcatcacttgttttatcatattaaaataattttcaatgtcatttcaagactgtaattaagatgtatgcagtagaatttgtgtcagatatgcccaggtagggtcaattcatccagtgagtcaagaaccttgtgtaagattactcacattgatttgtc

SEQ ID NO: 52969 - DNA, 734 bp, Arabidopsis thaliana landsberg
catctgaaattttattttaactttttatcaagtttcgttgtctcaaatcaatcacttataccctataaggaatctcatttaaaactgaacgattcttgtaagcttttttgtaaaagacaatgcagtgaagaaattgtttttcttaaaaaataatttcagcatttcgtgttgaccaacctaatatgtgtctcaaaaaatagttttacagactcgaaaattgtgccaaataaacttttaattggttaaagaaaatccatatgaaagaagtggtttttctttatttttaattcatgaactttgcttggatatgagtttacactttacacgttttaaatttaatcttttactcgatttttttttcttagagaacatcaatattggggatatatgtttgtttggtttgctttgaactttgaccactcaactttagggttcaatcaaaggaaggataaaagccttgagcttgaccaatatcttagggctcgttttttattattttggggaaagggaatagtagaaatagtagaatcaaatagtaaaaataacagaaataatttcacgtcattatatctctacatacatacaaatatcgaatcacagcttcaaattctgattgagaactaatttcttataaatattgtagtcaaaaaaagctataatagtgattatattggacctccatttctataaaattctggtggagaatcctaagctttattggatatctggcttat

SEQ ID NO: 52970 - DNA, 593 bp, Arabidopsis thaliana landsberg
attgtaaaaagccaaagaaacgatttcttcaaataaatttggctgatactgtttccattaaatagtacagtatatttttactatatgattctgaaataacatagatttatactcataatgtttttaaaaatatcgattataattctatttaacaaagttagaacttagaagcatttgtttttgatatatgaattgaataaatttcataataagttaataacaatgagtttctgacttttgtgactaaaacccaaaaagatagagaaatcagtgatttcaaattttcaaatcacatattagtagtccactataagtgtaagagctaattaagagttttatggactctaagcccaatatgattggtctattcaacaaaaacaaatgggcatcgggtcttaaacccaacacataaagtttcttttctaataactcttcatatgatttagtattagttaaaaagggtatatttattcattgtaaaattatttcaacttttcaaataattaatagtaagaaattaaatactgtctatcgatattctttataaaatccgataatattcacacatggtttagttttagttttattttttt

SEQ ID NO: 52971 - DNA, 682 bp, Arabidopsis thaliana landsberg
tagtagtagtacactagactgatgcaaattgcaaaagtcaaggaaagaagttatatgggagggctaatgatgttttccaatttaaatagtttaatcccactttaaaacttttaattattgaagttaatgggcacagctgtatcattattcacaaacttctcttattcttcacagcttcaatatatgcgtctaggttcactgaatctgattagacttgatgataaagttgatttgcttatgtctgtgtttattcattactctcatttaaaagttagtaaagagtgttagttttgaagcacaaattaacaattcttaaagacaaaaacactaagtataacacttcaagttgcgtttgtggtccaatggatatttccttcctttttcggtcaatatgtatgagtcatgctaactaactcttaagatattaaaatggatgccatagacctagctcttaagactttatcatgatgtttaagttaaatccttttcttttgtcttttaaaataattaattttatcaaaatcatattgcatttggtatcgttgattgtgtgtgcatgtgtgtatgtgtccgtgttgtttttcttcttaaaatttggacaagtttgtaatgagtgagtggtgatcgatcattcggtaagagaaagcattggacgaaggtggtcaacaccaattaacccaca

SEQ ID NO: 52972 - DNA, 918 bp, Arabidopsis thaliana landsberg
taggaaactataaaaagaaaaaatttctacttgagactggtataatggttgtgtaccttcatgcttatgatatcggataaattggagacatgggttccaccacatggacacccggggctgtcacctaattttatgatccggggagtgctgccctgcaagggtgaatggctcagagacatcctatggtggaacataactgttggcaagtgaaatggctcagagacatgcgctttgctatccattttttattgcttaactgactattaaccagacactgcattatggtaagtaactaaggtgcttccaaaattttcactaacatagataccaaatagatgatatataactatttagacagagcaggaattgatacagaaaatggtttatctagcaatggttacaatttacttaacaaagccaaatataattacatcacttaaagaaaagccactgcctcaatgtgaattgacagcaaatttctgatataactaaagatcaacactgctgcttctacaagaactaccgtcatttaaggatatgtctatgaaaaatataactctgtaagctgacttgaggtttatgagcaatggaagaaaaatcattagaaatcaaggaaagagtttctatttgcaaataccttggaaatataatcaggaagactgccaccacagagcacagatgcctcttcatagggcaatatagcagcataaaccttatacagggtataagaatcactattaagaagaataacaaaaaatcgaagaaatccaacaatggtaaagagactatgaggacttacctttcctcctttggataccagtccgttagcttccgcctccaacctctatcggcttcaccctgaaactacctcctgtggggacgctatcctttgtaattccaccaaagaggacctgaatc

SEQ ID NO: 52973 - DNA, 1097 bp, Arabidopsis thaliana landsberg
  unsure (1)..(1097): unsure at all n locations
taaagagaactcatgagttgatttttttattagaaaaaagtactagaatccgatcttggttgtactcctaattaattgtagttgattgagcttataatagtgtaaaaaaaaatttttaaaaaatacgagattatgatatgttttgagtcttagacctaaactcatctcctcttccttacatttctaagaaatccgagttaacaaatcaaatcttaaataataaatattcttattcctaacaatagccaataggtaatgttgaagaacttggagtttttgtacaatgttttgttctgacatgatcacaactttttggttaggacttgggaggtttctacgatcgaacctctttaaacattacatactttaacataagcaaatcaattccaatgagtttttttttttttttttaatttagagaaacaacgtgttatcagtatgaaattggtggtgaagaagtgaagagatgtttcacatctatgcttttgaggcttatgtatttcaggttcgttggggataaagaacttttacaaaagtgaataatagaccaaatagtcaaatctagctatcgaagaaagcgaattcgtcggtttcaagaaatggaggctacacaaaatttaatattatacgttcctctttctttaaatgaagaaaagtgtctatatagctgtgggtttgaccaattgggaaccaatctttacttcttgattttcttataattttccaatctcagctaatgattccacaattacgacataatcgcatctgatttttaaatattttcgttgatctcatatgtgttacaacccaatacacccttgcattcattaaattatatcgctaacatcgaacccttttactttatcaagaaacaaaaaaatatcgaacctttagcttcgactataaaactcaatttgcatttaaaaactaaagtgtaaaatcaagaataatacgtggattatcaaaaaagaataatcggtggatgttaaaaggaataaaagaaagtacaaaacgttgtatattattgctcagtataacanaacaatacattctgagatattcgtattccatcctttcacataattattatattcttt

SEQ ID NO: 52974 - DNA, 689 bp, Arabidopsis thaliana landsberg
  unsure (1)..(689): unsure at all n locations
ctggccaagaggaaccatgcttgtttccagcgattctgacccatattaagaagtgtaagaatgaccagacattgaacatggccaagctcgtaaacgccttcttcatctggaataagacttctagcagtcttatacgtatcacttggcgcccaagggttctctacttgaggacttagggcttgtgtcacacccttttgtataataacttgatgacattctgcgtaagccaagatcgcccatagagcagcatggtctcctgaaccagatgttgagagggatacgactgtaggatactgataagatgcacgtagagaattgtgcttttcaacaattggtaaccagcaatgagtataagaaaaatatacgtcaagcagttcccaggtattatcaggaagttgaagctgttccgtgcctgcaggtctcatagtttgcgaagaagaagtgccattgaaaccttgcacagggaacgtgctggatgtgttgagctgccctgcccttactaaatatgcattgggagaagttttnnaagtttggatcgggacgtgcgaacttcagttggtgggaggtcaatgacctatttggnccgtttttctctttgctagcctatcatctgatatttcgagtagtgaaggaagtgcatctaattctcgagacaaacggctctttctccatgtatcaacaatgtctcg

SEQ ID NO: 52975 - DNA, 619 bp, Arabidopsis thaliana landsberg
ttgagtcgatgacggatcgacacactaacgtcgtcgatcgagacggatcgccaccaagtcgccatagatcgacatacaatcgccgtcttgttgtcttcgagaaaacgatcgatacgaatcgaagtcggagaaagaatcaatcgtcgtcttgttcgccggtttcagagagaaaccgaacacgcgtttccccaaagaaaaaaaagaaaaatgcgtaaaaaattaagtttcctgaaattttcagtggccaataaaattttgccacgtatggtccctgatgtctcaacaaatcccttctttatgggccttttctaagggcatattgctctaaggaacccagaagggatcattattggacatgctcttatacctttcttttcttttcttttttctttttttgtaaaccaactattatgatgacctaagaaatgaatttcaaatggtatgatagtagattttcatacaatgtttctttatacaaaaaggttacaagaatctttcaatatcatctttgtatatcctagaatctttggactctagaaactaaagcgaacacataacacatatactgttaaacccctatatacatccccctaattttttgtaataccccaatggttta

SEQ ID NO: 52976 - DNA, 639 bp, Arabidopsis thaliana landsberg
  unsure (1)..(639): unsure at all n locations
tagaggtgtttccacaacaaaagtccccaattttctcatccacacacacttagatgattatgctcatcatatctctaaagtctctctaccaaattaaatgaaacaaaacaatatcaatttccatttctacggattatcaaacattttaacaatcaacaatgaaacaaggcaaagagagaggtatgcaaaatgaaaggagaagagaacaaaccacatcttggttggcattgaacttctcacgcagatcagaagcctgaaaggtaacgaagatcaaatggaatcaaaaaccaaaatgagagatcggtaaaaaatcaaaannnnnnnnnnnnnnnnnnnnnnnnnnnnnaaagacttacgtcacggtagaagatatggcgatgaacagcccaattgagagtatccttaagggcacgacggtaaaggattcgaactctctccttctgagccgctcgccgcgcaaagtacgccgccgtcgaaactccgctcatttttgtcttcctgattccgattgatttcgagtctctctacactcttttcatcttttacagtggaaaccttctgtttccgttggagggacgagaagaaattcaaatgggctttgatagacttgaattagcaaaacggccattaaaaagagga

SEQ ID NO: 52977 - DNA, 853 bp, Arabidopsis thaliana landsberg
cgttaatcaatttagatcataggataagtgtcaacctcagtaaaccatatgtaagaactttcatggattcgaacaatgcaagaattttccgagactgtcattaagggatgcataaatgtgagactcaaacctcaaaacaactcttaaagctctctctcaccaacatcaacatgtgaagcaattataataaacatgtgcaatcacatcaatctctttgatatgaagtaaacaaatcgtctaacgtagacaacatatgaacatacacattgacaagtttctgtggccaaataagggataaagtagttcatcaattgggataacaaattaaagaatcgtctttctgaagaagagagtaaaaaaaaacactcaatctatgaaaccggttcttctgaaaacagcattccttacctgccggagatctctccctttaagtgtccttcctgctccttcaagcacagagcaagataacaacgacgactgagccaaagaccgagctacaatctcgtgaggcggaagcatttcgccttcctcttcttcctcatcatcatccaccacatcagtcagcttgaattccttcttatgacgattcatcatcgcagacgacactaacggcacttgaaccggagctgattgaggatacttcccaccacctacaaaagaagctgaaaacggaagcctctcttgaggcggtttaggcgcggtcgggatagctcgagctgaagacgaagaagcagctgatgcaccaccacctgaagaagacgatgaagaagctgtggaggagacagaagtagagagagcagccgcaggtttgtggtgaaagacatgacttaagtaactactactcccaaatgat

SEQ ID NO: 52978 - DNA, 684 bp, Arabidopsis thaliana landsberg
gaatcggcttagatcagtattttgccggaaacttgccagcctattttgcttctgatatttctcttgtgaaacaggagtcttgccaattgccgattgctcgtcttcattttcgttgttatggctagaagctaaacatccaatggacctcaagctgtatggattagacccactagattggactgtagaggtgctgactacttgatcatcatcactacttgttgagttacaaaatattgagtcaactactgaataatgaagtcttttttctgacggagaaagagcactttcaaaactttcttcagaatttgcttcagactgtgcgtccatatctctaagaggtgtagataaagatgctgtacccaagggatagcgacctcgcaacttgcttagcggtaccagttttccaaacgcgtccctgggagtcctcaagggcacatcttcatcaacaatttgaacctctccgcaagtctgcaagaaggatttaaaagatataagcctctgtcacagtaaacaaagatgcattccccatttttactaataaagatgcagagtgtctatgtatatatatgagaaaatgtccatacaaatccttcaacgtcagtccagcgatgctttaaacggaaacgttgttgtccacgagtaataacattgaatgaaccatcaccaagtcgacggtattgtagt

SEQ ID NO: 52979 - DNA, 331 bp, Arabidopsis thaliana landsberg
ggctccattcttatctgtgcgcgcgtctcatctctcccctcgtcttctccctttgctcagctgtggagcttgccacccggccgcctagctccgttcccagacgcgcgcactcctgcgcgacctccctcccagctcccacgcgcgtccgaactcgtccccatggtgccggccgagtcccagaccggagctctcactgccgagctcgctacctatgacgcacagccggagttccgctcggtgctcatccttcctcctcatctgtcgcgccctgctcgggttctccggtgctggtcgatgctccaagtcttcatgccatgcatggcgcggccaa

SEQ ID NO: 52980 - DNA, 600 bp, Arabidopsis thaliana landsberg
tatatgacattcgaacattttgatcagaatttttgtagatatatattttgaaactctctgtttactaaattttaattttcttgtgataattgaacatttttttaatcattttccaacaatttctacaaaattttatttttaaaaagtatatattggtccagttcaaaactatatatttacgaaagaaaatgaaatgtagggcagtggttgtgagaggtacacgtatgattctgaagctaaaaatgagattaatatatgaaggaccgactctctgaagcgaaaccgtagacgcgggaagctttttggaaaatggaggtggaggaagccaagatcttgctcggctttcctcctaattctcgtcccgatccttctcaggtttcttcttctcttctttttcgattacggtcgtttggtgagtttctccgcgagaattttcgatcactgaattcgatcaattaaggggtttttgaatctatcttgtctttttgaatttgagagctgaaaatggttcgattatagactcgaattttggggaatgtcaattttaagttgaatcgatggtatatccacaagtttttgtttgttaggtatggggaattg

SEQ ID NO: 52981 - DNA, 2365 bp, Arabidopsis thaliana landsberg
taagccgttacggaaatctacaaacagtttctcgaacaccttccactgcactttgattggtcttgaatatggatatggaagaaagccctgcatctcttagatagttagtttctactagaaaagaatttgaaaactttatggacactgttatcctttcttacatcatattcttgtgcgattgatttcagcacggtaaatgtatgttttgtgtcctctaaattgtcaagaagagccagccaaatctttgttgcaagctcaccagcttcttctttcgattggccacaaacaatcaattggtctgccaccagaatataagatgaatgccgtcattagcaatgattcattaagcagagtcaaatgcatataccaaactagcttaccgataagggttccatgcaaaatgcctgaagcaggcatagtggaaagttgaagctgatcattcaagaacacgtaaatatgtccaagcatctcatctatgtctgtatcatccacacctaatatgtttctgctgatgtataaagccacatatctcctgcagctaaaaggctgttaagttccttgaatctaactaagacattattaagctagcttttttcatagaaatcaagtgtgtttccagtcaccgtttgcttaatccttgacgaattggtccaatccagctcttagttttgctagcaagtggatacgcccgattaagagcagccagccataagcattctccgcggaataaattagcccactgctttctaacacacgatacttgttcccaatttgttattggaattctgataaatatctctatcaagagatcctctgtaagctttccaaatggactatcatctttcattgtcggagcaacgttctcttctttacttcggttcattactatcctgcaacacatgttttacacatagatcaccaataatacataagcgacataaaagcaacatcagtcacactaaattattccatcgaaatcaaacagaacattattgaatagcactcatttagtagctttttaagtatgtttaagagtaacaaacacaacactaacttagaactttaaaaaaacatatctataagcctaaagcttattaaacaaaaacatattacttacagattcttaatcccagtgaagcttcattcccataatccggaaacaagcaaactaaaaaaaatcaattgcttaatggcaaagcaaaaagcatagaatcaaatgttcatacgatttgtaaccaataaaaggataagcttttgtctacagttataagattaaaaaagtaacaaaatttgagtaaaattcatatgagaatcccatttgatcactataggctcaaactcaacaacacaagtccctatatcaacaagaaaattctattcagaggatcatagcaatctgattgattggaacccaaaaaaaattctcttgaagaagtcaaaattttataactagaaagagtagaaaacgaaacggctaagatgataacaagcgtttcatcagctgaaacagaattcaagcaaaaatagaatcgaatgagaacttacaagaggtagtaagtaatccctgagaagaagaactggtgtgagagacatgccaaatgaagccatggatcataaccacaagctctccaattcggtttaatccaatccacttgaccggaatcgtaaccaaagtaaattcaaaaaccataccaatataaccaaagtaaaagacgacgtcgtttcatagtagtatacataaatttggtaaagaaaaagcccattttaagagaagcccaaattgtcatcagaaacaaagataagacccgtagatgtatgagacggaggagggtaaagatgtaattttaaaagagagaagtgagcaaatggaaggagaacagatagcgcggcttttctgacaatattctctgtacgatgcttttctttctatctctccccccactgacctacctaccagttgttacttgttactgcttcttctccttttcattcattcatacatctctctccttctctaatcaaacaccaaaacaaaaccaaaaattaaccaatagaaaatgaagtatcagaaaaagtaaagtaagaaaccaaacagtaaaagacaatttcgacccattaggaaataaacaaaaagtcaaattgactcagaaacctctttgtgagggttttgactgcaaatggaaatttttgaggaaagggttttaagaaaggaagaaaatttctagtttttttttggaatttgaaatcacaaagtttaattattgaatttaatgacatctgtttaagaatcaataatacttgctctcctttcctctctcacatttatattgtgctctctctgtccatttactgaaaaaacttgaat

SEQ ID NO: 52982 - DNA, 722 bp, Arabidopsis thaliana landsberg
cgcaatggcgtcattgaagatgataggcaagtcaaaattaggaatcactcaaaataaatttcttcgattgattctcttttttctaatgtacaagattctgtgtaactcaactgttgtttcttttgcttttcttttgatgtgtttgtgtaagatcagacatagccgttaacttcacaggttagttgaggcatttccacaaacactttgtgaacatgtccttctctgatcaatttattgcacagaccatattaattctttagtctaattgaaacagatgggatgttcaaaggactttaccatggcaagaactgtcatgttccggatattgccactgtcttgaaccgggcttggtctgctggagtcgatagaatcatagttgagtcactccttattgattctttttgtttgaatgattacaagtgatagactttgagtaattcagattccagttttcctgaataggtaactggtgggtcattggaagaatcaagagaagctcttgcaattgcagagactgatggtttgtttgttttatagatctttttttcagaaagtttttagtcttttagaagtttttgattgatgtacattttttgcaggtaggctgttttgcactgttggtgttcatccaactagatgcaatgtcagtttttttgctttacatactcgagagtttcttgaaatctaaattataatcttctgtttggatagatctttaatgt

SEQ ID NO: 52983 - DNA, 589 bp, Arabidopsis thaliana landsberg
acatagatccactcagtcttgtacttgtcctcttgatctcttgaatatctatcatattctatcttataggagaatatagtatgtgcactgcaggtgatggcttaagtgtgtgcgtgtaagatttgaccaaaataaacgtgtaaactgttgaaatatgattcaacctcgagactactctaaatcatcttggagaagcttagacaaaaacttgaagactgcttgaagtagaagaaaggaaaaagagtaagtaaacacaagaatcaactaagtgttaaacattctagttgatgcagaggatttcaggggtttaaggaaaaggctaagactctgtaccaagtagagattttgaaaggagcttatgatgacacttgtcatcatatgagaggagctgtcttaaatcatcatcgactataaaacctgaaacagagcgtacaaagaagcgagcttggtgattagcgtgatcattcgattttagatcgttgtgtgcgtaagagagatgatgatgagagatatcttgttagagtcttctcaagttagggttcatctctgattcattcttcttctttggtcttcgctatttttcttcttc

SEQ ID NO: 52984 - DNA, 1282 bp, Arabidopsis thaliana landsberg
ttctgtttttctcatcttcttcttctttcctcttcgtttcacaaacctcctctgcttctggatcactctcgaatctaaacataaacacggcgtgtcctcctcctcctcctccgccgtcaccggaacttttactctgaaacaaccaattgtatacatcccaagagatctgaacatgaactccatcgatttcaactttctcatttcctctaaatttccatctaagtctcttgatctgcagaacctgtttcgaatcaacgctaaaacagagcttagcgtcttcatcaacacgacaatcaatagaaatctctctgttcttccctccaaatctcgctttcgttgtgaaaacctagctccaaacacgtgctctttcctcaacagaagagcttgcggattcgtcggaggtttcgccgatttagcacgagcgtaacgttctttgactgaatctccgactaatagtcccatctctccgtcaacaactacagcgatgtagaatccagatctaggttcggatccagagtcgaatttggctttgcttaagtcccagaagacttggattttgggagaacgaatctggatccacgttttttccagaaagctaatgtgtttaagttgagatggaaagagacggcggaggaaagagagagatcagcggaggagaaagagagtggtgaagagtggttgtagtaatcttgtgaatggaggaagagattcacagagtggcctcctaagaaagttcgggaccatgttagatagaagacgccgtgatctgtttggtagagacatgttgtgagattcggatcaccggaagataaaggagacggtgactgcgacggcggttgcggtggaggatgattgtgatcggcggttgggcggagccaagacggagacattttcgtgtttactttttttttttcaagttggggaagaagaagaagaaagaaagaataaaagagagagattttcgggagttttgtatttgggaggtttttattatttggttaaagagggatttgtatatttatataaaaagattgttaaattttcagaaaatggaaaggttataataatgattggctcgaatcatacgtaaaacaagaatgtggatgaggattgatagcgatatgagattataattatgcgaaaattttgatcttgtgagcttgcaacttgtaaacttgggcataaaatctgactttttcaacttgactttcttcttatatatggaggatggatttaaacaagaactattcacattaggttgaatattcgaggtatttagggt

SEQ ID NO: 52985 - DNA, 189 bp, Arabidopsis thaliana landsberg
attgggctctacataagggactacaattctgaatcggcctgacagcctcttacagtagatgtgacaacacatgccaacttgggaagggctattaaaaccaaagccgaatctttcagagtccccacagacaacatcgaccatcacatccaaatgggcaatgacggaattgcaagtggcataatgaacaac

SEQ ID NO: 52986 - DNA, 603 bp, Arabidopsis thaliana landsberg
aatactagatcacaattcaaacaataaagaaactattttcataaggggcgagtaggcatgtttatcaaggcaaaaccatgcaggttagtcttgtccaaccctgaaaagtataaggcttagccttaaatatgtgtccatataaaatcgggctttccgtctaagcccgtttgggctaacgggggttttagacttagcccgatcagactcgggcctatcaagataattggctggggtcgtaatgccttcgagagcaaaagctgttctgcttgtcatgttgctgccagttccgtttcaaggaagctgctgttccccgtttggattgaaggaagtcgacaagcaacttccgtgggcttttgagaaagtcatgaattatctaacttcttgtttgtggcaccttataccttttatatatcttgttttccctctctcatgtgacacctctcttgctcaagggtttgcaagtttataagcagttgaaacctcaaggctactcctagttttatgtgggttttagcttatagttaaaaattgcgcccaatccgcctcattcttacaatgtatgtcgcaaatccgcctcattcttacaatgtatgttgcatttgt

SEQ ID NO: 52987 - DNA, 564 bp, Arabidopsis thaliana landsberg
  unsure (1)..(564): unsure at all n locations
gaagttgtgtaaatcaatgctgtttatacttaaacctttctcttaaatacacaaaaaggttcatacaaaccgtcaagtggtttggttcacagatattttaaaccagctctcttctatataaagtttcaagcactgttctcagtcttgtatttcctcatcttgcatgtacttctcctgtacagctgcgactgtgaagactatcgacaaacaaacaattcttttgtagtttacgtaaaactctactcaagagttattgagagaagtaatggttaagaaatccaaaatgctaaaaaaggatatctgttatcatcccaatcagtttgaccaattgcaatcttgctgcattcaaccacacttgcatcaatgccggcaaatatgtatccattgctctggtcgatgagctttactagatccccaacactttgtttatcctgaatacaaaaaacaacattgcgacaagatgctcgtacagagagatagagagagagacgtactggatatcgcanacctgaatatccaaggttgtaataataacaggactgtaatcttcagtgacactacata

SEQ ID NO: 52988 - DNA, 941 bp, Arabidopsis thaliana landsberg
atattttatactgtctttagaagttggaaactcgtcataacctcgatttttttcctcgacaccttcaattatgttctccgatatttggtaaccaaaaacaacaccatttattcaaattcactaagcaaaaaggatgatacgattataccaaaaggaaagaagaaaaataaaaaatcttacttttaatcgttataattagggactgatattctcgtaatcaactactatacattacaattctacataaccaatcgaatattggatttcctcaagtgtgcgacctttggtttctggtacgagttttgctacaaaaataacagtagccccacaaacagtagcgaaaacataaaacgttcctgaaaatttaaaacttgtgccactattagataaagaacaaaatttattgataaaagcaaaatttaaacaaattttatacctgccggattccaattcattagaaagttaaatgtaaaagatataatccatgatccgacccagctaacaacagtcacgaggcttccggctgatccttttatgtctattggaaatatctttatcatataaaacataaaattaatatctacgcaccaactaaattgaattaaaatgttatataaacaaagaatcaataaataaatcataaaggaacataatttatatacactgatcaaaatcataccacatacaaccatatgagagttaaataatttattatttaattttaatactaaaccgtaggtttatgatataaagtttaatatttcttaagacatcgatcggattattaagtataagagtatgtttaaaaccaaagaatttttatgaatgttacttacctctgacataatgacccaaggaatcccacccatccctaatgaaaatgatccggtgtacacctggaaaaataagataaatttatcatttatgggcgtctccgatct

SEQ ID NO: 52989 - DNA, 1224 bp, Arabidopsis thaliana landsberg
attgagcacttctttattgttgttgatattacttgttcaaaataaccgagtgtaataaaataaacaaatctaatagtatggttttattttagttgcaatcaattacgtttaggtttatagccaagttaatgctaaaacgcgggtattctgtgtttcctccgttttagtcatgtgttactactaataacatttttaaagttatgctacaattttgttttccaagcaagactacactattaactctgtgattaataagttaaactacttgataatattgtgaaacaaaagtaaaattccgaagcaatattattatgatacgtctaatatacgaatctctacaattgtgatataatgcatccaactgaccaaaaaagaaagtaacaattagggatgcagccataagtgattatgatattctggcccactagagcacgtgaacatggccaatgaaacaagatttttccgtgtgagccaaacaaatccatcacttttcaacgtcttccaagcgctaagttagatttttgattaacaaatttggaggctgaacagcctcaactgatttatcaatgagaacgactattcatttcgttctaagttgaaaattttgcacgactattcatttaaccatagtaacttccacgtcatcttttaggtctcatgttttaataatgaaccctagaggcgacaaaagtacgggcccgcgccgcgagtttgtggaaactggaaagtaaactgataagaggtccgttagatcttcttggctatgattttttgatgtattttatcttaatttgtcgggacttatttttatatattagatacttttatttatttattctgtcataaatacttttatttatttaaatttcaaccagtaatgtccttctagaagctaaaagatagatagtgtgtcctttttttctttatctaagacaaatagaacgcaaaagaaggcaacaaatatccctcaaactcgtagctcctcttcctctctattttttttcttgttgtttttgtggttagatttttactttgttgctactaaataaaatgtgactcaacgactttttgcgcaaaacattttcgacgtttaactgaaagacgtgctccagttgattatatatatatagattcattgtaaccacgttgtcttcgtttggagacaaaaaaaaaaaagagttgtatgatatcgaacccatttattcacatttagtgaaaaataaa

SEQ ID NO: 52990 - DNA, 727 bp, Arabidopsis thaliana landsberg
tgctagcatttaagcatgtttcgtatcgtatcaccactacgagcacttgccatcccaaagcaaccgagtgggttactgaggatctacaattccatcgtcgcttccgcagtgaaacacttaaccacagcaatgttgtctatgccaaacgtcgcttctattgccttgacggtcaaggaagcttatattactttgatccgtcttctcgaagatgggattttagttacacctatttactgccatgtccttatatctcggatagatttagttaccagtatgagcggaagaagaagagaattttcttggctgtgcggaaaggagtgttctttaagatatttacatgtgatggtgagaagccgatagtgcataagttagaagatatcaattgggaggagatcaatagtactacgattgatggattgacaatctttacgggtctttattcctctgaggtgagacttaatctaccatggatgaggaatagtgtttactttcctagacttcgttttaatgtcaagcgttgtgtatcatattcgcttgatgaagagaggtattatccgcggaagcagtggcaagaacaggaggatttatgtcctattgagaatctttggattaggccaccgaagaaagctgtagatttcatgtgaagataaaagtaatggccaagcttggttatggtgcaagagtaagatcatctcgattatctaaggactccactcttgcttatggt

SEQ ID NO: 52991 - DNA, 404 bp, Arabidopsis thaliana landsberg
ccaaaatgtctcgcaattagattctttccaagttcttctgtaaatcccaagtcccgctcttttcctctttatccttttcaccagcttcgctactaagacaacaaatctttccctctctctctcgcctgatcgatcttcaaagagtaagaaaaatgcaggaacaagcgactagctctttagctgcaagctctttaccatcaagcagcgagaggtcatcaagctctgctccacatttggagatcaaagaaggtaaacaaaaattgtcgattgttttattttcatatcttctcccaacgagtgatctcattgattttcattctcatgcattggatatctagtaaattcacatctagattttgtatcaccattgattcacatctagattcacaacttttagtctcccc

SEQ ID NO: 52992 - DNA, 478 bp, Arabidopsis thaliana landsberg
aacacaccccaaagtccatattttctccacacccaacccaacccaccatgccgcgagtaccaaagtcgcccggcgtgcagggccagcgacacaaccctctcgccgaggagtacctcccctccgacccgtacaagaacaaggtcaagcgcaccaagcgcaacaagtcggaagaggacaatgagcagggctatgtcgactccaagtcctcgcgcaagatcctggaaatcggacgggagctggaagaggaggacgagcgcgagaatcagaagggcaacggcgcccccaaggcggcaaacccagccttcgactttgagtcgaggataggcgaagaggatctggacgagcatgtcgagggccagttcgacgatgacgaggaggcctggggcgaggaagaggaggagatcgaggaggtcgagatcgacgccaacgacctggcggcgtggaccaagttaaccccacagacgacaacccaatccat

SEQ ID NO: 52993 - DNA, 601 bp, Arabidopsis thaliana landsberg
  unsure (1)..(601): unsure at all n locations
nnnnnnnnnnnnnnnnnnnnnnnnnnnnnnnnnnnnnnnnnnnnnnnnnnnnnnnnnnnnnnnnnnnnnnnnnnnnnnnnnnnnnnnnnnnnnnnnnnnnnnnnnnnnnnnnnnnnnnnnnnnnnnnnnnnnnnnnnnnnnnnnnnnnnnnnnnnnnnnnnnnnnnnnnnaactttattttttatctcatttcttttttttattttatttctatcatattcttttcttttttttatattattctttttattttcatctacctattatatttttttttctatattattcttattatatattattaattatttcttatttttttttatttttttttttttttttatttattaatattaattattttattttttttatatatttttactttgttttttattacttaataattattttttcggttctctatatttatttatgtcttgctttctaatttaatttttttctattttattaacttctttcttcttatttttcttatccttatgattagttacttttattctttcagaatcatcttacattttttattttttctgcaataacttttattttttttttccttacactaaccttttttttc

SEQ ID NO: 52994 - DNA, 588 bp, Arabidopsis thaliana landsberg
attttccacatagattaaaaaatcatttaatttttcttattttcaattaaaaacttttgtttcttatttaaatttaaaactgatttagtcacagtagaatgataacatgttaaatgtgattggtccatatctctttttgggactagctcacggattcatatgatcatattttgattttgattagaacgttaactcatctattctgccattttggtcaatgttaacaaataatatcataagactagagactcagattcctctcgttagatcttcttcttcttcatttgtctttccatgtttagtatttgaattcctaagctagtactgctagattttgttttggggctggtgattttacaccaaaaaaaaaaatacatatatatatatatatatatatatatcataagactaagaaattgaaattaaataacttgttgaaccaaaacactaagcggaaattaacaagtaaaataaaatgtaaaccacatcgaatttggtaattgttgtaccacaagaaaaatgcaagtaatgacatttgtctttctctgtgatatgttacttaatttaattgcacatcaaaacaattct

SEQ ID NO: 52995 - DNA, 133 bp, Arabidopsis thaliana landsberg
ggtcactaggtcacgatctattatggatcgtacactgccagaagtgggaagtcggtgcgctcataggttgcccacgactgggaattgatccactaaaagatcgtatgagtcatcctgtggcacctctgccgaa

SEQ ID NO: 52996 - DNA, 1455 bp, Arabidopsis thaliana landsberg
  unsure (1)..(1455): unsure at all n locations
agcaggctacttcataatgttatgtgctatgaatacttgatttcatcccctggatcttgaaattgtgtctctgtgcaagtaatttgtgtgatttaaggagcaattttagcttttcattgattctttgttttaggattgttcttgatccgttcttgagtcttgtgttgaggcaacttatagcagagcctttcgtctgctttgattgatggtcattcaagatttgttgattccattatcttatactgcaacttcctcggatcttctcatcatttgcccttgacattgtgtgtctattcttgcaggatctgccacgtactttcccaggccatccatggttggacactccagaaggtcatgctgctctacgacgtgtgcttgttgggtattcctttcgtgattcagatgttggctattgtcaggtacatgcctgtccttttttcccatctacattttctcaatttcaaattagtttgtatcttaatcaatgtcgttttttgttacagggtctaaactacgttgcagcgttactattacttgtcatgaagacagaagaagacgcattctggatgctagcggtccttttggaaaacgtattagtccgtgattgttacacaaccaacttatctggatgtcatgttgagcagcgggttttcaaagatttgcttgcccaaaaatgttctcggtaagtctctctttcttcgttggttcttgtcgctgagcttcaccagcttatcaatttcttgttatgttttgttgtttttgcagaatagctactcatcttgaagatatgggctttgatgtttcccttgtagccactgaatggtttctatgcctcttctctaaaagccttccttcagaggtgtttagaaaaacaaacccttttgtccaattatatgtcttttaagattacttttcttatgtatactgagaactttggttttgtttgcagacaactctaagggtgtgggatgtacttttctatgaaggagcgaaggttctattccatgcagctttagcaatattcaaggttcttacttctcttcctctgatcagccttttccataattgttcttcttggatgaatctcatctcaaggatctctcgtcatttgcagatgaaagagaacgagctgcttatgacccaccaggtcggcgatgttatcaacatattacagaaaacttcannnnnnnnnnnnnnnnnnnnnnnattattaacggtaagccatgcctgccctagtctgaaaaccgagtttatatattcgagtttcgtaatcttgactatcgatcaacaaatgttttcaggtggcatttgagaaaatcggatcaatgactaccaacacgatatcaaagcagaggaagaagcaggaaccagcagtgatggcagaacttgaccagagactttcgagacttaactctcttaaagacagtgggaagagcacataanataaaaagaact

SEQ ID NO: 52997 - DNA, 639 bp, Arabidopsis thaliana landsberg
tcaaattttagcgtgtagttgtgtgtaagtgtaaatgtgtgtatattgtattgtacacgcaacaatcttgcaaggatcatgaaaatcttaaaatacttgcattcattgaattctatggatggttaatggtttaaaagtttatagttttaatttataagaatagacatcaacccttcattccttggttactctaaaccaacttacctatggagttaattaagagattcaatttgaactatgtgatgtttagaccctatcaaggaagaaattttttatataaagtttgtggattattctgatttggaagagtcatgcatctatttgaatcctccatcaatcaagaagtagtatcttacatgtgaagttgagatagcaaacaatgaaaaatttatatatgcgtgcaacatatgcttctaatcatcaataatagggggcgtgtatataagtaaaaattatgaacatgcagcaacattactctaattcttgtcaacagtcaaaatattttgcttgtctcgagtttcaggttcattctcatcttccgcaattgcatggtgatcatgctgatcaaatctctatcgatcgactatatctgatggagaacttaatggtattctttcttttgttattgtcactggtcga

SEQ ID NO: 52998 - DNA, 304 bp, Arabidopsis thaliana landsberg
tggcgttgatggaaatcctgctgctgtcgttgttggtgttcgttttcgtgccggggctggtcctgctggtgcgggcgtgcctggcgaagtctccgcgtgctgccttgttgccggatgcacgccgtccacgcattgcggtgctggtgccggcgcacaacgaggcgaacggcattgccgtcaccgtcacgctgattcgcagccagcttgatgaaaatgccggcgaccgcgtgatcgacggttgcgaccactggaccgacatgacggcatcgatcgccgcatctgcctgcacgcacgtgctggaacg

SEQ ID NO: 52999 - DNA, 482 bp, Arabidopsis thaliana landsberg
cgtgctggccgtgctccacgccggtttaataattttactacgacgagctgccaggagcgtgcagtgccgtggctggcgtgcaggtactagcggtatgcgccgtgcgtgtggcagtgcagtgcagcagccataagacacgtccggcctagagagcgatcgatcgagaccgagggctctagcctctagctcggcgctgtcacgtcctgctgtgtgtgccgtggcaggcggcgctggacagtagggctagggcattgctgttgctactgatggctgctgcggccgggccgggccgggccccgtgtgcctgtgcctgtgcgtgcactgcggagtttctggattcggagggggccacggggacatcgccgctggcgctaggagccgaccacggaccggaccggaccggaccgcgctagccgcgggggtggcctgtcacatgctgtgtgtctcttactataccacgataatgacaacactgttgtgca

SEQ ID NO: 53000 - DNA, 1206 bp, Arabidopsis thaliana landsberg
gaactcatactatccatggttcccatgttacagcacaatcatttaataaaactctttccagatatatataacttaacatagtagcagaggaaaagactatgaaaaatacctgcaaaagctcaccaagtgcttcttctggagccattctaatccctccttttccaagaccaagtctctgagataaaactgtttaaattagaagtcacagggaacacacattaacatccaaaaaaaaaaacattcaaacttcacaaagcccagagactttttctatgccaatatccacaaacgaaaaaaggagaaaacatatgttacctttcatgtcaactttcgtatccaccatcgctgaaacaatataataccgatgtttcttgtcctgcaaaaacaaaatagaggcatatgcaccattaacaatcaactaatactctaacttgataatgcctttaatggtgtaccgctttgaaagactaccttcaagaagagattcttactcagtgcacccttactactgctaacatacttggcctgaagatttaaatacacaaaacaaagccttataaatccatctttaaacatcatacacttaagttttaaaaaactaaaacattttaaggtatattcacctgttcttcgacggttagtacaggcggatgttcatacttggaataatcaatctcaagttcctgaaagattgatacaaatccttaatcatcaattcacattgccacatttttttgacattgacactaacaaaacgtgtaacaccaaaattcttgacctaagggttaaaatctaaaagtagacattgaaaaacttctgagttcaagacgactatacacataacttggaatccatagatacacatccaaatccattaatacacataacttcttcaaatagaatcaagcataaaacgaagtaacattttccgttctctgctaatgatttatctaatcttatctgacaaattccaacaaaagcaatgcgaaatgaaaatgatgtaattgagtttaaaggtgaaaatggaaacctgaagtcgatcaagcaactgatctttggtgaaacccattgaatcgaaaaaatcaaaaatcagagaatttggactgagaaaggagcaaggaactgcagattttgttgagaagacgaaagtttaggttttgcagattttgcagtactggattgaaaaacattaaaccttcttagtaa

SEQ ID NO: 53001 - DNA, 1303 bp, Arabidopsis thaliana landsberg
catgaacataacgacataacatgggccagaaactatacgtgggttttctattgagattcgactgatgaacatgtgaaattctataagcaaactataggatatacgttattgctataaatatatgctttatgtcagtcttgcaaactctgcttctgtttagaagaattatattcaaacatggaaaacaccatgacgaattataaagcgaactaaccgaagggaagtatactgtataccccaaacacaaatgtcatggagatttgaaaactaaagaatgtattaaagttaaagatatgagacggcttacaaaaatacatactagttattggattccatacttatttggtttacataattttggtttccaatttttttaatttctgaccaacaaacaatccgatgtatatcaagccatgtccaaattccaatcaaggtttaaaagtcaaattgctttgaaaagaagaaaaaaaagatgcaaatagttgactttgaccagtagtcaaaaagtagactagcataaccaatacttacaaaagaaaaagtagattcattctctatgcatagttagtgttaatcccagcataaaaaaagcaaaacccaaagttacagaattacaaatacaacacaataataagtggttaatgtagagatgccatttggtagactaagcaggagttttctgacaaactgcaaaacttccaggattgatcgtaatgctcttcgtacagttatctgttttgtagattcccaccaatctatctgctagctcaaacatgttgttcctcaaactgcacaccatgtcaccacattattcatatatattattaattaggcctcaagaatcaagaactggttaaactagaagattgaactgacctgatgataatgaactgagcatctttagtccggtctttcacgtaatgtccaacgattgatacgtttttgaagtctggagtaaaaaagagtcagagatcaaaagctttgggagatgaaaattgacaatatgaaggggatggaagagttaccgagagcagcgtcgatttcgtccatgacgtaaagtggagtaggcttgtagtgataaagagcagtctttagcgcaagtcaaccgagtgtattgtagtcaaccagatagacaggtttttatgagaaactggcgatataaaagtgtgttaagagatgtttgttgtaatgaccttttcaccccccgacaagcttcgcaatgttcttccagctcttcttgggaggtcatacaatgaattccaccccttcttagaaagggtccagcgagtctaccagctccagc

SEQ ID NO: 53002 - DNA, 1434 bp, Arabidopsis thaliana landsberg
gggtcgccgtctaatgttttgataattaattggaccgtggtagttcggcacatgtgtcatttttaaacaacattttcactctttgggtattaggcccgtctgtattgggcctaaagtttgcttaggccgaagactgagctatgtagcctatgtatatctcacaattgtcccacgtaagatactaagttttgtgaaaatgctaccctaaatggctagctaaatccattaattagacaatgaaactcaccagtttaaaagttagtgtgcatcaatatacgctcgtcagtaaagcatttctttccaaccaaatttggcgttggaattttgggtcaacagcaatttcaataatcacaaaaagtcaactattggattagacgtcaataagaaagagtgaaagccagattgtggtcgactgctaaattagggtttaaaagtgtctcaattatgtcactttccttccaaaagtgaggctatctatctgtcaaatccgacattacacagtacacactatcttgtatagttcattggtaagcatcaacaaagaacatgatatcataggtcatttagagatggaccctgtttgtaataaagtctctgagtggatcccaaaaggacttgtaattaaattaagaagtcaagagattccattgttttgatataccaaaagtgtcttacactgttacacacattatccatacaatacatttaatttcctcctaaagttgtaaattaaacaaaatcttttatataattctgttgcgtaaaacgtaggggaattaattggattttatacaaccatcaaataacgtatctatatcgtttatatcggaatttttatacgctttacaaaagtcaaatatgcatgctatgattaaactaaaacaagaatgaacttgctctctgattataacccagaaagaaaagttaatggtttgttttatctcgctgaatcagctaaatcacttcgtacatttgttcttttcatctcgtaaaatgggaagatcagttacaccgagaaaactgcatgttttagggtaactgttggcaattggcacacaaagagcaccacctatcacaacagaccaaatcgatatactcgaggatgaaattgtttgaaaattaagaaaacggttacgttaaattggtaatgtccgtttctatacatccaaattattttttatgtaagaagaagacaactttaggtgcatacgttgcttctttccaaaaactaccaaaaccaatgaacacgagagaagtcataactcatatgtatctccatgcgcgttgaaggtgtgtgtcactcacagacatcattgaaaatgttgtactgccaaacactctccacaagaagacaaccttaaccgcttcaaatgtgtgatatgggtcaagcaattcaactctttttaaaattataatgaacgcgtcttctatttt

SEQ ID NO: 53003 - DNA, 1007 bp, Arabidopsis thaliana landsberg
gcgaaggtaaatttaacttataaaataataaaaaaagcttgacttgtttcttataacgtataaaatatagatagagagttgtaatgcagatctatcagtttgggcttgtcgaaaaactatgagctttggtgagattcagacaaatgagtttgatcatgttgcatatcattagccaatgagaagagaccatcaatcaaatttgtgagatacgataaccttgtgcgagaatgaaggaatcctcgcaggtctgtttagagcaatcctaacgcaagatacactcacatagaaacctccatctgaatttccagttccgaatcaccaccaccgagaacaacttcattcttcaaaatatcaaaattattgaaaacggtacgaaatctgatttggtgctttacatttatcccttgcttaagatatttaatcacaccatcttccaaaacgttacgtggattcttaatcagccagaaccctacaaaaacgaataatttcttagtctaaccatttcctcgtctccaagatactttaatcaaatcaagtctttggacatttgaaatatttcagtacctatttgatcctccatatactcaatgagtctgaagatatccatacccaacaccaccctcatagtcctatcacgttccctggtgattttaaaactagtgtcgaaatccttgaatagaactaaacaagccatttggtaaacctacccatctaattcctgcttctttagacaatatgttacagtttcttcttacttctccagcttcaatcacactcaaaatagggtagacccaatcacatttgctaacaacagccgctaaacaaactttgtcaagacacctgttctgccgtaaaggttatggataaattcttattaaaaatttaacaatatctttttttttaagaccgtgtgctctgtttggtcttggagcaaagcctttctttggtttcttgacattgtaacagaacatatcgattacaaaagacaaagtacacatgataaaatg

SEQ ID NO: 53004 - DNA, 1342 bp, Arabidopsis thaliana landsberg
tgtagatacatgtacattaacatcgagtggatcacagagccatttccagaagtctattcttcgttaagaaaaatattttaccattttgggcaactgaataataatgtaccatgacgagttaggactcctaatttaaagtgtctatactctcaagtatctttacagaaaatcttgcgagccatgactggcttgtcaatattagtaaatgcaaaagaggcaatataagaaaacttctgtggccactcaccacaggaatcacaaaagacatatgcatcaaaagacaaacgttttgtgcacccttctgcagcttcggaaagagaaagcgacagttccacctattcaatttttaacaatataaacatgtgtattactgaagagccctacacaacaagatttatataagtcaaccagattccagttgtataaataaaagagagaatcagagaaactgacccgaatatcaggttttatctgattgttctcaaatatctgaataaagtttactaatgttagagatttgactaatcacataaaaagatgagcaaaagggaaacataataatgtacctcagaaaaaatcttgtggaaagtatccgagaaattggactggtatgcacgtctgaacctctctgaatcaccaccgtcattatttacataatccgaattccgatactgcagctggatcgagtgataacatcaagaaatatatttagtgatctcgccaccagataaataagaataaaaacaacaaaaaagcgtaccttatcatattcttctcttctttccgaatttcccagggtctacagttttttaatccaacacaaaagtatatcagaagatacattcaaaatacacagatgatggcagatggaaaagaaaaaaatacctcatatgcctctcttatttcctggaacttcctttttgctgacggattatttctatttgtatcagggtggaattttttcgcaagctgcaacaattgtgcattcactcatcaatttaaagcagacaacttttactaatagtttttgcttgatgtaaaaaaatgtttaaagctgaagaacagtccactaacaatgagccgaaagactcacctcatgaaatgattttttaatctcctcccgtgtagctttaggagaaacaccgagaacatcatagtaattacgagcactggagttgtttatacctgagaaccattatccaaaaccaaaagcatttaatgaataaaatgatacaaaacatcattttattcattagcgtgaatgcaaaataacaagaccctgagcgtgaatgtatcgctcgaacaacggcttctgagaccctgcatagagtcaaaacttcca

SEQ ID NO: 53005 - DNA, 491 bp, Arabidopsis thaliana landsberg
aaaatattttttagtggggtccacatgttgagtaaatacagccacttaattaaatccagcgtttttgtagggtccatatacagaatatttatgtttttcttattttttattttattttttaagattaaataaaaaatcattcattaatgataaaataggaataacacatatagaataacataaagattaataaatagtataccgaatttaaatttctggttcagttgcattcttgactcggactcaaagataagagtggtactactaattttttctttccgaatagtagccttcacattttatgttgattttgaccatttttccgataactttcaaattgcctaagatagtttgtaactacaaaatttaattgtaaacattgcctaacatattcacgtaattacgaaattgcactttagaacttccaaattgtaaaacttcggctcccacaggggaaacaaagcgaccgttttgctcatcattatttatag

SEQ ID NO: 53006 - DNA, 302 bp, Arabidopsis thaliana landsberg
gtctgtctctttcacactcagatgacgtgtcatttaaaacaaggagtcaacactgccaggtcagcatataaatccacatatatgccaggtgttgcctgtctggcgtcagtggttgtccttcagtgtcaccgtaacgtcagtgtaacaagtgagacccaccaatagcccaaaaaataaacttttagtggcccattttagcagagagctttcaatctcagctgtacgattctgcttgctgactagtatataattaaattttatttggattttttttgaaatatttttacaaaacaacatttttc

SEQ ID NO: 53007 - DNA, 700 bp, Arabidopsis thaliana landsberg
ctggaggagagagaagtgtatttgcagctctatgaagccatggaagctcttgtccacatatgtcgtgaaggttgtgggacaattggacctcgcgataaggcccttaaaggaagccataccgtgtgtaaattcccggcgtgtaaagggcttgaaggtgcgctcagacatttcttgggatgcaagtctagggcttcatgttctcattgcaaaaggatgtggcagcttcttcagcttcactcttgtatctgtgatgattctaattcttgcaaagtttctctctgctggtaagttatatcgcacatttcagacaacgccaacaaccttaagatacagatggtaatcgttttcttaaccttgtaggaatttcaaggagaaaatgaagaagcttagcaagaaagaacaatctaaatggcgattgcttgtagaaaacattattagggcgaggaacagtctcgggcccttctcgtcacgtccttctggtttgatatagaaacaggttttagattttagtgtatagccagttagacacaaaaagaaaacgtacataggcgcagggtatagtgtatattgcgcaccaatacggcgcacaatagtggttttgaacaaacattgtctatatcaagttggttgttatatacatgccgagtcgtgattctgtgacagtaatgtgaagaagtttttgcatcatcactcattttat

SEQ ID NO: 53008 - DNA, 1143 bp, Arabidopsis thaliana landsberg
atcaaagactttttaaaaaggggataagaattataagattacatgagttctattttggtttgaattctaaaatgatatatttacatattttccacttgttttctttatcaatttacagggtactttagttgtttcttgataatagccactttagttggccaaggaaaaaatatacaaacaaattggataaggtttcatgctaagaatgtgattcaatttattgtggtgtacattgaataggtaaagattgacatctgcatactcatcttttttttgggggtcaaatttcagtttagaaccaaaactcgtttaacttacttattcaacttcacaacatgtggatttgtatggctttaacattttttctaatttttatttcatcatttgtcaacctttagacttaactatcttttcaaccagttatgtataacaactaacatgcaaggtcaagattttgacattcgtatcttaagacatgatgataatcaatttgttgtcttaaatgacaagttgtctaattatagctcatatgttcctgctgaaaacattttaatattacttctcctttgatttcaatccaactttatggagtttctctaagtgatttagtaacaaatgtcaactatacattccaaattggttcctagctactcttatagagatgtttttctatagctcatttggtttactaaaattaaaagaatattctaattaattagatacgaatagtggttgaatgaaagtataataattagatttcataccatcttattaaccaaaattggatacatacacgtcacatgaatgtcaacgttacttaaataaaaagtttcaagaaagtattatattttacgaaattcgagcaaaatcttaccaagttttgtcctatactcgtactaaattatgatgaaaaaactttacattaaattttaaatctatgttaaaacatatgcacatagctatcatattttagtttcgacgaatgacaagttgtttacttatagctttttcctcctcctgcacccttatcaatgattcttatctttaatgtcaattcaaactttttgaaccttttgttagtaatttagtaacaaatgtcaactagactccaaattgattcatgattgtgtgctttttaaaatt

SEQ ID NO: 53009 - DNA, 897 bp, Arabidopsis thaliana landsberg
ttccgcttgcttgtttcacggccggtaagcaacctaacggtgccaagttctggaatgcgaatttccttccgccagacccgtaaaccacctgaaattcgatatacgaaaacaaataaaaaatattgaaaactgctaatcaaagcttagatgatgtagctgctgcgagttctaacctttatttctgcttttatggtagtgatgacttgatcaacaaaagcttgtttctgattatctgatggacttggattactcttagcatagctcaagtaatcatcagaaccaatgtagatcaagtagatagcttcagaacgtgtttgatttgtccacttgttcttgttttccgagaatttcttcacttgttgtgacaaagtcatctgtataaaaatcattcaaagatctattttaacctaaaactccttcaagatttgacctaacactatacttttgcaatctcaagttttagaattttctgtttttttttctcaagttttagattgtttctagataacatcgattttgcatttagagaccacaaaaaatcaaactcaattccaaattttgaatttgctacaagtagtgattctcaagttgcaagcatcaaagtaagaaccataaaatgaaatccagcaagtgaatttaaattactacagagaaattagcgttggcaaaaaataaaactgaccgtctccggaggagagccaagaacggtagcgtcggcgatggcgaaattagctccgtgagaaaaatccgccgtggttaggagaatcggagagattttaggaattcccatgaatttagctaaaggaaaaaaaaacaatcaaattaaacacaaatgaataaatagttatagatatttgaagtgatcaatacaattaccaagataatcaggaacgattg

SEQ ID NO: 53010 - DNA, 148 bp, Arabidopsis thaliana landsberg
aatttttaactttagctttcttatttataacatttatagtggaatatttattgtggttattattttcatttgtatttattgttgttacaacttgcgattagccggtgtagattgcatcagggcgacgccacaccagcactatgcccct

SEQ ID NO: 53011 - DNA, 972 bp, Arabidopsis thaliana landsberg
ctaatctatatcaaccatgttttaactactcaataacaaccggggaataatcgttgatattggggaatatgtgactctaattgattaaaactatatagccttaagtcttttgttgtacaagctaggccattgattgttgctcttgactcttgagtcttgaccatgacttatctataaaagagtgtaaaatctgattattattgtaattgttaacttgctgtacagatttacaacgtatgatagcgttatggttctcactagcccaacaaaaattattaatttgtaatgtgggctctccgtttacgtgcattgggcctttcagtaacatagaaagccagaaagcctatttgttattattattcgattttttctttcaagtttcaacatcttggatcatttttttggtgcaacatatttttttttccatcaaatggtgcaacatatttagttgtataatggacgtgtttaagattcttcataagatgctaaatattaccaaatgactaatccagaataattatgtaattgattgcttgatcgtaagtaaacccctttgtccaaaaaaaaaaccatggaagtaaacccaatttttatttcagatcattagaaatcactaatttccacgtttttgataaaaaaaaaagctccatcgaatgagaatgacacttgataaaaaaccaaattgtatacatcgacttcgagcatgtcaaatctccaatctccaatctccaaagaaaagtacaagtcttaaaatctcaaatcaattattcttaagacttcaatttattttctgtcaacatcttaagaattcaattaacaaaaaaacaaaaacatcttagaattcattttaatttgttgaaaaaccaaaaacaaaatgaatatgcacgttcaattcaatgtatatccataattctgttcactgaaacgaaactaataaaatccaaaagcagctacagtctgaagttgagagat

SEQ ID NO: 53012 - DNA, 618 bp, Arabidopsis thaliana landsberg
  unsure (1)..(618): unsure at all n locations
ggacannnnnnnnnnnnnnnnnnnnnnnnnnnnnnnnnnnnnnttaatactttttgttttttctttgtatatgatacatcaaggtgctgtagaatccatatttttaaatggttatcttctaaaagagatatatatatatatatatatatatatatatatataatataacctcaaagctatgacgtgaaaaaagaaagaagaattatgttctaaaactttgtaaggatttatatggctagagatgaaaattgtcataaacacttggaatgactctgaaacttatcatagaggagtgataagatttatccatttgcaaagtggattatataagtgattagagaacataattaaaggatattgagataaaagtatataacaaagttgtagtgcccttaaaagtgggtgttcttatatatgaaaaagggaatcttgagcatttacaagatataccaaatttaatccaaaaacatttttctctaattttatttatcgatttcattcttcatttctgctggacaaaatcataactcagttcttttttccttgttttcacacagacaaatattattttgtggaaactattatcatattttaggttctttaataatgctcactctg

SEQ ID NO: 53013 - DNA, 496 bp, Arabidopsis thaliana landsberg
tttttttgtccaattctttgtccttgtaggtttttccattgcattagaaaacattgtaggcaactgattttctaacatgcccctatcataacttcctccgagaccatttcttgagatcttggcacaagaactacgacaatgactggtaatatgattcttgcgccttcgattttcccctgtttagactttagagtgaattagtctcattttgcttttttcctttcacctgattggcagggtcttagattattcaacattgatatgattagggagcaccccctccttgtcaagcaactcacaccattacaagatctacacgacatgacatctgcatcgccaaggcctcgctcaactcagcgcggtgagtagcacatgaacaaaagtgcccttttaccagttttttatcagggtgcaattctggaagctcattgtttctataaagaattcaactcactgcagtttactttgtgtaccaggaaaggtgcatcgatgacaa

SEQ ID NO: 53014 - DNA, 596 bp, Arabidopsis thaliana landsberg
  unsure (1)..(596): unsure at all n locations
ggaattcgtactcaacccggccagtgataaagcccttgaataaagcgagcccacacacaatgtacaccttcggctcaaatatccaggcccggtccttgaaaacgctaatttgaaatttgggtgtggaccatatatccataatgatcacttcacaaacaaaactatggttgccaagtcaagtgaagaatgctgtaatcatctaatccaacacagagaaatcaactaacgcaccatcctttcaatgaacaactactaagcttttaagctaccaagttgcaaacttcagatnnnnnnnnnnnnnnnnnnnnnnnnnnnnnnnnnnnnnnnnnnnnnnnnnntaaaaacggaactgtttttactatatcacggtgaacaacttgtcgtttctttgatcctctcttattgggctctgatgatatatattaaccttttaaaaataacggcccatattttcgtaagtttgtaaaatgctttattgataaaagcaaaaagacttgcaacttattattcgttaacggaaaaactaactcgccggtaagatttgggagagaactaacgagaagcgacggtggtctgttattaaagccgagggagaa

SEQ ID NO: 53015 - DNA, 681 bp, Arabidopsis thaliana landsberg
ctggtaagagtgagggctactgtcttgtgttgaaattacttatgcagaaaccatgccatgagattgcctctcttgcaatttatattcttcgtcgtttgagaatttacgaggttatatcaagatatgaggtactctccatatcaagaatcttgtgttgtttggcattatgttgataggccctttatgttaatattgttattaatattctgtctatcagtttgcagtgttgtcagcactggaaggtctctctaattctcatggggctgcaactcataatctgaatatgctatctgatgctaagtcacaacttcaaaagctccaggtttgtttctgcttttaatttcatgtgatttgctcgcttatacaatcagtaaaccaacaatttaacattctaactggtgttactgctgactatcaattcagaacctgatgaagtcacttggatcagttgaagatccctcaccatcagcctacgcagaaagaagtttggtttctgatcattctgaagggtggttgtcatacaaagccacaagtaaactaacttcttcatggacatgtcccttttatagctctggaattgattcgcacatattggcacttctgaaggtaaatcatttgattaaattagtcttttgacttagacatttatgcactattttagttgctaaatatgctgtgtgt

SEQ ID NO: 53016 - DNA, 713 bp, Arabidopsis thaliana landsberg
gctgcatcctctttttctcgcctgcagaagattcgcaacaacgttaggtataaattggagcggtaaataagtggaaaatgacaaaccttgaatgctcgaaaagccttttgaatgcgaataacagcgacttctacggtaagcttagtagaagcagcagagcttgattcaaccggtttgacacggtttgatgtttcagaatgtacctaataataacatatttaaagtcatctacgacaagaaagaaaaagagaatgaaacagagtttttttcactaacgttgcctcgatttgatttgttcttctttgttccgtttagacagatgattgagcggagcagccatccagatcccataacagaagactggctcagtttaaaggtaagagattcagaacagcacaatgttttatcggttatgatcacaaaatctggctcaatatttaactagattatgtgaaagagatatgagattataatgtgttctttgttttaaggcacaagaaggtttaatgttgagtggtttttaagtaaatgagagagagtgttgaagcttcgctctctttgtggtgaataaacccatcttggtgattgacatttcacccaatggggaaggtgttgttttatcttttcttcaaattcaaggtggtgctgtttctgatatttttattagtttaggctaagattgtggagaccgatcaaataaaggatgagattct

SEQ ID NO: 53017 - DNA, 600 bp, Arabidopsis thaliana landsberg
  unsure (1)..(600): unsure at all n locations
attacgaaactgccttcttctttctctctccgtaactgtcatggccatgggacagggggccagccatgggggtcgtggagggggagaaggctcggcagggagggtaggagtggctgggcagccctacccacgcgctcgcggcgctgggaacaggcgcacgcggccgcggtcgcacagagctcctggccgaccatggccgcgaggaggctgggctgctgctcctgcaggggccacgcgtagggggccgagggggcgtgcgggaaggggctaggggggcaggggaaggggagctcggcgacgagatgctgcaccccaaaccctagaaattgaagaaaacgaagaagaatgaaggagctcactagggaagaagacactcgccggacccaaggagaaatccttcgattgatggagatttggaggtccgatcgacaaaccagatgcgcctcgtcgaagccctcgacgagatgaacgcaacggtacctcggattccacgacgatgcacggattgggagtaattgctcgtcggagttgtcgcgtgagttggaaccgttccgaacnttcagcgagcaattccacggagctagtgattgaaattgggag

SEQ ID NO: 53018 - DNA, 3055 bp, Arabidopsis thaliana landsberg
tgtagctaaaaacatagtcttttggccaataattaaatatcgttttgtgtaattcccaaaaagagttttatgttggaccctaatagtcttgaacaccagcaatgttcagtacctgatcccagtcatcatcctggattgttcccttaatgtttttgaaaagttctgtcaactgactgcctttcttcctatcagctagtgacgtagcaacaccagcatatatatcaacagctgcttagaagcaagggaaaagtcagataccatgcacaacaacattacacagatattaacataaaacaaataagcacctgagagcttgaattcatatataacagaataagctaagtcgaaatttttctcaacaagagtctccactatttcacatcttctcctgaaagtaagagccagggaaagacatatcagctgaagaattttctttaaatcttcaccaaaggaaatatgaatactaagtttcgtctttcattttcatttggagtagcacatccttcaaggattgcaaaaaaaacacgtgttcaatttatctcgacaagggaaaagcatccacatcattcatttaatacgcatcatggctatgtgaagagaaagctggaatcgatttagaaatactaggtaagtctctctttgggtgtacataagtggactggaatcatgatgacagtgtggaaagaattacaggtctataatctaccgatacatattccttaaacttgcgtaaggatacaagaaatttgttttgaggacaaacctggatgtctctgaatcatttggattcccaaccaaggaatgctcccccccccgcccaaaaagagtcactgaaggacttcaccacatcaatctataggaagaataaacccacaaaggtggagtcataaatcaaaaaagccctacttaatgaaaaggatgacataaacggtgttcagacttcagagttacctgcattttcacccgtgaggacaacttaacaagagtttcttcactcagcttctctgcggcactttttcctctaacaccctttgtaacaagtttttttgagtctgaacctctatgacgcgctgtcaatgcttcttcaaagtgtgcctgtaccccgaggatagttagagaccagtatttctaggaaaaaaaggagagaaacatgcaacatagacgttatcatggttttgtgcagcactggcatgcttatgactgcgggctgttcttcgtttaggccccaaaacaagatgtaatatataattcatacaagtagttatcacatatgaataagttggtttaagcaacaaaaacttgtcttaatgtaatccaggcaaattttagaaaagctctagttcaaataattgcattatatttacttatttagccagcagagagagagagaaaaaaaaaaaaaaaagcaaggattaagcgtgtctgatccaaatttttgtgccaccaactgccagaaaatcaacaaagtcttgcctaattgtttcaaccgactctaaaccactttataatgcttaaaatttaacattccacacacaaaaaaatgcatttgaaaaacctgcaatcagtaaaaacatactttggattcacttaggtattaactgttttcagatgggcattgcatgtaaatacattgcggtaatccaattcagactcaacacagatggaatgggtggtgaggaaagagctactgactagatacctttgcatgctcaagatgccttacagcatcctcctgagttgtagaattcataaaaagctgaatacaacaatacccagaggtgacataatccttcttgagtacctgaacaattataaaaatgagtgaattagcattatgtttcacaagtattttagaaaaaaagttaggctcccagtatgtagcatacagctttacgagccacttgtctctctaaacagaaaaaataacattaataggccatgatcgacaacacatgatcacaaaaacgtttttgtttcatcagagttaaaatttctaccaataccataaatgcacagccttagtcataaaaatcatactataaacctcttacaactacaggatctgcagttttaaggatgcactggaaactaatttcaagcttaggatcaggggttatggttcagattgcagaagaggaagtgcaaagcagagagaataagactagctaagaattttgggataagatgcacagttgtgtactcttatatatgcagtgattatctgtctacatgactacatgactctataactgtacagcagaacctatgcgcatgcagcacatgaaacaaaggaaatttagatctagttacttgttagtatagcaaaaggtgaaaatttccaagtggaaacaacccaacggtaagttatagttaaagaaccatgacagcaaagatgaccttaccagaaacttgtataggtaattgaaatgccggttgatctcaaagaaagcacagatacgagtaagagctccagctatgtactgatttatggcttgatcttgattctttgcggattcaagtctttctgtaattacttcctcaagggatgagatagctccataaccaacacagaactcgcacaaactttcaatggtcccatattcagttgccaagggatcagttcgttgaggtgatgaagatgtgcttactgcgcccactgatgaagtttgcaaaggagggggaagaccactttgcggaaagaataacatgcatgcatctttaaagtgaccatggcggaacataaacccaagcaggttttggcgagcatgctgtagaatcagaaaaacaaacttaataaaccaaaacaaaagtaaaatgtaaccagtgcaaataatgctaatttcataagaactcaaaaagcactcttaaaaattgggtccaccaaagactagttcaagtaagataagtatattctgaggttatttcaggagagcaaacttgcaaattccagaatgcactagaatattattgccttactttctgcaagtagctggtgcactcagaatagcgtgtagtatccaagttgcttcggggcccatcttcaaagtctgaacca

SEQ ID NO: 53019 - DNA, 613 bp, Arabidopsis thaliana landsberg
  unsure (1)..(613): unsure at all n locations
ctctctttaataaccatgagtgtagttatgtaaaaaaatgtgtagtcttggttcataacttgtacccagtagttggtgaaatagatataatattttttcagtgaaatggttaaccacctgaacatagctggttaaccgagattcaagtgtttaatatgtttgtctagcgaatnnnnnnnnnnnnnnnnnnnnnnnnnatataaatttgttcaagttgtgaataatatgggttaattaatgtggagcttcagcccaatatctgcacttattggtcttattgaagtgaaatgatggttcacagtactacagcattagcatagtgagtaatgtcccattccatatcctaacatctaatggtctaaacacattttgtaaatagctgcccttgcacgcattaatttttcataattgaagaagaattctgtgtctgtaactgtattgtctgtaatttttcagtccctcagcttttcctgttaccgtcttggcatcttaagctcggctgaattgtgttcaattcgcaggttgatcgctggaacgagcaacgcgaaaacggcaccttccctggacctctgtaatcgtacaatgcgaaagaagtatgacatcacgatgttgt

SEQ ID NO: 53020 - DNA, 656 bp, Arabidopsis thaliana landsberg
gccgccgcattgtctggaagccgccagcaccggcgaggatggtcccgaacagccaaaccgcgctcggaagcggcgtcgtatcctgtaccgccgccgcccgtggtcgtttcggtattgccggcaatgttgccggtgccaccgatcggatcgatcacgtcggccgagaaatagtagccgttggtgccgttcttggtgaagtcggcgatcgtgatgccgctgaggtcgaccaccttaaagtcgagcggtccagggttcggattgctgccgccgctgccgcagaccgtgcagtcgatagtattggtgaagctgccatacggcgtattcgtcccgcttccgccgaccgtaaagctggttgggctcgtcaccgtgacggtatagccgcttaccagatcgagattgaaagcgaaggcatggtgtggaccgccggtcgcgacaaaatcggtgttcgccgcaagcgcaacgacgagatcgacctcgtcggcgccgttctaggtcaaacgtgaacgtaccctaattgccggtgccgattgaagcccccgaaacaattagaatgccacggctgatagaaagcatttatcgggataccttcgcaagcggccaggcgtgcaaaccatgcatctttttgcaagcaatcattaattttttacgcccgcgcc

SEQ ID NO: 53021 - DNA, 1202 bp, Arabidopsis thaliana landsberg
atcataatcaaaatcacacgatcgtagtcgtagaagcctttgcgttgatcgttacttagagtgtttaccattatcgtcacatcgtcatgatatctccgtctcctaccaaccggaatattcgtcaactcttccaatgcgaagcctaaatcaaagtgccaattttcgtctcctaactttcttgaacctttcaaaaagaaaaatgtcaattttatcttttcgtcttctaattttctagtcggactagttgttttttttccaatttaatgtcggctttcaactcaggcgtagccggtgttttggtcggattaaaatattccaaacttagttttgtctaagtgctggatttttgtgttttctctttctacatgacttaaaattaaatcttgtttagattatgtatgatttactgtcggcttggctcttctaaaggactaatatccttgtaacttaccaccgactggtatgaagactggtatgaagtggaccttttaaggttttgaggtggagctttttttgaagaatttttgaattgagatctaaagattcgttggagtcatggccagaattataagaacgtacagcaaaatttgtcaggccggcggcggtaaacctatagaaggagctagcgatgatggatctaaagtccagcgacaaagctgaaccatatcgttagatatggctgataaagatcgtgtcaatactcatccttctcacgtgtggatactttttcacaagtggcattttaaactcttatttttttaaaaaagttggatttagagtaagtgggcttaatttcaattttaagttaggactttgttttatctgtaatgccaatttggctttccattttaataaaaaataaatagccaaaaataaggaaaagaacttatttaattttttaaaataagtaggaatccaattgagttaataaataaatataaattaggaatccaattataatttggagtagctgagacctgagaattacacgaaattaaataaataaataactgcttccgttatatataaatacagtctctaaaggaacgtcctaataaaatccaccgtgtactaaaaagaaaaagaaaatagaagagacagttgttagggttttctcatcaatcaatcaatcatcatcatcacccaaatccttccgccgacgtctctttcttgtttccgttttctctctccgatctctgact

SEQ ID NO: 53022 - DNA, 583 bp, Arabidopsis thaliana landsberg
  unsure (1)..(583): unsure at all n locations
ctataatgtttgggctactataacatattgtattatataattattcgggaatgaacctacttgtcctactctcaggtgattgtggattgaccactgtgacaacttttttcatctccgatttatcttttccatgagttgctctaatccaacctctgttcgcggttggaaaactgttttgtttatacagtaaaagtttgagacgtattcatataatgtactctagaatacttatactagcctcaatctgtgaaatggctagaataaacgaatcacaacagttagaagaagtgtggttaacacttgcaaatgttgagttcaaaatgaatggaaaatagaggggaaacgtagcctaagtttcatgcacaatatatagctttaactttgtttcataagccataaaaaggacagacataaatatgcccaccgcttatgattcatttggcgcatatatatctgcatggccctctccttagctaaccttagaacacgtttttcaaaattaatgtgtccctaggttaagataagtgtccctagggttagttntaaattaaagaatctgaatcacacattaacatatttgact

SEQ ID NO: 53023 - DNA, 1451 bp, Arabidopsis thaliana landsberg
taacctttgtttttttgattaaaataaagttacactgcaacattttatgttctattcacagtgcaatatcacaatccaagtttctttaaagatactcctctgtcttttatagttgatgtttaaggattcattgatttgtttttatttctgaactaaaattaatttattatccatctaaacacgattcgaccaatagtaatacaatctacaggaaaaaaaaatacaatttacagaatagaaacctctaaacccaaaaaagtatattaattaattttatattgaaagttgaaaacatcatgtattttgttcctaaaacatcagatatttgttaaaacaatattagtgttttgttatattatgtggtcaatgtaatcaaaaaattattcctgttcggtaattgtatttctgtacataatatgcaatttttaaagtctatcatcatcgaaataatatttcgtgatatttttggatataattacccatatagattatattcgatttaaggtattttatgtaaatattcttagcatatggttggcttcaggtatattatgttatttatagtttgtaaattttcagctaaattttttatttaatatttgaaaatattttaccttttgttttcgtatccaatatatgtctcagtttttaagcgaaagtaaactaaaaaccaataaaatagggattatatttttgctttagtagtctatttaagtatcaagttatcaactacctaccatgaaaaggccaataaataatattggagattttaaagaccaaaaacaaaatcatagaaacacacaactccaatataactgtttttgttaattttggaagtacaataagattcaaacaaattaagaacctatttaaggaaaaaaatcggaaaccattacagagactgtattctcttttaatatgaaaaaaatgaatggaataaagatgaatgaaatatggaaacttactgaataatttgatttgattcatttgtatacaacacaataccgaaaaacttctcttttaaataaatccattttcaggtaattaaaggctatttctttttatattttcaatgcaaaaagggaaattttagcaaattgcatataaatattttggtttaccatattaatccatctaacaaaaactatcacttgtaccctaagtatatatttttgttgttatcctagctgaagactaattttaccaaacttttttgtttttaatataaagtcaatttaaacacggtggatcttgatgtagttgcttaagtttaagaaattgagatattgtttcaaagatggatgtggatatatttttaatttacttgtaatgaaataattagggttgcaaaaaaatcccagacccaatatcgaaatcgatacccggataaaaaaaaccgggttgaagcggattagaccaattggaagttacctttatgggtatggttttgg

SEQ ID NO: 53024 - DNA, 1104 bp, Arabidopsis thaliana landsberg
aatataacccaactagtaattatataaacttatcaatatacatatatatatatatatattctctaatattttttacatattatatatttaaactagtacatatgaatttattattgtttgtttttcttaaattttcattaatttgtggtaaactcatttttaaaatttcattaatattttgcaaacacatttctaatatttttttactaaactaaaaccttttgtattattttctaaaatataattatttttttcttgtacttggttccaggaggatgttgattataattcgaaaaaaatagttcatttcacatttttttttggcaatattttcattgatacccaaaaacttggcccatgaagtacaattggatatgaagcccaaaatctaaagtttaaaataagcccaaagaccagcaagaaagataaagattgcaacaagagacccacacaccacctggtcgaagaagctcgacatccgatgactccaactaagaactccatgaatcaacctgcctttctccgaatccagttgagtagcctccctccttcaatcatcacttctaatattttttttgcgtccgcaccagtatagacataatttgtgaatggtaaatcaaaagcggtcaaacaaatggatttatctgcctcaaccgcagcaacttgcataaatattaaacaaagctaggaaaaaacacatagataagattcgaaacattaagcagacggaatttgaattttctagaacttaaatcccaacaaatcccaatttcatcttaaacttgtcgagtctcagtgtctctttagtgtcctgcaactgttggtagcatactagtacccatggaactgcaactaggtatgtttgaacttgcaacttgtacacatggaggatcaggagacttctttttcttgaatgcaggttcttcattaagtgagattttgatgtcggagaaggtaggcaatccgaaatcgggtaaaggtagattactatcagcactcccaggagctgcaaagtgttgctctaagtacatgcggattgccgagtcatcctctacttgaaatgatcttgtgagtggctcaaatgggaagtttgggcacggttta

SEQ ID NO: 53025 - DNA, 561 bp, Arabidopsis thaliana landsberg
  unsure (1)..(561): unsure at all n locations
gaaaacattccctaattttttaaaaaaatgacttttgaatgcattctgtatgttaaacttttatgtgaatcttcttggatatgggtgaaacctccctatagtcccatgagctttacgtctagcgttaaatagatctcctagcattataagtctaaataacggttaaatgcnnnnnnnnnnnnnnnnnnnnnnnnnnnnnnnnnnnnnnnnnnnnnnnnnnnnnnnnnnnnnnnnnnnnnnnnnnnnnnnnnnnnnnnnnnnnnnnnnnnnnnnnnnnnnnnncacgtgacacaaaaatgttatttaaaaattgtttttatttatttattgtgcagtaactttcccttagcatggacacaattgctttctggataaatgaagtaaaacgcaacgtgtcagaaaattatttctttcttttattgaaactgtttgtcgtttttggattataattattttttattaaagattttaggtatagtataggcaattatacacatttacacagtgtagatcagcttagtgaaactgaatcagcatgcactcactgactcacatgcgatg

SEQ ID NO: 53026 - DNA, 592 bp, Arabidopsis thaliana landsberg
tctcttaaccctaaaagatgaacatatggactttgtcttattcctcatacaggtgactgagcttcccttcttcgcatcgaaggtgcgtctgggacgatgtgggatcgatgaagtgtacggccttggaccattgaacgaatatgagaggtaaaagttaaaatcttgatcgatctgacatcttgaatttacttcgacatgtttgtatgttcatatcgtttttccgccctttctttttgctaattgatcaggatgggattagagaaggcaaagaaagagctttcagtaagtattcataaaggtgttacctttgcgaagaaataaagagactcgatcgtgaataaacacacttaagtgatggttttggaatagtcagagttttggaataagaataacgcctcacaataaaagctcttgcgggttttcttggatccgatcctaaagcttcaaaaaactcaactcctttaggtaaaatcttcgattgttttatcgttccatcgaaccactttgttcttagatacaagaacgtttatgatttatgtagttgggttataaaagtgagaacagagcaataatcttgcaacattttttctca

SEQ ID NO: 53027 - DNA, 651 bp, Arabidopsis thaliana landsberg
  unsure (1)..(651): unsure at all n locations
tagtaacggaccgccagtgtgctctaannnnnnnnnnnnnnnnnnnnnnnnnnnnnnnnnnnnnnnnnnnnnnnnnnnnnnnnnnnnnnnnnnnnnnnnnnnnnnnnnnnnnnnnnnnnnnnnnnnnnnnnnnnnnnnnnnnnnnnnnnnnnnnnnnnnnnnnnnnnnnnnnnnnnnnnnnnnnnnnnnnnnnnnnnnnnnnnnnnnnnnnnnnnnnnnnnnnnnnnnnnnnnnnnnnnnnnnnnnnnnnnnnnnnnnnnnnnnnnnnnnnnnnnnnnnnnnnnnnnnnnnnnnnnnnnnnnnnnnnnnnnnnnnnnnnnnnnnnnnnnnnnnnnnnnnnnnnnnnnnnnnnnnnnnnnnnnnnnnnnnnnnnnnnnnnnnnnnnnnnnnnnnnnnnnnnnnnnnnnnnnnnnnnnnnnnnnnnnnnnnnnnnnnnnnnnnnnnnnnnnnnnnnnnnnnnnnnnnnnnnnnnnnnnnnnnnnnnnnnnnnnnnnnnnnnnnnnnnnnnnnnnnnnnnnnnnnnnnnnnnnnnnnnnnnnnnnnnnnnnnnnnatctcaagtttactgtgcagcagtcacatggtcctttgacagaaaggacagctctttcttaggcaaaaagagcgagtttagcattgcaacatgcatggc

SEQ ID NO: 53028 - DNA, 584 bp, Arabidopsis thaliana landsberg
atttgatacaatttattatttatatcaaatttgattttgatatcctatatattacagtataacagcttttgtctcatgcatgtttattttttttttttaatattggggagattactcatgcatgtttttggataaaaagaaattttcattattaatttaaacttaacaaaagacaacgagttcgtttgaaaaacattttggggtactcaataacatataatttaggtattttgtgaatgaattatgcctcaaagtaaatatattttgggttgtatatgagcatggcagtatgggcaatgtttgattaaagttttgcatgtgttatgtctgaatgcgccattcaccgtgtgtgagtgtgtggtcctgacctagttttgtttgattaatgtctatgaacatgaacgtatacttacgtttattacaaaatttcaattttatttgtataattgtgcctataaaatatattattatgatatatttgttataaattttatattatttattaagttaatagtgcatagttatatttatttattgttgagttcaaacaatcttacttttgtatttaaataagtaatttaact

SEQ ID NO: 53029 - DNA, 750 bp, Arabidopsis thaliana landsberg
  unsure (1)..(750): unsure at all n locations
aattaactatttagctatagaaactagaaagtatacaaagaatgttaacatttttcataacaatatatatatatataacaagttcgaatcgtaatctcttagatctcttaacaaaaatatgtgggaattattagctaacatgttgagttgaaattagatttaaacctagccactaattctctatctctcatttcattttgtcaacctaactactaacaccatgtatcaattttatcgttatttacttataaccatctgttatgttagctagaaaacatgtgacaactagctactaattttatttctataattaaccaaataaactaaagaaacaaacgtgcttagaaatgtggatgtgagagagagagaggcacgcgttgccggagagaggagcggcaatggcatggagccgtgggtccgatcgacgcccgcgtttgtggagtgctcattccttcctcggaaattgttgttacaacagttatttatgtatttttggaatggccacataatattatatcaacccctggttccgagttttgataaaatgtggatcagacccaacaaaatgaaagattgagagttgtgaagagtgttttcgtaggttcttggagcaaacgagacactgacttctgcagtaatgtcttgtccctcctnctacgctatgatcacgccctttatactctttcttttgtttttttacttaagtctctttcgattaattaaaataatgattccatattttgagagttt

SEQ ID NO: 53030 - DNA, 971 bp, Arabidopsis thaliana landsberg
ggtaaacaatacaaccattagtgtgaagttcacttgtgcttcttcatattaatatgcaaataaggtcattattttaaaactttatcacctgtacgcttacccaaagcttgcaatctctcagatacttgattttgccaatttgaaatcttctctcggtacgatctcaccttctccttttcactaccatatcattcaacaaatcatcatcactacaactttatttttcaacataacatatataagtcaaaacaaacttatcaaaacctggaactaatatacgaaggagaaggagtagaagtagcttcattcatgatcctttgagcatctctataatgaagaagagcatcatcatgtaaaccccactcttctgctctaacccctttagcgatttcctctttcgctaaatcgaagtatcctttaagcttatacgcaattcgttcgttagtaaccggaactccatcgataccattcatggactcagaagaagctgatgatgatgaaacactaggatctttcttagattcttcgttgagaatagagctaaacgaatcaattatacctctgaggaaactcatatctaagcaataaacaataaaatcgatcatcacttccgagtttaatcaaacaaaaaacaaaaaaacatcaagaaggcaaaattggtttcacgcaccatgttgtgctcgtatatataactcatgtcgagaagattcgaatcaaaatcgaaatcaaatccagcgaattgaagaaatttgatgaaatcttatgaactgggaaatacgcaaacgatgaacaaaccaaacaacacacggtcaagtctttaaccctctacgtagaaagaaggttctaatgggctttacaaggcctatacatatataatctctaggcccaatgatattttatcggtggcccagttttgttttgttttcgatcatcatcttcgccgttaaatattttattctctacggtacctt

SEQ ID NO: 53031 - DNA, 324 bp, Arabidopsis thaliana landsberg
tccgccagcctggagcgggcggcggcgagcaggttggccggcggtgcctcaggtcccggtctcccgtttcccgtcgtttccccggtgaccagaccgtccgggtcctcgtcgccggcggaccgtccggtcgcctcgcagatccgggccagcagcgcgtcgtggacggagccgagcaacgcggtgcgggcggggggcaacgccagggaatgggtcttcggggggggacccgggggcggctttttgggcggtttggggaacccggccgggagggggggtcccgggacagcgcttgtaagccgggccagtccggcggcctgacccggt

SEQ ID NO: 53032 - DNA, 754 bp, Arabidopsis thaliana landsberg
atttgctttcgaattatcttctttgattttatagtaagactgttggggatcgaaagctatctatctctcaccatcgtatgggcttactagctttaattgagcttcttttaaacttttcaggttaggcctaaagctctttgtacaggcccaaagcccatctctaacttttggacagaagaatccaacaagagagaaacatttctttggcagttgaggtatcaattgttaataaacaacttcagaagtaaataaattgttaatgatttgaatgaagttggagtgcaggatggatataataccaaatgtacatgaaaaatttaatctcacgattaatatgagtagatgtatctttaatatagaggttgggcgtgtggcattttatagtttttaatctaatagcgtgcttacacatatttccattttaaaaagatttaagtgcatacttccccatcatttattttgatacaggtgtgaaaattaacaataattaatattaatcataattgtcaataaattattttcacaaattataaaatattgttaaatcttattataaatagatgttatgataagttttggttaagtaatactcaaaatacagtagcagactaatcacatcatcaataattggaggttttaaaaaaaactaagtagagcttatattttcaatactattatgaaagtaatttagctttttttagctcttccactataaattctaacacccttatatatgtcttacgtgtagagaaaa

SEQ ID NO: 53033 - DNA, 1410 bp, Arabidopsis thaliana landsberg
cacacaactcctgaaaattctcaaataatgcatatcatatttttcaaaacacaagctttttggtgtactaatgtaaaaaaaaaaaaaaaccttgcaacggaatttgcagcttgaacaagttctgtttccatcctcaaaggcaagaaaggaaaatttggctgaagtaaatctagaagtagtaggaggtgctttcaagaacttcacagagagctctgaaccataacagtaatgaaacctgaaacacaaaggggaagagacaacccagaaaagcagaagaagccatgaagttttaagcagacccatttctcaaacaaaatgcagatgaaactctttatgatgcaatcattcatacagagaataaagttataagcaaatcacagcgatgggctacactgggattattctggacaaagtagaagaagacattgtagagataatgtgttggtgaagaggaaaaagagggagaggcagaagattaaaacaagatgggtactagcttctgtggtctgtgatggctgtggaagagagataacggatagtatatgcatgagagcgatgggagatacagtcattgaaagataaaaagacagagactaatcccagaaacagacaaactctggaagaatttattattattccaggactgtctattatatatttgtttaccaaaatttcaaaaaacaacattgggaatatctagtttaatcttctcgtaacccttttgcaatgaacacaggaaaaaagcttcttaagctaagctaaaagtggaacaacaagtcaacacaacacacacgactaaacaagagacaagtctttcgatgatttagaagttctttagggacatcaataccagagttttgttttgtgctgctaaatggtactaaaagaaaccaacaagaagcattaaagtttcttccttttagttaacattcaatacacatgggaccatcgtatcaatgatgagactttcagtgaaagatgagaaagatcataatagttattacaaaacaaagagacccaatctgtaatatcatgtttacctctcacatcccaagtattaagaatagtaccattgtttgaaagaagtccttgaagacatatccatcatgagaatcattctcactcaaaaatgcttctcaagaagacggactccattgacgcatatttctccaaggacatcgttcgaaaacaatgatacatggtaatgaagattttaccaatttatacactccataaatcagccttaatccttcaccaaagccccaattttatgcaattgaagctgtaaaatcgacagagcttgattgaattttgcatcactcgttaaacattatcaaaatttcctagttctctgtttgcagataagaggtaaaacgaagaccacgtcatttatagctttaaatagatcac

SEQ ID NO: 53034 - DNA, 184 bp, Arabidopsis thaliana landsberg
tgtttctgatagtgtagttgcttctagtgaagtaattgagggaagtggaggagatactgtggaagttggaggcgtgagttctggtggtgagggtaaaagtagagagactgtgtggtggaagatgccatttgtgcttcttaagtactctgtgtttaggattggtccggtttgggtctgtctctat

SEQ ID NO: 53035 - DNA, 581 bp, Arabidopsis thaliana landsberg
cgacgtcatctgcaccaacctcaccatcgcctgctccacgaaccgagactccactaccagcaacacctgctgccgggccacgcatcgagttcgcaatgccgctcaccactgacctgaattttgaggctgatgaagggaggagggagctccagtatcggatgctggacaacatccatagcgttggtgcagcacccgggctggtgcaccacgacgtcgaggaggctgaactacacaccgtgagcatggaggagcccagaactttgaaggaggccgacagtgatccaaattgggttgccgcgatggaggacgagttgtcctcgatccgcgacaacaagacgtggtcgctggttgagctcccacgtggtcaccacgccataggactcaaatgggtgtacaaagtgaagtgtgatgagaatggcaacattgtcaagtacaaggcctgcctcgtcgcctaaggctacgtacaacaacctggcatcgacttcgacgaggtcttcgcaccaatcgctcgactcgaatctgtgcgactgcttcttgccatcgctgcgctctatggctggggcgttcacatatggacatga

SEQ ID NO: 53036 - DNA, 762 bp, Arabidopsis thaliana landsberg
ttagttcatatactgtcccaaatatattttcttttggagtccaaaaatatctctagtatgatcaagaagaatgtgaacaattcacatggcatccaatgtaggggattgattgacaaggttgcattcaatatataagtactttttttgttagtttggatatagaattttaaacaatgttcggataacaaaagaccccttttttttaatatcattaagagattctaggctttggccttacatccatataatgtttgtatgatattttttctactaatatcatacaaacttacagaagttttgggttgtaatgaccaactaatggactaaattgaatggattataatttgatttaattttatgactcattttactctttagaaagttgattgtctacttagaaaaaagttgacacgtcaacattattgtgaataatggttttttattatatataactttattggtgatttctatcaattctcactagtttggtaatgttgaatatttagatttactgaataataaagttctatactaatgatgtttccatattttatgagcaatatatgatgattttaatttttattataaatttcttccattaaaaaaacaatgatttaatatgccataagaagaaagaaatctcattcacctcctccttgaccaatttttaaacaaaaagagaaagatatctaagacagattactggcctaaactggactacaatataatacttaacttaccttttatttacttagaaaggtt

SEQ ID NO: 53037 - DNA, 891 bp, Arabidopsis thaliana landsberg
attgcatgatgacgctaattaccatcataacttcctaataaatacaattccgtttcatttccatttaatcagatttctaccaactaaattttgtaatcgtttttgtaatcgttttatttcaaacacccttaacaattcccttaatgtttccaattaatttttgccgttacacactctttcttcatatcaaattcaaacaatcatcttcttcccatttctttaaaaaaccttaagatcttcttccaattgaattatttggtctccatttttattataaaacctataaagatgtttccaacctcactcgtctatttgtttataaagtttaaattaccatccaatagccccagtttctccaataacaaatgacgatcaccactcatatccatcctcgaagcattaaatttcaaaatcaacactcaaaccattgttgttcgtccaatccaaacgttggaagtttgtgatttcaaacgttataatattttgcttagcatcgacagtcttcttatggatgaaaagatatagtaaactaattcctaacacaattcatattcccttccgttcgacactttaatttactattttcataatattcatgtatgtagccatgtaggataatgcatttgtaaacaaaaaaaaattatgtactacaacagtgaagttaaaaaaaaaaacaattaaagaaataaaatcaatatcatacaaaaatttctaaaatataccaaaacaaacttgcccaacaggcaggctttttttctagtctacaataaacgagagttgcgatacaataatagttgtcgattaaaagaaacaaagatatcggaatcaaagtcaactaaattaatcagagtaatagaaaaaacttttttttttgttgcaagacatcaatca

SEQ ID NO: 53038 - DNA, 879 bp, Arabidopsis thaliana landsberg
tgcttatatatacgttttcatatattgccaaacaaaattatattgttacgatgatattgtaagagcattataaggattaagttgagttaatatgtgtttagctatgtttggtttaatggaaaatcatgtgcaactagcaagaataatatcacacatcactgtttttgactaatggacaaattggatgtgacacttaatagaataattctttcttggtagttgctatgataactatatttgtcttaacgtgagaaaagaagcgattggattgatgaggggaaataagttggatatgatctctgaattcaacaaacacacatcttttacaatgagcagatgactaaactttaatacactaatatggaaagttcgaaggaaaattaccttggatgatgatgatattcgagtccagcaaacacgctttgctcaaaattgttaatccaaaagaacaaaagacatcatatctcccaatatttaatcatgactaaacaatagtaataaagctacataaatgtataatttatgattcagttaaataaagttttatgtattttatcaaagagagtccaaaagtcattttatatttacttgtcgaatatttattgggacatatacatatgaaaacgacccagcagcttccaaaaatttatgacgttatatattaaaatttaatacgttattagatgacgtggcagtttatcattggctaaccagaaaaagctgcaagaaaggaaatgtgatactatgaacttggcgcctgtcttgtagccgatgctttccttttcgggcttttctctctcctctcttcgaccgtcgtaggccggagaaccctttttcaagcgggccctaacaaaagatgcaaggcttttttttctttta

SEQ ID NO: 53039 - DNA, 1081 bp, Arabidopsis thaliana landsberg
ttttattgatgatagaaaaatacatgtaggttttaatcagagttctttcaaaatttggcgtcaggtctggaggaaagactctcaacatggtaaaggtaaaagcccattttcctctttagaccaaacaaatcatgattcatgaaatcctttctttgccaaaacatggaaagttaacaaaatgttttacaaggtcgggagatcatgttgccaaaagtcccgagaagagagagcttcgtcgtcatggcagtgagaagattcataggagaagttctcatggttatggtgaaggcagaaaacgacacggagatgaacgttatactgaagacaaggcaggcaagtacgatggtagaagacaagagttcagagaactggagagggttttcaatgataagttgagtaaggagaagaaactacaaagagaagagaaagagatcgtaaggatgatgaacacagaagaaaaatatgccgccaagaaacgagagtggggattacatcatgtcccggctcatgagatagggcagacgtagaaacgaaataacttttagatttagtcgaacatgtatagtatataaaatacataaattttaactttagaatgtgtatttttaacttcgtaaatcaaattttaacgatccaaaacggcaacaaaaatgacatattcttgacattacatgagtcttcatgtcttcttcatcatttttttcacgagttgcttgttttttttttttgaaaaatttgattaaatagataaaatgttagtttagagataagtgacatattactctagaatgcatatatggactttaaacaaacctcctttatctccaacttttccaaaaataaattatggttaaaatatttttattagtgtttttctcactattaaaataataatggtataatcatttttttttttcaattaccatagatcatgtttcttgtacttgctttagatcccatgattctcaacacgactgagaaaaccatcttagcacgagataatagccaaaaagtctaaaatccaatttatctcaaatttgagtttacatagtaaattagtataatatatttttagtttagt

SEQ ID NO: 53040 - DNA, 630 bp, Arabidopsis thaliana landsberg
  unsure (1)..(630): unsure at all n locations
tgctagttaggaagaactttgaagggaaggatgtaaaaaattgcgagctattcttcacatgctcccggtttattgcattcggtggtgcgcagtcaggttgtaaacattgacggtctttgagatctttagaatcaataattgtagcctgattgaatcgccaaaaagtgtgttgacgtctttttaggccaaacagcaataatnnnnnnnnnnnnnnnnnnnnnnacaagaccttagagaatctctctgcgaggcgtcagactatttgtgataggtcaccacaccattcgcaataaataacaccattcgcaatgcagtattgaactacatctctatattggcactttgttagggtcaaatagcaacgaactctatgaccattcatgtggcgtgtaagaccttgggtttggctctaggatgtgtcgaatggtccatggtacatcatcggagcatccacagtatgccattggatcgtccgcgtgtaggagtgggatcgccgcgatggcacagaaaggttcgacatgacatagatctcgctcctaggagtgcacgatagggaaaaatcgtagggtcatcttgaggtcagcatggccaccaagatgtctctaaacgacatagagtcgaatagaggtg

SEQ ID NO: 53041 - DNA, 677 bp, Arabidopsis thaliana landsberg
  unsure (1)..(677): unsure at all n locations
cnnnnnnnnnnnnnnnnnnnnnnnnnnnnnnnnnnnnnnnnnnnnnnnnnnnnnnnnnnnnnnnnnnnnnnnnnnnnnnnnnnnnnnnnnnnnnnnnnnnnnnnnnnnnnnnnnnnnnnnnnnnnnnnnnnnnnnnnnnnnnnnnnnnnnnnnnnnnnnnnnnnnnnnnnnnnnnnnnnnnnnnnnnnnnnnnnnnnnnnnnnnnnnnnnnnnnnnnnnnnnnnnnnnnnnnnnnnnnnnnnnnnnnnnnnnnnnnnnnnnnnnnnnnnnnnnnnnnnnnnnnnnnnnnnnnnnnnnnnnnnnntcctatttttgacctttaattactttatcggttcattttcgtgattttttctacttatcgtatcctatcttttttgttcatattttctttttcttattttttattgtctcttttctttttctattattttgttcttctttttcttattatttttctccttttttctattgttttcttctttttttaacctgttctcttttattatcttctttctttttttttttttctctgttcttttattttcttctttctcttttctttttcttatttctttctatatcctctttttttttttttttttatcttattttctttatattctactttttttttttttttattcttttcatatatcttttttattcttcttttt

SEQ ID NO: 53042 - DNA, 515 bp, Arabidopsis thaliana landsberg
gctcaatcttactatgtggactaacatagcttattatcttaaggaaagcagttcattagttgttattactcaatataaaaccaatctggatctttcacgtaccctactcgtcttgttttgggtacccaactcgctcatgcccatgggtagaatttcacatccataccctgtaataaccggatacgaaagctagactaccatccctagtctcctgaaagagatgatgcccactaaataaatggttaatatattaaatattcacagctaaagaatactagtgctgttgaaattacagagatcgtcaccaggcgctagtcctttgagctcttcttgaggtgcctgccaaagtggaatgaccatgaatatacagaccagagcccaactggcagtgttgtacatcttctagatcgtcatcacaaaacttaaaccaactacaattacgcacaagcaatctgaaagaattgtctttccttttcatgatctgtacaataattatcgtgtacgcacttttgatg

SEQ ID NO: 53043 - DNA, 576 bp, Arabidopsis thaliana landsberg
cctcaaaatgaagggaaacaaacaaggcctaagagaagtgattccctgactgaaatattttctctatgataacctttatgcttatagttagtttagtgactctgtgtgcagtgaatcaggagacactactttcagctcctagcgcctagctcattttagagatcacttcacaaaatcagtatagaatcaattgaaaactacttggcagaactcgtcctagacttgtccaggaagctgctcaaagagccctgccaaacaagcccttaagatcatgcagcagccagctccccgtgggaacctgctagtgacagccctgcctcgcggctagcctagccatgcccctgcatttggcatcatttctctgatgtgcttcagcccagaatctcaaacaggctacaatgtgcaggcaacaactgttgtgcaagcagaccttagatgcaagcatgcaagctagccttgcggtccgttagatcatataatccaattgtatgttacatttaacacttaaacccttcaccatcagcccacgcagctttataaaaataaggtaacaactacggtttgcactatggttgg

SEQ ID NO: 53044 - DNA, 835 bp, Arabidopsis thaliana landsberg
agcttcttagtccggtgggacttctattgcttcctatcatcctcctcctcactatacagtttctctcgtcggaacgtggttccttcgtgtcggccattttctccaccggagaacccgaatcgattcacagggttagcggatctcccgtgggtgttgctctcttcctcgtactgatcttgttcttactctactaccgcttctctatcttcggcggagatgatggttccgatgactgatgcgacgtcgtattttcagatctagttttttccctctttttcttttttagggaaaacaatatatttatgtctttattcgattttcgtttttattttattttgtttgacagttgaaagtcaaactatatacagcagttgcatttcatgtaggtacgcacgtgtgagtcacgtgagtgatgagtgtactgaggttgtataatttagtaaacatgatgtgattacgattaatatgaatcccgaacttttaattagctccggttctggatttcaaaataaaatgccaatgcgttaatcataaactgaaatgctgaagatttttagtgtaatcaaattaaaatagacaattgaggatctggtaggaatattgataggaaaaacaaattgaatatatgtcatatgaggactatatttgatgggggacacattggagtttcggactcgtccccacatgaccacgtgagaactaatgatagttgagtcatttttctgatttctcatttgcaaatcctatagaataataatttcgtaacccttttattcctactgttcatgttaccaccatttacagggaaaattctctatgacaaatttctttaatt

SEQ ID NO: 53045 - DNA, 1026 bp, Arabidopsis thaliana landsberg
agcacgagtcatagatattagattatatctaaatattggtgcaaagaccctcctaaaaaatattggtgcaaagagtggtttaaaataggccaaatatccccgaaatgtttggaggaaaaataaggaaataaaattgataaataaatcaaaagttgtcaaaaaagaagaagaagcgaacgtcaataagtgaaatatggaccatcattaattgagaggttcattttctatgggtcaactcaagccctaaccataaataaataaataaaactctatttcatttacatttttcgtaattatttttgtttgctctctcgtactaatattctttatcaaaacgatcataaataatactctcaacttgttaaagggaattacacagaacatgatacccaaattgatgcctaaaataacctatacccaaagtatttgaatatggcaaagatcatgaccaaatcatcaaataagagtttgttttaataatggttggttaaatcctcccaaaagatttactataaaacgtcgtatcagtgacaagaaaagatgttatattcagaaaatgaatctcattcctttaaatgcatatgcacaaatgagaaaagctgataaaaaggttcgatttgatcacgttttgtttcccatttccactttttgctaaccaaaagtataagccgtcaccaatattgaacataaaaatttcggagaaaatgacacaacttgacttttagtaatttctcatccttttacttctagaatcatatcttctgaacacttggaagttgggacattagtcaagaccaccagattctgcaaatagtttgatatatctctaacatcccttacaaaagtaatacttcaatagcggggaacacaagctgatctcaaaactccacaggtatgtagcgaaaaacggaaggcaagcgatgataacaatgctaatgttctattcataggtttgtcgcagcaacacaaatttcataaagatagcaaagattaagagttacaaacaacctgattgaggcagaaggt

SEQ ID NO: 53046 - DNA, 586 bp, Arabidopsis thaliana landsberg
tatcattggtatttaggctccaaattctcaaagatggcaggaaaccaatctttaaaagattacttgaagaagtatgaaagtagtgatgttgtagagaagaagaagaagaagaagcagaagaagccatctaaacctgaaccaagaggtgttttagttgtcgacgaagatccagtttggcaaaagcaggttgatcctgaagaggacgaaaacgaagatgattcagcaggtaaattgcttgactgtttcttgtttcttggacttgtgcatctgtaatgctttcacttccctgatctaataacagttcacatttacatattgtgttctcttttcatttgtttcgtatagaggaaagacctctggttgatgaagacattgaagttaagcgaatgaggaggttggaggaaattaaggcaaggcgtgctcataatgccattgctgaggatggaagtgggtgggtacgttacatctaaccgtgaagacacacaatctgatatttctcctcacgtagacaaaggactcgtaatgactcgcccagctctgagcctgggcctagacggtcgggttcggatagagttgatacagatat

SEQ ID NO: 53047 - DNA, 868 bp, Arabidopsis thaliana landsberg
ttgcgctttttagacacctctttggaacctgcatttcaagaattggcggttgttacctcaacgactgaatcatacactttagagaaattctaaaggatctaaagctttaggcagggataattgatgctaagcctctaaggttatatcatcttagacattctttctcaccttgttgttttttagcagaaacaatctttcttctctctatagacttgccttgagatcctgacatgacatatcaccggaatgcataattagccaagaaatatagtttctcttttttggtggcatcatttcatttctgtgaaccaatgtactttgccaaatcatatttttggctcggatctcatacgaaactacacaaaatctaacttagaatgtgtaagcaaacgaaggaagtagccagcattctgtcacaaaggtttgaacaacaaaagcaatgtgtaaagaaaactgaccttttatttttctgtctctgcatgattcgcttccgcagcaacatctaaatgcctttacaggatgacttttatcattgaagtctatcatgtaatcctgagattagaaacacgggttttttgaattgagtatctgtacaactcaagagtggataacgttatgggaccagtagaaagacgtgtttggttccatctctctattgatgaagtcatctacaaacacaccagagatctagaatggcacaatcatcagaatgctctaatctaatagctttagtgcaatatccacagttaagagcgcaaaacttctttacccatgtgagtatttgtagctatgtgtggcaaaccaaaaaagttaaaactaaggtagcttaatcatggtgcttacccaggtccactcatccatggcctca

SEQ ID NO: 53048 - DNA, 437 bp, Arabidopsis thaliana landsberg
ttttggcctgtacgaaactcacgcagctcggctcatgtccgtcctagagaacggattacctattcgtgttcatgcgctgcttagagatcgcaaatccatgattattggtccgggttgtactaaaacgttggaaattctttaacgtagaaaatctaagtgaggaaaattctgatatatcattacgattacgggtgtggaagtgagtgctagggacaaatctgaacgattgaaaatggggtgagacccaagggtgatgaatatatatttaccgaattgatcatattcaagggaaagtgcttaacaattgccctggcttacttacgaaagaaggaaataaaatttatgcctaggactatgattatggctcttagctagaataatagagagcaaatagaaggtttgcctgccctttaacactcataaatacacaatatata

SEQ ID NO: 53049 - DNA, 1189 bp, Arabidopsis thaliana landsberg
cagaattcgacttccacgaggtctaaaaggatgaaaaaccacatcaaactctatcatctattcaaatttgattgagctaatataatgattgatatatgtttaatccgctcaatgaacttgttttggacttgcagcggatacggattgctttatctgaggtagccgtggatgtgaagatgcgaaaggtacgccttgtggctccagggaaatggatgctatgtgcttcattcatacttcccaagaatgtagccttctcaagaaaaaacttaacgttatgtagattaatagaatgcaatacatggctgaatataggggcatatttgcaaatacgaaatattttattgtactgcagccagtaatacctgcagtgtctttgttgaagaactagacaactaccaagtgaaagtgacaatagcttttgttacattatttaatattgaaagaacatttctcacaactcgaagtcacgaaaccctatttaaaagctttccactcttgaacacagaatatctggtgctcagatttgtctctgcctattggacggtccagatttcaacattgtctctgatcctgtccctccattccaaatctttactttcaagttttaacatagaaagaaaaagaaaaaaaaaccttgtacttccttagtcctccttgttccatatctaactttatacttgtaagtttgatcaagaataatgttaattgttactatactaactaaacttaaaattaaacaatattgagcacattttcatatcttgtttattggttttggtgagattgagaattgaagaatctagagacaaaggcaaagctgtagtatagttgttgaatagggggtctacaactgtactgagtgaggggagggagagaatctcagttggagattgagagatctaaagtaatgataatagaaaatcttggaaaattaaattcttagaaaagaagaaagaaaaaataagatgagagagggaaagagagaggtggtccaaaaggaggtttaaggaagggtttgcaagtttgtatgaaaatagatagataaggaagatgatgtataaagccaaaactaacagttactatcttttcttctttttcttatattttcattttctcagaattcttttttacacttcccaaaaactcactcatttattcacctactctgcctccttttgtcctctatata

SEQ ID NO: 53050 - DNA, 578 bp, Arabidopsis thaliana landsberg
gtatggactgggtggtccgcgacgtcatggtggcatggttgcagaaactcaccggcgatgatgaaggtgcactgttgctcggccggcctatgtctcaatcaccggtaagggcacgttcctgtagttcgcttcgctaaaacgcagtatctgctcacgtcggctgtagcagaggaaaacaacaaaaggtggggcgatggtccgccagcatcaccgggtggatggggctccgctggagcagacaccgtgagagatgggagagagaaagggaggcaagggcgtctcgaggaagaagatgaagcagggcacgttgatcacttggtggatggtcgtgatcaaagaagaaaatgtttcgccttggatcctaccgtcaccgttggatgtcgtttgatcggtcctgatgggaaccgacgtaccccttcgccacaacagatctgtgccgtggatctctgatcctcggcccggattagatctgtgactcgttaaccctgaccgttgatcctgggataacggttcggattagaagtaacatacccttcacgctataaaatctgagcagtagatttagatctgtgggctgc

SEQ ID NO: 53051 - DNA, 1044 bp, Arabidopsis thaliana landsberg
acgtgaaagaaccagttttcagattgatgatcatgatgtgactgatgaattggaaaatgttatgtttggtggtgattatgttaaggaggaggaggagaagaaggtagaggaagagttgttgaaggaggattggtctgttggtgaaaaggagaaacaacacaggaaatctgtaactaagaatagaccggtgtttagattgtctttggagaaaactatccctccgaaatctttagatgagatctctttaacagagaaaagaaggtaatatggtttgtgatttcaatcatttcatagattcttgtttgaaaataacaatctttttctgattgttttgtttatgtgacacaactgcagcgaaagaccgatgactcaggtagaagaaaaaccggttcaccgccagagattcggtctcttgaggtaagtcagagtctttgtgttttctttctttcttgcattatcttgatttgttgttcctggttttgattatatgttgtttctttgataaaccaatagctgtttcataagtaatgctaaaactcaagatcagaaccagagcaggaataaggtaagattttgttttctattaatatctcatagagacatgaaaagaagatcatgattcttatttctcggttgctttctttcgcgcagagaaagacggagaagaagaagcagtttctgtgtctttgtttgaagccaaagactataagagagtaatcataagatagccaaagacgcttcaagaacacagctttgagaaaaggttacagtctgcaaatggcgaacgggagaataaaaagatcgatatcgagtcacaaactcgatggttcgatcaaagctttagtgataaaaacacaacaatttcgatatgtagatggcaccgattatgctcaattcacaccagtttggaaaagagtccgagtgcaataggaattagcttcttttgtttggttctctttgaatctttgttatctgtcttactatgtaatgaaagaacaactccagtttcttgatttgatctgatcttaatcgtgaaaatggatt

SEQ ID NO: 53052 - DNA, 860 bp, Arabidopsis thaliana landsberg
ataaacacagctctttgtagacggatgaacgggtttagtgccacatgttacctaacattggcatgacactagtcaatacatatattataataaagtctttaggtagttaaaagacgatgatcgggtctataaaagctcgtcccatggccatcgtcatagctgcttcttgttcagaagagcttctttaaagattcatgcatatctatgcacggctcttccaaatcctcctcatctatcatcatctcctctgaacgacactcttcactgcaaaatgacttctctctgcaaaagtgcaaattcataaccacacaaacatcacaagtttagcattgtattccaaatgtacttaacatcctctagcttgcgcaactcataatcatcctatatatggtagatagtattggtattggaaaagaagcacgcaccgatacatatatatgtcgtcgccacctccgagtttcttgttgcagaagttgcagatgccgaggaagttatcggaggggaacacagaaccaaacttctctttattatcttcatctccctttaactcattcttgtgacactctaaaactcggtcaccatagatatgagtggttttcgggttaggaccatgtgcaatgatacaagtgtaatcctccatatcatcctcagaggagaaagcattgtcagaaccactccccgggaagtctccttcttgtcccaacttggatcgagacagaactcgggtttttcgcagacaatcattcgcagaaaaggatcggtttcttaacccaaccggctcagtctcagaagaggtattaccgatttcaaaaacaacaccagatctttcattttcaatctttatagacttgttggacacc

SEQ ID NO: 53053 - DNA, 640 bp, Arabidopsis thaliana landsberg
taactaaaaacctcaaaactgaaaagaagatgcatgaagaaacaaagctaggcacaaggctacaaagaggcaacaggatcaaaatcattataaatcgcatgaaatttaactaatcacaatctttcagaaaatctttaaaaagtctatattcataaaagcttaccagggctgcatctgaaacatatccatgctgctgccaactaaaaagctccaatatagaatgtggaccatgatttctaccttcaccatcaacgagaaaccagcaagcatgttcgtttccctaacagaaaacccaaacattaaagaaaattcttatgtgaactcgagccatcatgtctgatgaacttgtgaactgagttttcaccgctgaaaggaagttaccaatgagaggaatgaagctaacatatttgattcctcgtggcttagtgcttagctgatctaaaacagaaccattagaacttgtctgtggaggcatcgtctgatgggagatcaaatgagtagcagaagttgcatgctctgtttgaatctcatcttgatggactgtagcattactactagaagggggaaatgaagtaacagatggggctacacataatattccattttgtagatatgcaaagccagtagcgacatgatctgg

SEQ ID NO: 53054 - DNA, 791 bp, Arabidopsis thaliana landsberg
ctataaaagagctttttggcaggaaaataatatctcaaggggtcttctttgatctctaggttatcgtaaagtgatgatattgataggcaaaatgatgggctctctttgtctcctttatatactgggaaataattaatcaagaccacacagttgaagtcgaattgtacgtaaactttcatgcaaatacaagtcaaactttttgatctgactcattcttagcttggtcttactaatgtataacaacgaccaatttcaaataatatatcgtttccaagtattatatttttggttttcgattctaataattattcagaggaattaactccccaagacttttttgaattaatacaacaacaacaattcacaacaagaacaaaacgacaatgaaaagagttatttttcctctttaatcacgatcgatatgaatggttaatttgttccatttatacaaaaggtatatggatctgaagaaaccatatgatcatgaaattcagtatctcgtaacaagttgaggcatagtaatatatatataatcatatagcatctaaagttttattttgtgccttattttgtttatattactaagaaattgattttaattaatttttaatccaatttttcaaaattggattttagagccaaatacgggtcgaatcacgtataaaatgaaaatccgaaagagacaaaagacatcgtgcactccaagaaatttgttaatatattgccataaactggaaaaatactcgttagtcgttagtcttcactcgtttagctttaaacttaccttggag

SEQ ID NO: 53055 - DNA, 840 bp, Arabidopsis thaliana landsberg
caataaaagtttctatttctttgtagtttattggtgtgagacaatctcataccaaaatattgtacctctacttgcttgtcttaaacaaatctatcatcagtttatcccatttccttttcttggtccttgcgttacctcaataaaatcattaaacaaaggggaaaaaagaaatcagaatatgctaaaacacaacacaaattaaggaataacctatcttagtatatgaatgtcccagttcgtcttaagtcgctgtgccagcaacaaaggctactacggagagaaacaatataccatagtaaaatgaaaagtgatctctgtaaatggacaccagcaacgttggtagttatgatttgaaatcgctattatgacacctctccacatacttgggtcttaagcaactatactcatagctttttttggttgctttactgtgtagctgcgacatgcagaagtacaaggccaatagcttacacgttaaaagggttggttcttctctcacaaggtataaaacaacactttattcataaatatgtatattttttttgggtcaaaattcataaatatatattgaaatttaagtttttgatggtagaaaaaggggttaaatgattcatggaattggaaaaactctccttaagcttcgcctacttgctgagatgtttgtttgatccaatgtgggtaattgtcggaatgcaagcatctggcacgatgcttagactcatcaaatagttaggacaagatagaaacgtctattgggacttcccattcactcacgagttgttgatgctaatggattatgggcttatggccctcaaaaatagaaattctattatgcgccaa

SEQ ID NO: 53056 - DNA, 892 bp, Arabidopsis thaliana landsberg
aatctttaccggggtgtgggggattccatacgatgaaagaggaaccctcttcgttccatgagataacatcgtcgatggaactatcttcaacgaggttaaacgtttttgtgagaaacggcgttgggatagatctttgtgacgatgattctccggtaatcattgcgtcaaccggcggcgaattcataggattttaagcgtaagttataaaaacaaaagtgtcccctgaaagtcacgaaagcagaagaagaataatgtaggaaggagtaatatgtaataatgggggttaaaagatcgagaagcagcgtaatgttttaggcttcaagaaacttcctatggagttgcgtgtttattccctcatatagtgtgccccaagtggtgaggtcccacattttgtttactttatcctattgtttatttggaattttggaaaaactaataattttgttagattgtctgctttgatgtgtcatccatatcagactcatcactatatgtgtcgatggtagaattacaaggagctagagaaccacttatttaactatgcagttttgtattgttgtaagataatggcataaactgatacaattgaaagtttttccataaactcagcaagtttgataaaatgtttgttgtgtttctgtgacgattgagattgtcggcttaaggcggtagtatgccagagttgccggtgttgtgtgtttcatatggtttatagtcttgatttagatagagttctacctaaatacaagtttggttatgaagagccatatgatagaatgaaaccatagatcacgaaactttgatcatgtgtttgccatggtgtcatctttctgtttttcagcggattcgtttatatggacatgagcatagctagagaaataaacttgaaacc

SEQ ID NO: 53057 - DNA, 1312 bp, Arabidopsis thaliana landsberg
gttgcttttaacattgttagtaaatttagtattaatttgtttatagtataaaattttgaaaaaaatatcaaaactaaaactcgattgcaaaattttttaaaatcattttaaaaatttgaaggaaataaattttaagatttagttgtaaaatttaataattttaagagtaaaaaataaaaaaatttgtataccaaaaaccagctagtttctatatagttatgtgaatttagtgaaatctctaacgatcaaatggttaggacaaatgttaagatccaaaatccagctagtttctatatcgttatgtgaatttagtatcaaaattataaaacacaaacaaattaaatgaaaaacttttgttgagttaaaaaagaaagctagataaagatgagaaatttgacctgtatgcgatagacagtttggataaagcgaggacaatgaatattgagcagtatcttaatgagctctgtcgtctttaggctttacatgtttgggtaagtggaactccgttttagtaattgggcttgtacgacggcaatgagagagactactccgccatcttccttcaacctccttagagccatctttgattcatcctcgtcgtcatcgcaagtgcttctctttcctaacgataataactccgtcatggctacggtagggattgaggttgatatcatgacgtagaaaaacacagtaccaaattaaggaggttgatatcaaggaggttaatgttttcctttttcttataagcttattgttagaaaagaattatgatacataaatagtaacggtaaacattaacaagtgtatagagagtagtagtgtcataaatcaaagagttggtgaagcagaagagatcatctcaagaatctgattatgtaaacttccgttgcttactacaacaccgcccgccggaaaaatgagcctcctttctgattgatcttcctccaaatttatttcatctccttcccaatctgttacctgatgagattagagagcaagaaagagatcatgatcctcagaatgaaaaaagttttgttccttttcaggctctgtgtagattcctaagttcataaaactatcatgaggaaagaccagagcaatatgatttcaccaacctttcctccagcttcatgtacacatatgatcccaacagcatgatcccacgactacatgttatttaagacaatctcttgagaatcctcgctaccacaaagtaagaaaaagatagatccagatcaaacagattgccgtaccttctattgttcgcgtgagtttagagctcggagattccttgagggagtattggtaagga

SEQ ID NO: 53058 - DNA, 1310 bp, Arabidopsis thaliana landsberg
tttctattgcattacctaccccgaggctatatcaggagtatacttgacttgtgccctttcaaatccttaacaataaacctcgtaattattgaaaatactacaaattatctggattatgtacaaaccaataaacctcctagttatttatgtaattatttacaaaccaaatacgaaagttttaaatccaacaagacatcattttgcttgaatttttcgttgccttgcccgccccaaaactatcctaccagactacccgtgtgtatttgatttctgctctttcgaatcaactaaaattgcaaatagaggttaataacttttcaatcctatgtttttaatatataaaaattaagattataattgaaaattccggaactacatctataatatcaatccgtaatagcttttttagaaaaactatttaacatatcattacaaaattatcagaaaaacgaaacataccatgacatacaattaatagtgcatttttctttcactttttgttttcagtttaatgcatttttctagtaatctttacgctctccattaggttggatacacatgtggagctaaacgaggtgtggcaaccgcgtataatggttttgccataaaaagatcattcttgctttctgaaatatcaatcttattcttaccaggcactggtaaccacgtgaatccttgaatcaaccgagccagtaacatgtacgtcatggctgacccaatgtccacacccatacaacctcttcgtcctgcactgaacgatattatattcagatcagactcgtttagatccacacatgtgttagtgctcaaatgtctctcagggtcgaacttatgcggcttgtcccacacactaggatttctcccaatccccatacgactaatcaatacgtggcttcccttggggatgaaataaccgtctaccacagtatcagtggtggacatgtgagggaggttgaacggtgccacggggtgtaaccggaatgcttctttcacacaagccttcacatagttaagatttgggagatcagactcaatgacaagacggtcttttccaactaccctatcaatctcttccacggctttttgcatgatgctcggctcgttaatcatctccgccataccccactctgccgcgttagacggattatcaaccgtcgccaacattagttccttcataatccaacataattaaccaccaataaagttagaggtcaccagataaaaaaaaattcttctaaaataaatttaaaccttttgcttgtgaaaatgcatctatatattgcaaggattccaaactgaaattaaatata

SEQ ID NO: 53059 - DNA, 1163 bp, Arabidopsis thaliana landsberg
cgcccttgattctctcatcaaggtaatacatctactacttctacctgtttgatctaaactcttattatggttcaaatttttccttcttagccatataattgcaaggctagagttgattatactttgttaaatgattaggtttggtttcatttccagatagtcctgctggctatatccgcttccgctcatttagtgaccaaacctggcttcatcgcaccaccacattcgtaaaatgacaaaaaaaaactttctctttttctatgtgcatatagttgagctcaataaaaagcttgtttctgactatatatatataaaccatgggttttactgaacaaataaaccccagaatcaaaatctgtttttgacgcttgcttgtctcaatcttgttagacaacctccaagaagccaagggggcttccttatgcatcctgatcttgagcattttccaaacagttcagatatatagtcaaaagtaaagacatcttcaaagaaacagaagaaaatacttgatctctttgtttaatgtctagtagtaagtttacatatgtagtgacaataggatcctatgtgctttgctttttgttaagatttcccatgctgttgtttagtttttgattttatttcccagcttattgcttataacttccaatgtatataataagtttcttaagagcaatggcaaaatataggaggacatattatcagacggtcaaaaagctttaagcaaaaagctcataaaatagttaccaatagccttttacatataagtggaagactggaagtattcagaaatacataagcaaaaccaaaacaaacctaacacaccaacaacaactagaccacatacaaaaaacatttacaagcaaaacacttttcaaacaaatactgttaactccaaatatcttccacaccagtttcttgatcaatgtgctcgaccaacagctttcttgtatttgtagcgttttgaaatccagaggtacactaagaagttgaggaaactgagagttgccaacaagtagaaaaagtaatcaagatggcctcggttcaagttatccggtatccaacccggtttaccgttcttcttcgttatcttcatcacaaccgtcacaagaactgtgctcaaatagttccccaacgcaaccgtggtcaacgacaaagcagag

SEQ ID NO: 53060 - DNA, 1262 bp, Arabidopsis thaliana landsberg
  unsure (1)..(1262): unsure at all n locations
ttatgcgttatacagcttacgttgcattgatcttaggttgatgcatccaccatacatagctctcacagactagaacatcaaccccttcccagctcttgctatgtttttcaatggcgtcgagcttaaccaaccttttgtgtactgtatgattagttgcatgatctgaaatcgattccacgatgaaaggtgcccagtaatactcgatggatgcattgtattcctgatcaattgcataaactttagtataagaaaccatattagccttttgtcttacaattcatgttgaaaatctcttctaggaagatgagttttgatgtacctcagctttgaagatcttcataggaggaatcctatggaaggacttcttcttctcaggaattactgattgcaccatacagaccattgactcgaacgtgcttctctgcactgagtctcctatgaacattagtcttttgtttctcaacacgtccaacagtttcagagcattgaacctgaaacatctcagaggttttaaacactgcgcaagtttgaatctgagatcatgaaacaacacatgctttttgtttcttaccttggcaagtcgcatgagctcggtttccatctccagttctggtaataagaatcaggccgtccatttcgttgacatgttgttgtgtttgactaaataaggacagctcttctctgtataaagaggataagagacattgtcccaaacccattgtccttcaaagacattgcagctctcatcaagctgatcctctttagtgacaaacactgcctctttctgtctgaaaccatatagtttggatattcgactttctttgctcttgagttcatcaagtatccatctcacggatcctagaactagaagactaacaagcacaacttggaagatggattgaatcatcctcgaatctgcagttgtttgtatagacatttgaaacagacttctcggagtaattagctcgtttagaactacttcttgctattgagctgatgaatctatgttggatgtttgagagaagcgtatgtcttcacatacaagcataaaaaaatgactttgttccatgcaaccaccagttggtgatctttctacattaggtagcatgtcctttgctttggtgattgatctaaaaatagtgatatgatactgaaaacaacacanatttgccaataaaggtctcgcttgggttttgaggtcaaactattctccgatctggcccagcaggactggtcgaaaatcaatgcacaaatttgaacgt

SEQ ID NO: 53061 - DNA, 1338 bp, Arabidopsis thaliana landsberg
cgtattctaaaccgacaaattcttatacgtatcatactatcacgtattgatgatgcgtaaagttgctaatggagacgttcactgcaaataaaagaacattcttccccataatgtaaaatatgcgacttaaaaaatatcaaaatattgacatacgcaattcttaatactaagctcaatttctttaaataacttatatttttacatgataaataggaataccaaaataattcttctttataaaaaaagaaaaattcgtaatacattctcaaactggttatacggttttgttgattgattgtagcatttttgttttcaacatatccaatttttaaagtgtatcttgttagttagattgctggttatccgggtattaattttagaagatatgtttaacgatgtgaatgtagcactgaatacaatttggatgctttgacattcacatgaatgataatatttatgcttaatatttctataactagatcaatagaaatatacaatttacttataattgacagatatatacattctttttttcttgggtccaaacttgacctccatcgacctaaataatcgatgctacgagaaagatatccacaatattacactagcgaataggcccataattttatctacattctgcttcattgtagatatcgaccaatcataaattaatgtaattgtcacaattaacccctatatatttatatactatactacgactgaaaatagattagcttatagttttttacataaattggctcatccagtctaatccatcaatgtaatctggcgagtagagcaagttctcgtcagcctcaccgtcaaatccgatgtcgtaatctccaaaaaacggtgtcgtatgattggcttcaatggtcacagaggatgagataggactgttacttaaagttccttcaactctttttgcaagccgttggatctctctttcagcctcgtaaagttgttcctttaggtgaataacctgaaattaaaatttgatttgatttagagataatcatttcccattaacagctaatcatgttattattagagtttgatttgatgagttttattttgtggggctggtgataagagagacccaatgagtcaatgacttagacaagcgagttaccactagaaaacaaagggtgtttgtacggaaagataattacatataatgacactgttgcttttttgctgttcactttgctgtatgattttcttttatagaaccaagattgttacactacagttattagtttacatatattactattttagctatagaaggtaacaaaaaaaaacctttaaattcaatagcattttgatttttctttc

SEQ ID NO: 53062 - DNA, 737 bp, Arabidopsis thaliana landsberg
aaaaaacaaaaacaaaaaaaaacccgcaaagctgtaaaatataaaaaaaaaaaaaaaaccccaaaaccccaaaaataaaaaaatataaatataaaaaaaaataaaaaaaataaaaataaaaaaaaaaaaaaaaaaaaaaaaaaaaaaaaaaaaaaaataaaaaaaaaaaaataaaatataaaaaaaaaaaaaaaataaaaaaaatataaaaaaaaaataaaaaaaaaaaaaaaaaataaaaaataaaaaaaaataaaaaaaaaacaaataaaaaaaaaaacaaaaaaaaacaaaataaataaaaaaaaaaaaaaaaaataataataaaaaaataaaaaaaaaaaaaagaaaagaaaaaaaaaaaattctataaaaactctattttaaatctcaaaaaaaaaaaaaaaaaaaaataattaatttaaaaccaaaacaaaaataaacaaaattacaataaaaaaaaatataaaaaaaacatcacaaaaaaaataatataaataagaaaataaaataaaactaaaaaaaaaaaaactaaatcataataaataataattaaacaaaaaataaaaaaaaaatataactaaaaaaaaatgatctaaaaaaaataaaagaaaaaataaaatattaaaaataaaaaataaattaaataaaaaaaataaaaaaattataaattaaataatataaaaaaaatatataataaaaaaaatttataataaaaaaaataaataatataataa

SEQ ID NO: 53063 - DNA, 614 bp, Arabidopsis thaliana landsberg
aaatcgatataatcattcatatcacaaaaatagtgatgctagtaatgtccaaagtgattgtccggttgtggtcaatggaggaatatcgccgttgttgactcagacctactcatacacaatttgagatttctcgatgactgcatacagtaacattcgctcggatactcaattaacctaaggtggtccattatgtgttaaaattttcaaatctcataattataggactaattaaccctatagtatatactgattgagtccagttaatgaagtttgactccaaaaatttgtgaccttcctggaaggaaaattcaagatggggcacactaaggacaattgtgacgttgggtccaaattaaaatatgaaacgtttaaagcgtatttgatatttatcaagtagtataagtttaaagcatatttgatatttcttgccctgtttctttaaactcattcgtcctaatatacgtgtcgctgtatgtatgtataaacttataataatatcacgtcgataaaattgacgagaaaacaaaacaaatgaaaactgccgccaaaaaaagagtatataaataaacagacaattcgcgtgataccatttttctaatgatattaaactgcga

SEQ ID NO: 53064 - DNA, 194 bp, Arabidopsis thaliana landsberg
gaaaagtagtgagaattctctagacttcaatgttagttatcatttgtatgccctttcttctagggcagatcatttgaaacattataaatacattaaaaagataagttttttttggcattggatagaatcgagatgaataagaagaagaagactaatccagaaattgacgattctagcgaatggtagcgggaata

SEQ ID NO: 53065 - DNA, 619 bp, Arabidopsis thaliana landsberg
acgtcctctttcaatgccgatacatcccaactatttgagaggctttattctttgaaagctcagagaaaaaagttctttagaaactagtgagcatgttgaaagttccaacagtgatgatataccaaactaagcaacagctactaaaacaaaaattgtaaacatggtttcagattgtttcgttgcccaagataaaagcctaaacaatttaaaaagcaggacctttcaatgaaaaaggagaaacactttaagctatgactaccttattggcataatcttgataacaaagtatttggattggtaatcaacaaacagtaccttggctgctctcatgctattgacagccatacgaagaccatcatgggagagtatcaaacgagataagccaccagtgctcaaactgaaaaaccacataacaagataagtcaaagttaagcaaaagacaaatacacaggttcaagaaggatttgttaccccagcaatttggcagaatcagcgatagaaccgtcagaagcagaaataacatcaagcaaagcttgcattccctgtaggcaacaaacaagtgtgtacttgagtaaatgagcagctaagagaaagagagggagaaagagagtgatacata

SEQ ID NO: 53066 - DNA, 437 bp, Arabidopsis thaliana landsberg
ggattcttgcttgttgagtgaagcgaatacttttgtatatatgttttactatgtacagaaacacagatcatcggttagagtctgtatttcttcttgcctttaagaatcgaacaagaccgaactaagattcatcttagttatatggtgttagttacttagtttcactatttaaattatgacttgatgttttagtatttacagttttaagtaaataccagttttaaaaagcgcgcctaaagcgtgcataggcgtgaggccaggtgaggcgatggtaacatcgcctagaatctcggaggcaaagtgagatcctgaaagcgttcgcttcacatctgaaaggcgaccgaggcgctcgccttaggcgcaaggcgatagcagagggtctttacgcctttcggtcgcctttcgcgttttaaaaccaagaataccattgatagttt

SEQ ID NO: 53067 - DNA, 635 bp, Arabidopsis thaliana landsberg
gagaatacgaaacaaactatccatgactagtcaagataacacagaccactgaagaataataaacacatgggctcaagtcgtgggctattaagaaaactaataatgatggaccctagtatataagcctaagaagcccaatcgttaatatcactttactgttcaattccaacagtgatttctcttcactgtagttttgtaaagattgcatttttatctgttttgagtctttttgctttttttatctcaatcgtctctcgtagcagaaaaatgtcagagaaaggaggcaaggggctcaaatcctctctcaagtccaaagatggtatgtgtatttcccactctgtttctttgttgtttaacattactttcctcgagattcgtttctcagtgtctagggtttttgttgcaggagggaaggatgggagctcaacaaagctcaagaagggtagaaaaatccactttgatcaaggtttaaccttttttgattctcttcatttgatttcgcattcacagtctgaagctttttttccttttttgatttgataaaaatgtcatctttttaatgaatgtgcagggactccaccagctaattacaagattctcaatggttcttctgatcgtcaaccattcaaagttct

SEQ ID NO: 53068 - DNA, 1543 bp, Arabidopsis thaliana landsberg
agatattaatgaaacgatggttgagatctctttaataattttttcaaaatcagcatgatacactttttattgtgtctagattctaagaagatagttgaatgatttctctggttttttaattggtggtttgatagaattttcaagttgagtctctgtatgttaaaagacccatacctcgttgtcttgtctgatttgaaagtcggaaaacaaaataaaaaacaaagatgatcctaaacttttttttcaccttttatcatcgtttccctttttctttatataaaacactggcaatatcatatttactcatatacaactatttacccatctaaaacagaccaaagtttccgtaatacatatgcaccataacaaggataacataaatcaaactcacgctattaaaaagatcaatgttttttaagttgttcgttggtagtttcgaagacaaaccaaccataagtaccttacgaaactccagaagagatatattgcagaagtaaatgatatgcatgtgttacacttaacacatataactacatcctaaaagattatgcgacctaaggacaaactcttctcacacaacaaaaacagttcttactctgtttttttctccaaagcttttttcttttcgtcacaaattctgtagcggttatctttctttttttttggtctaatgttaaactcggttatctttttattgttcaagacatctatatattgctgatttggacaatttacaattctccatatgaagattgttggtctcttcttgctttattttgttctgcatttgacgcaaaatacataacatatatacaactacgaatgctaatacgtgcatttcttaagttttggattctccatatccagacatgaagttatatattggatggttacataaactctgcgagagggaccacgagatcattaggatctctatcaaaaattcaagatcacacgtcaaatgagatccccgagacaactccccacttggaacctaacaatataatcattcattttaaaaaggctagctatcaaaagtaaaattactcaaattcaaaggctttaacatagaagaacaggtttcaactgtgttgataaagatatataactgaaaacattctcataaaaacaaaatgtaatggttaatcaaagtagttactctataaagtctgatagatagtacgcaatcatggagttgtttattcattattacaataatatataggtcaacaactcaacattaatattgataaaagtgttcagtccggtcaaactgaattagagttgtgtcgagataaatccgtctaacgttgaatctctgctttaaccaatggtaatcaaaaccaaaaaaaaaactaagaaaggtttaatagagtcaaattcaattatcttcacaaacaatcaatacaaaagaactgaaaccgatatcaccatgccaaatcgatggatatgaagatatcatttggtctatctacttcttatatgccaatcgtaataaaaaaaaatcataaacaaaagctatacgcataaccagattggagag

SEQ ID NO: 53069 - DNA, 1136 bp, Arabidopsis thaliana landsberg
tagatctttttgcatttaaatgtcatgacaaattaaagccattttctccatagtgctataggtcgaatattcttttaaggggctattgagaatgtttaaaatgtctaaattctatgtttaagtatcatctttctgttttgttgtcttctttaagctttttgctacgaactttttaaatagttgttgacacgacacaacaacacagcaacatcaacaccttttttttgttttgggcaacacacaacaacaacaacaacaacacaaacttataatttcatccttccatttccgacactgataatatccgagacaaaacataaagattatacaaaattaaagcaagagtaccaatggtttattagtggcgcgctgagaggtttatgtatgaaatttgacaaatgaaacaagtttatcagttagacatatgaaaatctaaaacatatagtttagtagtttgtattaatatgctcttgtgttattatctaggttgaaccgtaatttgtgtaacttgtagacaacaaaactattttcatatatttaaagtttttcactagaaaaaaactaccaaaatttggatgatctggtgccagttaaaatgattccatattaatagggattataagattttattatatattcatgcaataaaaagtgtagaataatataaagaatccaatgccaagtggactcgccactataaatacttgctcacccctccctcttccctttcacattcattcctctcttcttaactaacatccaatctctctctttcgttcccatttttttttgttataaaaaaaaaactaacgagaaaaactgaaagatctcagcaagacaacaacaatcacaaaccctccttcagattctttgttttgctatttttctaaagaacatagaaaaatgtcacttgttgtttgtcaacctcaaataaacgagagtttctatcaaaaagatgacatgggtgggttgagtttcctacaatctatgtccgatatcacttccattgcccaaaccaaagaggataaagcttatgttcacccgatggagaaacgctctgtttctaaactaaacgagaaaagcttggagatgtgcactgagagtctcggaaccgaaacaggaagcgagagtggtga

SEQ ID NO: 53070 - DNA, 936 bp, Arabidopsis thaliana landsberg
atcctacttgtagccagccatcataaatcaactttaaactgccattctattttagttccacatatgtaggatggtcaactattcatatagagtatagactatatttgtctatctgtttctattgcttttatgtctacgtttgtcttgttttgttatgtttttgcttttatctaaataattcactaaccaaagatgcatgcaacatcgcaaacaaataatgcaacatctaaacccaaagcacactaagaaagtcaagctgtaacatttacataaacgaataaaacgaaagaaatacagaaacagagaacatctttggtgatgtttctcgtataggattttgcattttggtaagcaaaaccattttgccaaagtttcgttgacaaatcttcaatcacttcatatcatcaagccgtggaggaaaaaccaaaagcaactgcttcaaattgttggatggcttctgatatgagaaagttatcgtcaaagagaaaacaatgaccgaatacttttcctttttataatcatagtaggaaattaaacaaccattaattattcatatatataagcaaaacctaaccttatggaaagagaaatccaaacgtgataattataataacaaatcagtaaatagtaaaagaaaagagacaccgctgacaaaactcgtgtctattacaaaagcatgtgaagaaaattacaagaaagaatcgatcgagagatgccttactaaaggatttaaacttaacatttctttttataggaccaaaaagaataagtaagtatactcaaatttgtgtcaaattttataaagtatccttgtttccatccataacttaatcttcggccatctccataatcttttaaaattatcgaataaatccagtcggtatatatattatccaagttttcttgtggtcaacgactagattttattgcaaaaac

SEQ ID NO: 53071 - DNA, 1333 bp, Arabidopsis thaliana landsberg
tatcattatttcttcaaatttatccatttctatttggattacgactctggtattatttaatttgttcgcattacattctctatattttgagaataaatatttatatataacgagccattcacgcatcaaaagatctgcacgactgaaccatactgaagattttaatccaaaatctataatgttttagattacaaggttttgaccttagatgataaacttgatggatgcatatatagaacaacttagatagttagattagataaaaaaagccaacctttagatcttgacatttagccgtctcacattttcgagataagatcagaaaatgaaaagtataaagacgtacgtaatcctataaagcattattattattttcctttgtattatctggcttttaattatgtttgcaaactacaaatgaattttgattaatacaatagattttaacatgcaaatgtaaacacaaaaaaaaagaagccgaaaggctaacgtacacacagaaaaagtatgtaggcccataatatagaaaactatagaagatgatgttataccacaatttgtttgttaaagtctactcagttaacgagttcaatatgtgaatactaataaacgcagcagtgcacaataatgcagaaatgtaggtcttgtgacagaagaaaacaaatcatataaatttatctgtcgaaaatgataacatgatttcgatttttatcaagaattttgttgagatttagacatgagccaaaatctttagaacaatcattaatataatacttttgaaataaagaaagtaaactttttctaacaaaagaaattttgataagaaagttctttaaatcccatcacttagtgggtgtaaaggcaaagaagcatagatagatcatatggatggctgaagatgacctaatagtgtgtgctacgatgtagcattacacatagagggcaaatttctttattctttttactcgttccaactttcatagtgtttattttatgtctaatggcccatatggtccatatttaaatggcctctttatctcgttgtaaccttacttcgaaagaaactagcgtacatcaattagtttggcattatcaaacgtttggtgttgattagtcatataataacatgctttatcttgatattctctttaatatttatttcattaaaaatcatatttatggcatttattcctgataaatttgtggacatattcatttaccgacttgattaattcgcgaccccaaattatactgcctactatatataggaccactttttaaaatctgaaacgttatttatacatcagacgattatctgatggctgactttgtg

SEQ ID NO: 53072 - DNA, 914 bp, Arabidopsis thaliana landsberg
aggaggtggcccgacagagggtggggtccgtcccctcatagttatatttggttgtttgcatatattccttttgtgtgctttttttacccatcaagtctgggattttttgtatacatgcagaggcaatattatgagcgggagatggagaaaatagtcatacgtacaaaccccttgggtaaagatcgggactacaacaggtactggtggttccgaagcaatgggagaatatttgttgagaattctgattccgaagaatggggctattataccgccaaggaagaggtatcatcaatccacgtggttcatttctttgtttgataaatggattgtatagttcttgttccgatttgtgtatgttacttgagatccagctggatgcattgatggggtcactaaaccgtaaaggagagagggaactgtcattatatacacaactagagatattctatgacagaatatggtcagtttatagcttcccatttctattttgcataatctgcagtatttattattctggtaacttgttctaccctcactttaatgcacatgtagaagagtaacaccacatttatcgaagtccccttgtttatgtgtaatggctttaaaacctggcgatgacttgtgatttgcagctctacactacaaaagaggacgaaggacattgctcacaacatagaaatggaagaagcagtggttaggagatctacccgtgtaagagctccactacatgaaaatccagctagtgccttcttgagatatgttaacaagtggaaagaggactaaacgtagcagaattcaattctgtataggaaaagcttgtagttgcagatgcagccatagccaaaacttaccattttcagctggtcatctctgttttttctttggctcctttagggtttagtagagctttttac

SEQ ID NO: 53073 - DNA, 1956 bp, Arabidopsis thaliana landsberg
aatgctgttttcacgactagtccgctcatcattggtcgcaatatgaacgagtatgtgccttcaattccaaatcctaactatatattgattcatatataaatagatatattactcaaaattttataatataaaaatggtaattatggatggtaatgaaggatgcaaatggaggtgcaaagaaggatagaggaagaggtagtaatagaaagacaggtgaatcaaaggatagcggcacaagggaaatacatggagagcatgttagagaaagcatgtgaaacccaagaagcaagcctcactaaagactactctactctatttttcgaccgcaccaatatttgtaacaacacatcgtccatcccaatcccatggttcgaggatcattttccttcctcttcctccatggactctacgttgattctccccgacatcaattccaacttctccctacaagattctaggagttccatcactaagggccgtacggtttgtctcggttagagaagagatatatcaaatatagatctagctacttgactctttcttctctagtttctaatgcgcacttggtgtataaaattatgcacaaaattacttgtaataacttatgccaaacatatgaagtcttcgttattcccttgatctatatatgcgatgatgtggaacgtatgctgcctcatgattatcacaactcttgtgttttgttatatatgtgttcacttgcacaatgatacatatattttactcaatttggacaattctatagttctaaattcgatcctagttctcacaacctgatttggtgttttttgttcttcggatggttttgttttttctagaagcccatgatatatgaatttatatattttaaagtcacatccatttacatgcaaaatctctccggtcaatttttgtttataaaagtttatatgcacaattataaccgatcaatcttgcgtctttctatctagtcacttttctagccatcatcaccacccaccgatactggcctgttcatctccagtagtcttaaatagaatatcactgcagtacttgcaggcttttgtgaaaattttgccatttcatggaattatggaaaatttgaatttatccatgtgcattctaataattctgtactagtccgataattgaaattagggccgaaagcctaaaactagaaaagcccattcctatatcaggtcccccccccccctccttaaatggtcaaaaactcgaattatatttgagggttcatagacctgtaaaccagctagagagagtctggtaatgttgtattctcaagtcttaagtatgtcggttgacgagtcaatggaagtcttatggatccgaaacggtcaaaaatggatgtaattttataatcttttgtaaggactgcgctggtacataacttaaagataagattggacgatggagtaaatatgttgtttgttttctctcacacttcatcagttttcagatctttgttattattcgttgttgctcaccttttatttctaacaaaaataagttaatgtaattacatttacatgtctcatttttacttttaacatcatatacaagttcatcatatactaccttttaagctgaaatataattacagacaaaataaggagtcttaattttttgttttaaaaacagatcacaatgatgtaatgttgaaaaatgtaaattaatctgctacgtcaaactaaacgttggtaattacacacaatgacacaaaataagtaaaaacaatccagatcacaaatgctgtaatgttgatcacgttgaaaaatgtaaattaaactgctacgctaaactaaacatttggtaagtaaattagaaattttgtaccaagaaagacaacaccaaaagagccacgtagcatatatagagcttcttattttctacacagacaaataaatcacgtacgtgtcttttgcaactcatgaatcatgg

SEQ ID NO: 53074 - DNA, 683 bp, Arabidopsis thaliana landsberg
tctaagtgcaagtgaaatgcgacgtaacttttgtcttctcattgttttaataattttcaagattttggcattttgttgaccaagaaatggttcactatcatcagcaaccaaccataaatcaaatccaaaatctataatgatctgatctaacacaacacccaccttgaactactgagctcttaatagacaccaacctacaaagttttttcatctcatttgtgaacctaaaagatactaacattttacacaacatcattcaccaaaatgggaaatagcttgggaaccaagaaaacagcgacaatcatgaacatcaatggcgagagtttcaaactgaaaacgcctgtggaagctggtacagtggttaaagattttccaggccacgttctcttggaatccgaagcagtgaagcgtttaggaatcagagcaaagcccttggagcctcaccaaaacttggaatccaaaaggatttacttcatggttgaacttccaaggtattatattcctcaattttctacttagttttaggtatcaaagttagaatctttttgagtaaatcatttaaaacccatgtgacagaacatggaaagagagaactccaagaagggttcggtcgggaatccagatgagtgcgaaggagagattagagaatctgaagctgtctcgtagatcatcatctgatctct

SEQ ID NO: 53075 - DNA, 586 bp, Arabidopsis thaliana landsberg
  unsure (1)..(586): unsure at all n locations
agaggatccccaaaatcgatatgataaaatagagcaaaaaaatatgcatgtgtttcctcaatgtagattactacattattcagaaaaccaatttgataagggcatggtaccatgcacggaaaacagaatatgtacacacataatgtgagtacaatgtttggttgaatatatacaaaatgcacatcaaaatctggtagccttccatgactacatgtgggaagactaactgcaataaagcacataagaatccaaaaaatgtgtcaagtacaaaaataaccaaaacatcaaaggagaaaggcgtcactattttagaaataaaacaaagtcaagtagctagtaccaccaacagaattcgttccacaacctccccctacataacagaagtgacatcaagtgcatgtttaagacttgtgtaaagaatctaaaaaggtggggagaatatgtgaacagacccatttgtgccaggaatgcaaacccttatccatgggattcttgttcctaacatttgacattgtagtgcttgtcaaccacaaaacatatttgcttatacgangtaacagaaactatcctaaagtggcaccagaaa

SEQ ID NO: 53076 - DNA, 893 bp, Arabidopsis thaliana landsberg
ttcctttgcttctacatcagcttgatcccagtcccaacttttgtcttcatcgaagactacatctttacttatcacaattttcttcatcactggatcataaagcctccatgcttttgactcctcactaactcccaaaaaaacacatttcttgcttttatcatccaacttactccttttctgatctggtatgtgcacatatcctatgcacccaaacacgcgaaaatactctaccactggttttctaccgctccaagcctcttcgggtgtcattccttctactgccgccgtgggagaccggttctgaatgtgcacactccatttggtcgcttcagaccaaaacatcttgggaacttgcctctcgcttagcatagatcgaactgcgttcataatcgtcctattctttctctcggccactccgttttgttgtggtgtaaacgctgctgtcaactgcctagagatgccatgagatcgacaaaattctccaaattcattcgaagtaaactctccacctcgatctgtccttaagcaagttataaacgcaccaatctccttttctacactagctttgaagatcttgaatgtggcaaacgcttcagacttttcatgaagaaaatagacccatgttttccgagtaaaatcatcgatgaagcttaaaatgtacctcttgccactgtgtgaaattggtgtgataggcccacatatgtctgaatgcaccaattgaagctgtgtcgatgatttccatgaagttttcttcgacattgactctctatgctgttttccggtcaaacaaatagcacaaatctccttggtagctttcagtataggcagtccaatgaccatctttttgtgtgcgagaagctttaatccttcttgattcagatgtccaaaccggc

SEQ ID NO: 53077 - DNA, 573 bp, Arabidopsis thaliana landsberg
ctccgtcatcaagaaacagttcgccggagatgttctcaagccggctggctacaactagaagctgttactgtgtctttctggcgtccctagtcgtcaatgcctctccttgcatagccacaatgctacctattcacaatgttaaaccaaaatcacgcggttcaagctcaactctggctattaaaaactggctatcaaagaatatactatttaccttctcgaacatgaacgttgacgtgatcagcgggagtatcaagtctaacgtgcttgccagaatctccaccaacggcaaaggaatagttaaaaagatcgaaccaatttccagcagggaaatatgcatccactgctaccgccccttgcttcagcgctggagaaaccattatgcttttaccaatcaagaactgggaatcaatctcataggttttagtgtcttgaggaaatgagaagaagagcgggcgcgcgattgggttgccgctgacatgagcctcatacatcaatgtgtagagatgtgggagcagtctcattctgaggccgagaacctctcttgcataagaagcaactgaatcccacaggtat

SEQ ID NO: 53078 - DNA, 1160 bp, Arabidopsis thaliana landsberg
  unsure (1)..(1160): unsure at all n locations
aacgaaagcatgtaattgaatcaagaaaatctaaggccaatcattgcttttcgcaatccaaaagctgatctcatcaagtgattggaaccctaaattaaaatccaattgtaggtcgaaagttaatcaatttcacaactttcaaatcaaacaactcgacgggtctcatcgaacgtaccaaaattgtagaaggagaattcaataaatcgagaccctaaaatctgaatcctcaaaaaaaaaaaaaaaaaaagaatttcaattgagctaacctgcaggctgagacgccatatatcaaagagacgacgattggagagagctcttgttggtaatctccgacgccaacctcaagcgcggagagagagagatagagagacaagagaggtgggatgaagaagacagaggaggagggacctcgaaaagagaggaaaaaacaaaacagattactttcttcttttaggttattatgtatcagcccctatagttataatccttagccaaaaagcctcttaattactaaaattgacgtatttgactctcaaaaatagaaaaccaaaatccgaaaaaggatagagatgaaattatatgtttatattattataagcaaagattccatatttcgagggaagcagaagaagaagctcagtcggcggccggattaatctccccatcatctctctctctccctctctctgttcctatcccggcgaattcatatctgaatttcccaaaattcaaacttttccggtggaattattttaggaaaccaagtgacttcttaagctccaaaaattgggtatttaatggcggcgagcgcgaacccgtcggggaacaatcaggaaggttcgtcggcgacgcannnnnnnnnnnnnnnnnnnnnnnnnnnngcgaatggcgctgctgtgaattccgtcgataatggtggaaatacaggcgcggcggcggataattcacagacgattggcgcgttgaggcataatccagggatctctaccgattggactcttgaggaacaatctctattggaagatttgcttgtcaagtaatcttctcgctctctctctgtatgtttaagatttggatttgctgttttatccaatcgctctttctatctgactagatgtgactaaaaaaagtgaattctgcgatatgttattttccatggc

SEQ ID NO: 53079 - DNA, 1075 bp, Arabidopsis thaliana landsberg
aaagcccatacccaacacacagggacggagccaatgaagaattataggggtcaaatttcctttgtgaacttttggaaaataatagggttttgggtaaaaaatatttattgaccccagtcaaacaaaaatattgacccctatgaatgatttattaaggtacaagtaaaacaaagctcaataaaattttatgaattataaatacaaaaacccaataattttattaaaattatactaatgttaggtccaataaaaatctgtcaaattaagaaagtaaaaaacctaaataattgaacatgtgtcgtggtagccaaaaacaatttagcttcttcctcttttgttttttatacaatcatcacatccttgaaaatcagattaaggctcgagactatagatttcaaggtaaactcttatatatatatatatatatatatatatattttatataaagtttaattaactatcaaccaatttcaatttgatcacttaagcaaaattcgtttgtgattaatttagtttttggtgttgttattctgtcaaaaattaaaaactcaattcgtcattattcatgagttttctttgtaacgttagtcgtcaatatactgttttcttcttaatttttgatgtagtttgttttagtttctaatttaatctcacagtaatttttactaatgacaaaaattaaagttgtcatgaatcatgataaggccacggagaaaacaatttttatgtttgatttaagtttcaactcatgatttttatattgtttcttattttttgtatgtaggcaaggcaacaacaaaaataatgtatcggtttctgaaaagaaaatctccgccaccacctgatattaatttaaatgaattgccaagtgatcccgcaaagagaaaaagcattctaagttatcatcctaatcaaagagatgaggtacgacgtgaatatttgattaggggaccttgtcaacctcgtggtcataagtttaaataaatagcaattggaaaggtgttacgccgttttaatccaaaatggtttgatttgtatggtgattggttgggagtatagcgtgggtagtaaagaa

SEQ ID NO: 53080 - DNA, 523 bp, Arabidopsis thaliana landsberg
tgtaactcgaagcccgcaaagcataagcccaatgccagaaccactgaccaggaatccaccgccgccgccgccacccggctgctagcccacttcgcctgagtcctgcctaacctcgccggcgcaggaccgcctgaacaacggagctagcgagcagcaaggactgaggaagccagcgagcccaggagcgaagtacgaacaagtcaggtgaaggcaggacgggagcgcaggagggaagtcagagacggtgtgagaagggagcctgtgaggaggctgcttcaggtccacgccacggaccgaccgaccgcgacagggcaaataggcgccgtcgcgtgtcggagggccgggctcgctcggtcagtctctttccctttcgcgtcgggcagcgatttgcgaggggtgggtacttgggtaatgggtaggtgagagggtgcgtgccgtttaggttggccgggccagactgcgaccaggtttggcataattgcttaagaagccattgaaaatcagcttatggttatggccaatt

SEQ ID NO: 53081 - DNA, 609 bp, Arabidopsis thaliana landsberg
gtccctttcatgctccccacagttgtaatcaccttaggattctacttttgtcatttcgttctaatagattgtcttatcttcaagactatagtagtataaccaatattatccaagcgttttgcaacatcagcctgtcaaattaacgaatgaaacgtgatggttagctaataacatgcaattactcttttgtttctttttcctagcgtaaatttgctactttgatatattaaagtgatatataagaaatcaaaattcatctactaatttctgattaattttcacaaaacaacccaatggagaacccgaaaaattgactaattttgaaaccaatcatatatatagtgagattctgtcgaaatgaatggttcaaaatattcatttcgatgagacatattagaaatcgcatatgagatatgatgagacattgagacctaatataatacaaagatatgagttaattcatttatttcttattgcattcaatttggatgtgtgtttatgaactttgacattattaatttggctaaacagcatctaaaaaaaatacagaacgtagaaaaacacacaaggttttacatctatatatgcatatatttaccggtttagaca

SEQ ID NO: 53082 - DNA, 1049 bp, Arabidopsis thaliana landsberg
aaagataagagcccagacggggaagacgacgagacagttgattctgacggtgttggagataccattgggtttagtaaatgcatttctgaatccacctgaagctctaatgtgttcttgaagcaagtaacatccaatacctaaacatatagctaaaccaatccaactgtctctgaatgtgccagcaatcaaatttggtgccaccacggcgagaagaaccaaagccaccggtaattccaggtattctaataacacaaacaacagagataagccaaatcagaatcaaagtcttgttgtttgtaatggagagtgaatgaaaaaaagtagacaaacctctggcgtgtttaggaaagaagagttgtacaacaacagctacgaaagcaatccatttaccaatttctcctctgtcaaagtttcagacacaagttagggtttaggaacataatgataagtaaagaaaaagtctctggcttttgttgtgttatacctgaaaataccaaagatcaaggaaggaagactgaagaagatgtaaggaatgagaagtgatgtgagcatattcgtcttccaattggttcgatccaacaccaacaagtatctgcatttattacatcaaaacctcatcaagatcaacacaagaaacggatagaggaaagagacatagaaacagagagaatggttacatggcggcgattgaagcaacccattcgaggacagaggtaccaaagcctaaaccagtgagtgtgaaggcgtgtgtagctaggttcttagcagcgatagtgagctcgttgaaatcggatccgatcatggccttaagggttccatggtcattcctcaacgacttcataggcatcttttcttgccggagaagagagaactatgaataattgatgtgagaagagaagagagtaaagagtagatagatggtgatgaatgtgttggaagactttgattataaagatattacaagtgactcgatggatacgtttacgccacgtggcagttatgaaaatagtttaatttggacgaactagatattttatctatattaacat

SEQ ID NO: 53083 - DNA, 596 bp, Arabidopsis thaliana landsberg
aaaacaaaaaaaacacaatcaacaacaaaaaaaaaaaaaaacaacatcaaacacaaaaaaaaaaaaaaaaaaaaaaaaaaaacaacaaccaatcaaataaaaaacaaacaaaaccaaaaaaaaaaacaaaacaacaaaaacaaaataactaaaacaaacaaaaaaaaaaaaacaacacaaaaaataaaaaaaaaaaaaaaaaaaaaaaaaaaaacaaaaattaaaaaaaaaacacaaaaaaaaggagagagagggggaaaaagaaacaacaaaaaaacaccaacaaaaaacaaaaaaaaaaacaaaaaaaacaaaaaaaaaagcacaaaaaaaacaaaaacaaaaaaaaaccaaaaaccaaacaaaaaaaaaaacaaaaacaaaaaatacaaaaaaaaacaaaataaaaaaaaaaaacaacaaacaagtaaaaaaaaaaaaccaaaaaagaacaaaaaaataaaaaaaaacaaaaaaacaaaaaaaaaaacacaaaaccaccacaacaaaaaaaaaaaaaaacaaaaaacaaaaacaaagcaaaaaaacacaaaaaaaaaaaaaatccaaaaaaaaaaaaaaaaaaaaaaaaaaac

SEQ ID NO: 53084 - DNA, 568 bp, Arabidopsis thaliana landsberg
agtcagtggtatgcagatttgagtaaatcattttttttttgtgacccttataacgtatatggttactactcttgaattgtcaaaggattaagacttaaaattctcgtttttctttttgtaaggtatgatgcctgcatggaagtgacagacagtgaccacaagcccgtacgctgtgtatttagtgtcaagattgcccgggttgatgagtcagtcaggagacaagaatatgggaacatcataaactcgaataagaaaatcaaggtcttgcttggagagttaagcaaggttccagaaacaattgtcagcaccaataatattattctccaaaatcaggattcaactatcctgcgtatcacaaataagagtgagaagaacatcgctttcttcaaaataatttgtgaaggtcaatctaaaatcgaggaggacggtcaggcacatgaccaccgagcaagaggctctttcgggtttcccagtggctggaggttagttagttgtcccctcatacttgcagtttcgcttttcattagagtctcctgttctgttcctaaaatcaacacttaactagcat

SEQ ID NO: 53085 - DNA, 2081 bp, Arabidopsis thaliana landsberg
tcgaaggcctttgaaaccctgcgggcacatctttttggcttcctcgtccgacacagcaggcgaaatcacaactggttgatctggcttccagttaaccggagtggcgatcttgttattgtgcttggacgccatcaacaacgagtctaaagccctcaatacttcgtccatgttacgtcccgtggtcgacggatacaagaagctcaattttatctatatatcacaaatccaattaaccaataaaatcatacatgcaataatatatgaaattattaccttactgtcaggaccaacaatatgaagggcacgagacggtccgttctcaattggatcaatcatgttaagctgaggaatgatctctttgttcgggtcagcgattatcgggtaattcaccttgcttccgtgctatatcatacatatgtaacaaattaatcaaaaccaaaatatgatctctagctagtctggtatatgcatgcatgagatttaaattatacattaaaggcttcaatatctttgatccagtctttgtgtgactgtacatcgtcacaagacagaccaaggagcttcacgcctctcttatcgaactcatgagcgtatttggccatcgcaccaagctccgtggtgcacacgggtgtgaaatcccctgtgtgaccgtcaacaaaaatcaagaaaacaaaaaaggaattgcaacagaagtcaagaactcaagatctatatattaacatatataccgggatgagagaagaggacggtccaagaattggcgaagtagtcatgaagtttgaacttgtcatgtgtcgtctccacttctaggttcggcaccgtgtctcctagtgtgatccctggcattttaccttttatatttatatatagaaaaaactttctgtattgatttgatgtgaatggatgtagtagaagttgaagttgcgtcgaggaccgattaaatagagatcgcaagctggttaggttcgtggatcaaagtcagaaaaagagagagagagacttgatgatgttcaaattgaggtgcatgcaaaagagtatagcgtggcgttgttatgaattgggttcacgccacgtgtcttcgtataatcttcaaagttcaaataaaataactcttttgtttcgagaaaaaacttaaagctaaggcgacgcacgatgtctagagagactcaagtgtttgtatttatttttttacttgtgataatcgacaaaatctttgcgtttacacccaaacattgtcgtattaagtttcgtttgggccgagactatggttaatgggcccatgttttgagaaaaacggcgtcgttacctcaaaaagattagttcttcggacagacctaggaggatcagaagttcttaaacgaaaaagaagaagccgaaaacttctgtcggatctggaagctctctctttctctcgtttcctttctcgctcccgcttaacgcttctctttgcttaattattcttcgtcttcctctggtttatttcaaacgtctctttttggtttttgttgatcacggacgcttttctttggtacgtcctctgattccaatcacccacacacttggtttatgttgtcgaatttggattggttcaatctctttgtggtttgttgtttcttgtttcttgtattagttcttcgtgtctttgtatacgagtaattagcttgatttttttgttgagcaatttttctttcgtaccagtttaggatttcttgtgttcaaattatgaatctttaattctcatttctcagttatattcccagaattacaagttttctttgatgttgtataatcactgatcattgtgtttattgtcctgtgatatattatatagatggaggtgcaaagtctattaaactttgatttggatcctggtccagttgatcaatctatattggtgtggcaacatgagcatagatcagctgctatatgggaagatgaggtgtgttactagtttctcatttcatcttgtttcttgttttgcttccgttgttttaattatttcctttttaccgttatacttcacattcaggttcctcctcgtgaactgacatgtcggcacaagttattggggatgcgagatt

SEQ ID NO: 53086 - DNA, 534 bp, Arabidopsis thaliana landsberg
ggggacattcttgtctagagatttccaggaaagccttcttccttgtatcacacaaaagaaaactcaaggtatatgtaccattaaaaaggtagatctgctgtttcttataaaaccaacatacacccgtgtctgaattaataccatctcaaaaacccaactactctaaaaccatcattatcgcatcaaattcactacaagaaaaaacaaaacaaaaccaaagaatccagcacccatatatatctaaatatgctataaaacatcaattgtaacagttttgttacagttgtatcaaatgagtgagtccattgttttccaatatttccaggcatatacaagaacaagaaaaccaacattatttcagggactaaaaatcattccagggctaaaagaagtgctctttcaaactcaagttcagataaatcatttgtatgtcttaaaagacaaaactgtagctgcttttaatttagaggaagacatgagaagacatcagatcaagactgcctccaatcgtgataagaagctaataaataatgt

SEQ ID NO: 53087 - DNA, 840 bp, Arabidopsis thaliana landsberg
gacctgcacagctagacgcacctacagaaccaaccgccaacaatcatgtttctgatagcatcgaggaagatttcataacataaatggaattagagagagaggataccgtcattcgtgctttgaatgacttagctttggcttcaacaacttcgattcctttaagacctccagatactgcgtaattaccctgtaacagtataccacataaaggaatgtgaaaatgattttatacaagtctagaatgcaaaagattcatggaagacatatataccggacataagtaatttgcgatctgaactttgtcagcttcatctacttcttgatttgctgcatcacacaactgctgaaccttttctgagtccaaccctatgatactaaccatggcactcttagcagcatctgcagcagcctgaagaaagtcattttatcaaaaactaaaagtcaatgcagctgttcgaatggtatataagatcactacaaagttcagccgtcacaacatcaacctaaacttgacatagtcaatgaaggatatacagagcagagttcaatcttacctgcatagcttctcctctaagttttacaagcttcagcccgtcctcgaagcttgagaataaaaacagttacagagaaaagaacaaaagtaagttaggtgatgatgcacataggtaaaagggaacaaagtgacatactttcttacaatgatatttgaaaatccgagatttgatacctctatcattcagttaaggatattgattcagatgttaactaacctgaaggctccagcaaaagccagagcagtatactctcccatactgagaccgcaagtcacatcaaccgagt

SEQ ID NO: 53088 - DNA, 611 bp, Arabidopsis thaliana landsberg
cactcgcagtgttctcattgttgctcaagcgctctagagccatctctcgaggtaaccaacccacccatgcccttaattccccatttactgccctgctgtccgcgcaatcgctcgccggggtcaatgtgcgccgccgtcgggccaccctgctgcggaccgtgacctctagtgcctctgcaccggtgtcgtgcccatggccgagtccgtcgtgtcactccgaactcgcatgagtcttttcccagcgccacagaccctcgcatggtcgcgccctcgcctccgacgaatctccgccgcggaatcaggcggagacgtcgctggtagcctagcaacccagaccgagcttgccatcagatcttaggcgtccatctgagatctgacggcctgacttcaattaaactcgatctgatcctgcccgttcgatttagatctggccactcggatccaccccctcacctgcgtcctccagctggtcctggttggccaggcgcctcgcccccaggctgttgactctctggccacctgtcagccgcgctcgtgccccgcgcgcgtgctcgcttgctcagatctaattgtggtcgttcgtagcgatcggatggatgagattaaccata

SEQ ID NO: 53089 - DNA, 1088 bp, Arabidopsis thaliana landsberg
cccttgccaaggcacattcacaaccatgtaactgtagggtaattgagtaactttctttgtcaatccaggaaaaacatcacttgggccgcaccatggcccaaacaaggcacggatctgctttaacctaacacctcgatttaatttaccctatcgatgattaccacaagtgggcctatttgtttatctaccaggcccagcccatcatgataagaaaatgcttgtcactcaagtttttaattaactttccaactccttaccaagaatttgaaactgaaactttttattattgatctatagatctctgatctggaatatatttcggttaaaccaagaattctagctaacgaaaaccataacttaacagttagattaaatatgtacatgtgtaagaaaacgacatcacatctttcctccaactcccaagctttgctttgcgtttaagttagttaagctatgcataatttctcctcaaacagattcaaatatttataacgatccaaatcgaaacaaaaacatatcacacagtttcaaattagagcttcaaatctagttacttgttcttctacagtacatcatcaaaagtcaaaaccatggactcgagatgttttggcttcttctttactttgttatctctaaatgtgattgttcttgcttacgatcctgacacacttcaagatctctgcgttgcggatcgcacttcaggtacacatatatcttcaaattaaatttactgtctactttgaatgatttgttaaagtaatgaaatgtcgtcgtttttggattatgtagggataaaagtgaatggtttcacatgtaaacccgaatcaaacatcaccgcttcagattttttcttcgccggaatcggaaaacccgccgtcgttaacaacacagtcgggtcagccgtcacgggagcaaacgtagagaagatcgcagggcttaacacgctcggagtctcactcgcgcgtatcgactacgctcccggaggtttaaacccgccgcacacgcatccacgcgccaccgaagtgatcttcgttttggaaggcgagcttgacgttggattcataacgacggcgaacaagctcttcgct

SEQ ID NO: 53090 - DNA, 982 bp, Arabidopsis thaliana landsberg
aagcagagaattgtagactgaattctaccttaagatcttccaagcagcagcatgcgcctccggagtctgcaaaggagaaactgatgcttaaaaggaaaacaatgatataaactctggatcagaaagattctagttattattattaacatataccgatttctcactttcgtcttcaagatctgaagctgcgatccattcgatatgtggcttcaatgaacatgcaatgcaggcatgaagaagggcctgcgatggaaaccaaatgcgattggtagaagaccaaagtctataaattcactttccaagtttaccttaacaaccgagagataagaatccgttagaccaatgtactttccaaccatagcaatttggacctgtgcataacagaaataagaaaagtcaaggcttgtaaaagaaaatgtgtaaacactaaatactcacatgatttgtcaagttatcaaaagtctcagccatcttattccagctatccagatcaggtgctgtcgcaacgctgaaagagatgagtttattgaacttggtgttacactgaaagtgatatcggctaacttatgaagaccatataagaaatgagactaacttagttagattcagttgtttgagaatcgagtgatgagcgttttgattctgcagcaagccaagagcatacatgattctatttcctttatcttggaagagccaaaaaaaaacatccaacttacacggagtaggagaggaacatgccaaatgtttggaacatcatggatattgagaatattagctgcctgtaacaagtcatcaagtgatataatcgttgagtaaatatataacgtaggcttcacataaaagttataccgccacatgacagaactgagacaatttagccttgggactttccagcagtggctgcagagaaaggaaagaaaaaaactaagactttgtcaaaggttgaaaattacaagtgatctcgcgatacctgaccagagcg

SEQ ID NO: 53091 - DNA, 758 bp, Arabidopsis thaliana landsberg
acaccatctatgcgagattcagtcttcacatctccattaggaagctgactcgattgactgcagaccctgtgatcctttaactcaacaacttcttcattgtcatcaatgtactcatcagctggaaggcaaagatctatcatctttcttctgattttcgtcggtctaacctcggacacttcaacacttttggaactagctccattttgccatgaaactggaccttgagaattgcttcctttcatgggagaatggccattatcctcaacaaccgacatggatggtctatcgtaaaccgagttcgccaaagggaagctagggattttccatttacgaacatcatcattcgtagcttgagaagaaagtgatgcctcaatctgaacccattctttattaaactgtttccttttcaattcatccatcatatccttctgtgtcctatatacccggtgaagttccaaaacctggttaaaaggatcaaaattcacaaaatacaatcaaccaaaagccagaggaactgataaaaaggtcacagagaaaatcttccactaagttaacctgtgtcttaaaaacagcttcgtgttcgagcattgtccttctcaccacatctttgtcaaacccaaatgtagtctgagacgtgaacccattattgtagcattgatcgttgtttgatgcagaggttttattgtcaccgtagaacaatggccatctacaaccgttattaaattctctgttgagatctcccatagaatgatgatatc

SEQ ID NO: 53092 - DNA, 578 bp, Arabidopsis thaliana landsberg
taagcaaaatttgggaaaaagttgaaacctaggtgttgaggcatggcgtataccacattgtgactgcaacttggaagtataagacttggacccaagacagccttcacttcaagataaaatggacctacaaatggggttcaagttatagttaatccccatatgggcttttacaatctagatgctctaactaatcattacctcagctgttctagttcataaataactgcttctactactattttggacattaaacatgataaatgtgtgtaaacacacataaatatttttcgcatgtcttatgaattggggagccatctgtatatcttacaacgagactaacatatttgaatatagtaaaaagcccatttttgtaacagcacacaaaatgctaacataccgaaggataaatcattacctataggagcaattaacatatattactcagagcacccccatacggaggagtcctaaagcggtattctatagttacattaagaatacataaggattatgatcgaatataccgactctgttgagaatctactatctttattgaccaatgaggggaaccttaagtg

SEQ ID NO: 53093 - DNA, 952 bp, Arabidopsis thaliana landsberg
gtgtcatgtgatatatggtccaccatgatgacatgtgaatgatgatgacgatgacgacttaccatccatgaaccattcgccatcagatgagatgtaacatttggagataacgagatcaagatcggctaacacttgaaccatgtccagtaatatcccgtacttgttcgcgctatctacctacatatatcaaccacatgtttaattaaggctaattagtcattatctatgaacttataattaaaaagcatattatcaagagctttttataaccttaataagtgtgcactctgggtcagagtcgttgtctacacaaaccctaattagcgcacaaaaccagtaatatcaagaataatactactttattaaaaaaaaaatatccaacataatgataaaaatattaataaggtactaacctgggaggattgattctctcgacgagtgattcaatctcggaatcaatccgaggctgataagctatttccatcatcttaactatttaattagctctcaaaatccaacctatgtaccaacatgtgtttttttagtcaaagaagaagagagcaacgtatcaaaatttgtttgttataacaaaattgaataataacacgaagtaaacgaggttttaaagatacttaaagagcaatacaacgtttaatattaaacttaacgataaataagaagccgcctatttcttcggttcagaatcaaatctgaaaccacttttaatcaggatgtcagaaatcaaaatcagatgcagattgctcaagatattcaaattctcagctgttttttaaaaccaaaattcgtagttcaaaattcaagagaactatggttgtttatgttagattaatattactctcaacttggaagaatagttgttcgtatagaatcaagaagtccccattgggaaaagaaaaaaacactttgattatgaaatagagcaattaaaaag

SEQ ID NO: 53094 - DNA, 342 bp, Arabidopsis thaliana landsberg
ctttctcttcaactgcttatatagatctgtacgtttgtttgctggaggtacacttttcccgtaacgctgaataattttgtctgcgaaattttgtcggattgttaaaacttgtcgtttagctgtaatgccttgacttgagaggtgaggtaaagggtcagcattgcaattcaagtttcctgctacaaatttcaaggtgaattttctccgaacaatggagtccacttcccctctctctagctctagctaggcaaccgaatctactagcagaggcagcgcatgacgccgacgacgaagctggcgatgcagtcctgtccgcgtgcgtggagcgcgtcgtctcggacg

SEQ ID NO: 53095 - DNA, 119 bp, Arabidopsis thaliana landsberg
ctagtggatcccccgggctgcagggggggggaacccccccccccgtcttaaaacctcttacctcatcaggtacacccgcatagtcatatcctaatactgctaggttttgggtgagtgag

SEQ ID NO: 53096 - DNA, 511 bp, Arabidopsis thaliana landsberg
ctaaactgtgataatccattcactgctgttgattgcgggttgaatagataaaagagtagggtctctttatcaaatattcacgtcgaaggggtattttcccaacagagccgatcagatctcatcctacggttgaggttagatccaacccaatacacgatcacaaccagaggattacagatcaatggctctagaggtccacacgcacgatctatccatgcccctctgtttcgagatgaacgggctggatttaaaggagccgaactgataatgtgcttctaatctggagcatccagatatgatcctacggtcaatggctcttcttccaccccactgtggccgcactgcacgacgagagcccatcagcggtggcgccatggccggtgtcatgtacttcgtgcattagagtccaaactcgaaaccgaatagagcatcacgaagcggagatcagtacgaaactatggggaaggtcctcacagcgatgatgacatgatgatgcctgccacgacatggt

SEQ ID NO: 53097 - DNA, 535 bp, Arabidopsis thaliana landsberg
accaccagccgtgcccccgcccacgagttaggccgccgccctcgcaagccacaccgcccgcgatccccggcgcgcttcttcccgctcctgcgcaagcacaccgcccgcgatccccggcgccgtgataccagccacccgcgcaagcacaccgcccccatcccccggcgccctcgcttcccgcgcgcgtcgcccgcgacgccggtaatcccgcccatccaccacgccgtgatgccccgcgccgtgatccccgccgtggggtttcccgaggtctcaacgcccgcgcggccgcgaccccgcccactggtgtttgagctcgacaacgccgacagcgtgcgatctctccttccccgcggcgcccaaatccgtcgagggcttcccacaacgccgtccttccccgcggcacccaaatcctcgcatggtcgagggcttcctatacgcaccccaagccgacgtctgcacctccgtcccgcccccatcatccacgcaatccatcgtggtctgcacctgtgccgcgtctgacctcgagcagctacga

SEQ ID NO: 53098 - DNA, 739 bp, Arabidopsis thaliana landsberg
taggggatcttatattggttatggaaaatagagattttaagaaagaaaaaaggaaacatttttatgtaggattaatggttctaactaatcatctatgcttcataacccaacttttaaacataaagctatcatagtgttacaaacagtagattactcagttgtaccttcacaaaattgctcaaaacctcttttatcttcacgttcttcaccttctctttcttgtgtctccctagctcttctctcttcatgacgtagtcctctttatcttcagcctttatgttgtttatttttgtttccatgaaggccgtcattttccatgtttaaaacccagggttagggggtctcaaacaccatgttaccacattcccatgttgtatgtataagtctttgctgactcatgggatgtcgcgtatgggaatccccttaactgctcgattatgagatgtctacaatctactccaatggtaattggatatcacatgtcacatctaataaacatcttcaagttttgctattcttggccacttatgtcccttgatgatcatgaagttggcaagaaagtacctttttcgatgcccgtgaagtttggaaccagatcagagtatctggagtgtgcactaccatatgaaaaagtatcatttcccaaaccaaacgacaaacttcatataaataattactttgataaggtgaaactggtaaaaaaagctctgaatgccccttcaccaaataaattatttta

SEQ ID NO: 53099 - DNA, 583 bp, Arabidopsis thaliana landsberg
ttggagattgcaatttaccgaccgcgcatgtggtgaattgagggtttaagtgtccccattggtttggtccaggtttgcctttatatccaaacactactccttctgtctctgctcatttattaccaatttgaatacggttaaaacttataaagttatattcactaagcacaacacatatcgttttagacggttagacccataccaaaaactctcatataatagcacgattaccatcatttacttgatcgttttaaacttaattaaatcccatcctatgtatcaaactttgaactttctgattaatttattgtgttttctctaaataaaactataaacatgtgaatgcatactatgaatatagaaatggagggagagagaaacaaagagtgtaagcattacgagcatctgcaggtgcaatgcagatgagggacatggagaagaagcagagcttaatcatcatcataatcttcatcttgtgttttagttcctgttttggtggaaatctctgctaaaaaaaaagggagaaaaaggtttgcattaagaaaaaaagatgaagaagatatattttccaaatctggaaact

SEQ ID NO: 53100 - DNA, 772 bp, Arabidopsis thaliana landsberg
gcagttccataatggatctcgcgatctattaaaacctcatccacgattatcttaaccggagcactagccataaccatattcatttcctcatctttactccataatctaagtcactttagcagtaacataatagaaatgccttctatctagtgatcggttttgactatctcaaaaatatttatatgcaagagttatttaatattatatattcacatttaaccagaaacaatctcggattcagatatatgactttaaatatatgggtttaaataagatcaggaattatggattcaaatatttgacagctgttacaccatgaatgataagattggatcagagctagtatctaaaatctagaactatttttcattaattactactttgtagagaagaatagtcaatgagaaacaaaagggttaatattttcatacgtttatcatctgttttaataagaacaagagcgtcaacttagttccggactcttgatcctagcttaaagagtttattattattatagttccacattcaaccaaaaacactctcggattcagataggaacaagaaggtcaacttcttaaagattaatgactagtggagaaattacgaagcttgccttgtatttttctttagtatttgtttactctctaccgccctaccggcgatgcctcaccattcgggtacataaatgaaattctgatatcaagaaaaattggaatctattttcgaaagtcatactagcggtttctaccttttaagtactacattttttttt

SEQ ID NO: 53101 - DNA, 639 bp, Arabidopsis thaliana landsberg
  unsure (1)..(639): unsure at all n locations
ccaggacaatgcaaggtacaaccgtggagattaacataactactcagagaagatggtaaagaagagtttagggaggtttatatatgctttgagccgttgagaactccgtggaagcagaactgcagacattggtttggatgggacttttctgaagcataatattcaaggtgtactgcttactcctgttggaagagatccaaataatcagatttaccctatagcatgggcggttgtttcaggagaaaaccatgacaattggtggtggtttattcacaagctgaagattaacttggatttgggagatggggaagggtttgatgtaatttctgacatccacagaagcataattaacggtatggcagtggagttaccgaaggtcgaacatcgagcttgtgctagacacatctatggaaaccttaagaagaatcacaaatcagatactttaaagccatcgttctggagagttgcaagtaactacaatgaggagtagctacaatgaggctgactttaaaatacatttggcaatattcagagacacggatccgagtgcttgtgacaaacttttgaagaaagnnnnnnnnnnnnnnnnnnnnnnnnnnnnnngattggttcttgctgtggtgcacacacaacaatcac

SEQ ID NO: 53102 - DNA, 470 bp, Arabidopsis thaliana landsberg
  unsure (1)..(470): unsure at all n locations
tgatatattcttgttgctaaaaaacaagacctaaggggcaagcaagcctttgcgctagtttggaaacttggtgatatgaagagattgaggtctgaaaatacgtttattttgtcacccatggcaatgaaggccttgcaatttgttggcatggccgcatgagaccatatccatatgtaggcatggagccgccgaggaccagtagtccagattcccctcccataatgccggggaactctcggaaggggctgttgcgacccccttatttcttgccgtcgtctcattccagaaccactctatcgctctgagacgatccacctgaactgcacgacggagcgagccgcaagagctcctgcatcgtcgtcgcaaacccaagaagacctaggtagcaagcagtgtcagatcgaacgcgcgcgaacatggcggcggctccgcatccgcgnnnnnnnnnnnnnnnnnnnnnnnnnnnnntg

SEQ ID NO: 53103 - DNA, 619 bp, Arabidopsis thaliana landsberg
gcccagagcaaattatcagcaacaactgaagatacccaagaggattcaatacctacccagtacacattttcaacagacagataacacattatgtgtctctagttgatctaaatcactcaatctccacactaaacaacagattccacaaggtctttcacaacaacatcatgcatttagccatttacatatccaacgacacgaggaacacaataagcaaaataaataaaaaagacgaagaattcgaactcttaccagggagaaaagtaaggatcccaagaacaagtaacgcataaccttgagagctatctccttccatgtgaccaatgaagataaaaaacgacaaaagaagaagcaagcaaccaagaaacaaaagaaacacagctaatgctatagatttccatggaactctatcaaatgctttcggtgaataatcgaagcgaggatcgaaatctctcctttcaccaacaccatttccatagccttcatcatcttcatctcctggaagctgtgcataccgtacacttctccttgacgccatttactaatcagcaaaaccacaacacaacacatagatggatcataaacaccataaagtcgaatctgtatctaaaactagaat

SEQ ID NO: 53104 - DNA, 753 bp, Arabidopsis thaliana landsberg
tagtggtctaagaacgaaaatataaagaattgttgagattttttttttttttgagatttcatgtgcattgttttgatgatggcatatatcgaatgtttttttcttacatgtatagtcacctaatatggttgcgactccattgggaattctccaacttatcctctacttcaagtacaagaataagaaggatttagcaccaacaacaatggtgatcaccaaacgaaatgatcatgatgacaagaacaaagccacacttgagtttgttgttgacgttgatcgtaatagtgataccaatgagaagaattctaacaatgcctcatcgatctaatatctcggatgtgttttccccaaaactccttgtaaatccagagatattttatctaaacacctcatatgttgtacgtgctttcattaaataacgttacatcactctatacgttatggtggtgatgatattgttgatcatgtgaaaaataaaggtggaagtgctatgttttcctctgtatttatattataagatcaagtgtatatgtacacgaaagatcaatgtgttgacaaaaatggaaaaaagagttaccgaaacttaaatttttttttgacgaatggagaattattgaaatactttttttttgttgtaaaaatgttaataaagatgggtttaaagtttaaaccacaaaagacaccattatggttttaatcaactcttgtcgaataatgttttaattttacccgtagacttatacttggctaata

SEQ ID NO: 53105 - DNA, 993 bp, Arabidopsis thaliana landsberg
attcttacagatattgctgagaaatttaaggtaagaaacatagaaaatttcttcattttttaaaaaaatattcatttcatcattgaattcaatctcatctcgagaaatcataagaacaatctccctttaacattttagggcacacaactaaacaacaaaacgccagataagaagaatcaaaacaaagaacagatcatgttcttcttacatatgtatcacgagataagaagaatcgaaacaaagaacaaatcatcttcttcttacagttgtattattgtctcataataaaaactaaaaacaaaaaatctccatttgaagaaggaaaagaagagggtgagataaagacacacgaaccttccgagaacgcagctgactacacagaacacattcccaagcacgaacgaggaaaaagagagagagagagaaagagagagtaatttgtccgaaactggagatttagggattttacacagaacatgaaatagagagagagagagagataaccaatgtgtggtaatctacatggaatttgcagtatgtcatctttactaataaaccttgtttgggaaaaatgaatttctaaattttatattataaaatttgcaaatcattttatatgtatgaaaggaaataacttctgtcattctaaattggacaaagattaatggtgggatttctattcaaaggatatatatattaagcaattaattaaaaaaaagattttatacaaaactttttctgtatttcatacaagtttttaatatatacctattatttcttatcagaggaaaaacaaaaagaaacaaaatacagctattattatcaaaacttatctgtaacattgatattttcactaatgatttaggttcaaaaatattataagctaatcaaatttcatcacaatatgtataagtgatacccaaaaattaccctatatctaagaaactcaacaaaaatttagtaattttttaacttacttctttttactgttgt

SEQ ID NO: 53106 - DNA, 1244 bp, Arabidopsis thaliana landsberg
atataatggtttgtggatattatttcttagtgggaaacctttataaaaaaacatgacatatgcaaatctttatactattatatttaaaaggaaaattttcggatatatttctaatagttcagaaaatatctatacttatctttaccctttttcatatatgattttttaagaagataaatactatttccaagatttattggcttacaaaattatttataattttaaaataatcccttttcaaactcctctttagtaaattactaggtggattcctatgaaaggctagctatattatctatatatataatatttcactttttatattcaaatgatttcacggtagatgtgagttttgccaaaaatttgtggacaaataggtcagtgtcacgtaacaagattcaacttcttatcaccaaaaaaaaaaatattcatgttctttagcgtattaatataagcgagccagaaatataacttgcacaataataaatcagtgaaggaaaagagagaaagaataagcgtagtgaatgcaagagtctatcacaagatccataaattattcctggagaccttaaattattcttctggttttcagatctgaatatactttttgttattttattatattttatatccagtcaaaaacaaatgatttgtactagcaagaggaaaaaccagactaaattgatattattgtaatactcaaacttcagaaacccaaatttggattgaaaatacataccatagtacatagtttcaaatcaaatgtttatatatttcaaaagcttactacatatagaaaaaaaatatatacacgtttccgtagtttaatataatttcaatatgatcaacatactgatagtgaaaataaacggttcagatccatgcttataatatgagcatatataaatcatatactaatccataattattatgatctttaaggtatcatcatcagcacaatacataatacaacagtttgccgcagcaaccggatgcaagaaacttgcgggcgaaatcaaaaacactttcgtgaccggaaaaatcacaatgactatggtgagtgatattaatagctcaaccgcggacagtagtacctcgtctgtgtctcataagggatgctttgtcatgtggcaaatgctacctgaaaaatggcttatcgagttggttggtggcggccataaggctttaatcggtagtgatggagaaattacttggcgtgatacaccatggctcggtgatcatgc

SEQ ID NO: 53107 - DNA, 553 bp, Arabidopsis thaliana landsberg
  unsure (1)..(553): unsure at all n locations
ccgcagatattgcacatccaggtttttatttgccagagactttttattatcgagaaggtgaattgcgttaaaatagcatattccaaattacatcgcgcccacagcactcgcagccatgaactaagtcgcatggcccatgccataagtgtctcgtgctgagaatctcattatgaatctgatgccccctaccgtcatgacgttcgccgcgaccgaccccagcagcggcgccggtttgcaggccgatatcctgaccctggccagtatcggctgtcatccgctttcggtcgtcaccgccgtcacggtgcaagacactgtgggcgttgataacgtcatnnnnnnnnnnnnnnnnnnnnnnnnnnnncaggcacgcaccatactggaggacatgcaggtctccgccttcaagctaggcatgctgggcagcgtcgagaacatcgccgtgatcgcggagatcatggccgattacccggatacccccctgctcatcgacccggtactggcctccggccgtggcgatgagctggccaacgacgagatgcangcagcgatgatc

SEQ ID NO: 53108 - DNA, 1060 bp, Arabidopsis thaliana landsberg
cataatatttataactctaaaatcaatttcagaaaatataccaattaactatcaaaaataataagtttacaaaaatcattgtacctcagataaaactttaatactgtaatcaatactgaaagtttttaagattaatcaattctatctagttcagtattatgataagattcttttaaagatcactattttatgcatactttaataaacatgcccgtattatattatcatcggtaaaataattttaattggagatattatctgaaacaactaccatttcactatttttggatgacatttacattctacatagataagttgaatatttcatattaattactatataattgatattttgtgtaatttaagagaatctggcttcaaattatcaaaaaataataaagtcattcaaataatttttatcaatccatcaaatgagataggggagctataaatattattggaaataagatatcaccattttatcataaatatatgttattatcagtaacaaatttatcgccaataacaatagaggaatgtattccattattattttaaaaacagagttagtaagtaatgtaacggcatatatctattgtcaatttatcagaaataataatgaatttggaatggtcttcatattctatataacggtccaaacaaaataattctatcttaaagctctcaaaattatagtgttatctcatggtatccgtttttgacgattttcattttttctgtatttatcacataaataactaagttttctatattcataaaggaacattattgagtgcaaaattcataaactcatttcatccgataaacaatatatcgaatgtttttccttgaatctaatcttttataatatattctcttaaaataaatatataaataaactatttttagatgataattacatcatataaaggttagtgtgtatatatatataaagagagaaggatatatgtgtatggaacacaaagaaatagttcatagtcatgccgggcttaatcatatatatatatatatatatatatatatctcaaacctatcacaa

SEQ ID NO: 53109 - DNA, 477 bp, Arabidopsis thaliana landsberg
gaaaatgattttcttaaaaacatagtatcactgacactcttttgttctcttcccaaaagacagtaacagattcacctagtgtaaattggtgcaaatttggaagaaggagactgaattttacctgtaggacaacagcagtggaagacaatgccaggccattgccaattactattgccgctggaccagcctgaccagcaacatagtgagtgatcaaaccaattactgctgccgttaccagaacctggattacaacagcgaaaaatcagataaaaggactaaactacggcaatatatacagaaacaggcatgcattgtagctcaaaaaaataaagagagtctcaaatcacctgcgcggagcctaatccaaaaacatatttgttcatggaactaagtgtttcaacagagagctgtcagacagatagaatcaaaataattggcttttttttccactaagcacatatcaaaggaaaaaggaac

SEQ ID NO: 53110 - DNA, 1114 bp, Arabidopsis thaliana landsberg
tgcaggtcgactctagaggatccccctatttgagattttaaataaatattaaatgaaagcgtttactaaatacttaccattttaccaattacgtggaaaaaaaagtactcaccatcacggcgtcacggctaatctgtaggcaacatataagacgaatagaagaaagtcccagacccagaataatgttattaatgcatacgtttttcaacttctctttactcaaattttaagaagctttctaatgggacggatgatgaccgtcaatgaaatatagttcttaatttctaatctacaccaaaactgtcaaagtttcaacggaaccaattgggataaaacaaaaaatattatctttaaataatttgttaaatctaccaagtatttctttaaaggtggttttaaggtaataatttatgacagtaatggctaaaaccaatctttttcaatcagacacatattggatgaaagattttcactgaaatgtaacgattttgttatatcagtatattggaattaatcatccaagtaacatctcatatgcattctcttttcttttcttgttgacagctttttcttattaggaaactaagtaatatttcattaatgtattattattcaacatagcaaaaggatagccaagattaataaaaaagaatgagaatacaaataaaccgcgatataatgactgattgtgatccctagtaaacgggtttgggagccactggacttgagaaatagaaaggttcaagggtgtagagggtcaagttgtcgtggctaaggaacttggagttgtcgggagagagtggagctccggtgacacctttgttgacattggtcggagtcttacacgtgaagaccggagagctctcgagtttcactttgcagctgctgatgttattcaccttgtgtgagagtccgtacgtgatgaagtagaagtatcccttcaagtccgttgggtagctagagattgtaaccttagccactagctttccatatgaatcccgacaggacacacaaccttaaccttgccccctgtcaagtacatcacaggtttggtaagatgtcatgggatgtacacatataatgtgaaatcgaaatgtagttgaccttggatggg

SEQ ID NO: 53111 - DNA, 613 bp, Arabidopsis thaliana landsberg
  unsure (1)..(613): unsure at all n locations
atgggttcatgttttcaggctgcttcgtcaagcattacctctgtgttttatgtcaaggacgagatcacaattgctactgctggagcacctgataggtacttacttgcataacatttattggattcatgtgaagctagtccaactccttaaagcatatagaaatgttgttaacgttctttatatgtttttttctgccattcttttagtgccttgaaattttgggatataagaaagctgaaagctccttttgctcaagcctctccacaatcagacccaacaaatactaaggtaagccaagcatcttattcctagactcatgtttcttctgaatggtttcactgtgaattaggcactgaatgatttgaatggaaactagattgacctgtatcctggtttttaatttgtgcaggaaaagagatcacatggtatagtttccttgtcccaggactcaagtggaacctatctcacagcatcatgcaaggacaataggttagactnttaagattcttactntataactnttcttagtgagttagtcctcgtcagtcgtcaaacagtccagctcttaccaaatatattctctctttgcagaatctatctatacaacacgctg

SEQ ID NO: 53112 - DNA, 181 bp, Arabidopsis thaliana landsberg
ttttaatcgacgtgttcaccacagaagacttcggtcgttttggtatatactcggaatgataccgtcaagtctaggaggatgttcaacacgggtacactcatatggtgtgtcacacatctgtcatgcgactgtgtatcgtgcatcatgatagctgcaatgtgtcatgtgtatggagagacgc

SEQ ID NO: 53113 - DNA, 581 bp, Arabidopsis thaliana landsberg
tgtcatcatttcttgtaattttgtggactaattgaagagtttagttgaagttgatttggatttcagttaactggattaatgtgaggactggttttatctgatttataatcaaatcttttgttatgtctctttcgatttttattttttatgttcgttgcgttgtgttatatatacgagtattgtattgtaaacaaaactactagagacaatagtaaatatcgttttactgattaaaaatcataatcttataatttaattttacatgtgtattcttgttggaaacaaaacatttactagagaatcaacggggataccagaaaaaaaaaaacggggataccagaattgaataacatggtcgaaacgtaatttttgaggagcaataccttctagtggtatgattttattttgcttcttagatttagctatataaactttctattattagcaagttaataattaatcataggctacatttataatctagatataaataatacatgagaataaataaataaataaatccttcaaatacggtgatagttataagaacaaattggtacataaatataccatgaaagaaa

SEQ ID NO: 53114 - DNA, 852 bp, Arabidopsis thaliana landsberg
catgacctgtcaacaaataagcttttgctagatgcagaagggtattcaattctggttcacataacaagtatactagtcatttcatcatagtcatatatcttcatgctctctctctatatatacttaagaggatattgaataaattccagagcttttgcttacatactatctaaaaataatatttccaaataaaatgtaatgactcacattgctgcaaatgtattgagtcacaaaagagtagaaatatgtagaaactcttcaattgaatcattattgccatgattgagtcaaaagagaaactctctttacaaagtctgaaattttgtcaagatatgtaaaatctcaaagtttcaaagtaatctcagcattagcatttagcattaacaaaaccaacgacaactacgatgtattaacaaatcaaatttggaaacttctaaaacaatgcgatgataatggacaaagagatgtcttggaaaagtctattggaattgaagtttctgtctatccatagcgaattggaaaaaacgatcaccatgaccaaaaaccaaatcgatgaaggttcgttcaaacacccaataccttgaagatgatataacaaagaaagcagaaaaatataaagaggaaaagataatcaacgaacacgaagaagttcgtggatccatgtttcggtttttcatcttcgtcttcttcttgtcctttgactcgtcctcatcaatgggttcaatcttcgccattgtagtccccgtgaccaatacgccgatcaagttttcgcgggattccgagattgctcttcttctccgatcgattcctcggtcgtgttttttcctttgagaaactattataacttgagca

SEQ ID NO: 53115 - DNA, 870 bp, Arabidopsis thaliana landsberg
cattttctcataataatgggcttttcatcaattttcttaaatattaatgggcctttggcccgataacagctaccctatccatttggtccgggcactctagaatactctcttcgctcttctctttctctcgtgtactctgttttatccaacttataacaatttgaagcggacttgatatgggctcagtttcggtaaaccaaacccgtattgcccgttaagcccatagacaaacaattcaagttgactttgactgaagtcaacacttaaagatctgtaggctcgccagcccagtctctatactattttagatcaaagctgaaaattcatctcgtgtcaataaagaaaaattacgaggaagcggatagatttgcttttttacttacgcatcatagaagaaatttgttaaactgctaagtgagttttgagaaacaaaattttaaataatccaaaatggctaattcaatggaccgattatgttaactttgattagtcaatgatcgaaattcaatatttatccaaatgagagcgactcttatctactaggctgctattttctacaaacaaacaaaaacaatcacaattagccgcctctcctcattagtcattatctgtatcgcgatggggaagatacgcaatgcttagttataaaccgtccgatcagatgactttgaccagtgaccttccgttcaaagaatatcgacggttcttagacacatttttcaccggagtctcacctcacaggtcatcttaatttctcgtaaaagagcatattacattgatatccaaattatccacttcataatttatctttatttccaaataaaattgatttattaaacttcagcactcaattctgtagagaatttaaga

SEQ ID NO: 53116 - DNA, 719 bp, Arabidopsis thaliana landsberg
cacacagtattagtagtctgaatattacaacacaccaaccaaaactgcagctaccactaccgaataccaaacctttacccaacaagtcacaagtctcctatttctctccttgtttcctcagttatgaagtagttattctacatttaataaatctgtacttgtcgcaatacctacaaatgtacatttgatgcgtgtctcaagatcgagatggaatgccggtgagccatgcctgaaaagtgctttctccagtgcaaattatctatcctctgagcagttaacttcgtggttcaaaatcaggacaataactaaaacattttatcccgagacttcatagagtcaccaataatgtgatggccagctatcagatcagacgctgttgcggagggagttaagtctgaatgaggaacagtgagtgaggataggaaaagagcaatccttgcagaaaggttaagaaatttaccttctctaatgttgcgtggatcgtgggcaaaacaagtcttaacattgagacgtaagccgtctggttccttaaacaacacaagcacttggatgatttcatggcatgcaggttgctgagagagccatctgacaatacgggcactacaaagcttcaagaacaatggatgcttttgtgaagactgaaaggacaaaaagggctttttcccctgggtgtatcggggttgggacaatagtataacccttacgatcagggtcaagaa

SEQ ID NO: 53117 - DNA, 1281 bp, Arabidopsis thaliana landsberg
ctagtccttcacgttcacatttatatgtgaacctactacatacacgcgcatgtatttttgtggatgtagtatatatgtcacgcgcatgtatttcaaaaagttttgtcaactgtggatattctctccataacgttgtaactacaactgcaagttgtggtcgaggctgggccaatttcgtagtttttaactcttatttagattgcgacatggttgctcgtaagatctgactttggattcatgacatttattatatacaactaaaaattaagtatttttagaaaaaattatacaagtccctatatataatgtgatatagccaaataaagtgagaatgatggtcaatactcagctgctggtgtcttaatttttgctaataggatttcatgtttttggtgcataaattattctcaataactaaaaggagattacaatttgatttttaactagaaaacacactgtaactggaccacccatgttactgctcatgtgtgttacacttttattcaatcttaacatatgctgttgttcttacacttatattgaatgcttttttgttaaaaatataaatattttgttaaaaataaaaatgttaggagttacaatgaagtaaattctatgatctagtcttgtgataaaaaaaatttttaaaaaaaaaacatagaagaaaaaaacaatcaattcatcaacgtcgaccaaaatatttttgtcgattctgataaaacgattttattttattttatattttttgaattgcatgttctgaaattgatctgtatcaactatcaagtatgtatagatatacctgattatattaataaaagaatataaagacaaattcataagtcagtgttggaagagtaaattcgagtgtaatccaaattaactttgacatgagcgattatttatgtaaaaccttaggaatttatattggacttatagcccgaaagtaataattaattttctcaggtaaaacgacactgtactcatgttctccccaagaccatgttccctgattgctagaaccgaggtgtataaatacagagattcttgctatataatattgctataacgtgctttagattcctatattcatctatcttttgccttcgatctaccgattatgaaatgtctattgatcgttaaaacgcatgcaaagagttttcgtaaacagtttttaccacgtttagtctaaatcattttaaactgagtgatctaaaaaatcacagtaagtgaatacaaaatcacatatatatgaaggacttttggtatgtttacataata

SEQ ID NO: 53118 - DNA, 803 bp, Arabidopsis thaliana landsberg
atcctgtcaccttctatgctgattcagcctgtgaaaacagctaccgttgctcagattctgtaagagttgtatctcctttattatgtttgagatttttttattttgttttgctactcgcttcttctgatcaactaagaacatgttaaacgctccatacttttcctttctgtttgatatattcatgactacaatgctttaccctccaagataatccacttttaatgtttgatgatgggaaactgtgattccatttaaccatacaatgaagctctttttaataatgttttatgcagggaaaatgtattttctgttaaggattattctgttcaatcaatgaaacttctttctgcttcacgatatctatggaaaagctcacaaccctatcaagaaatgcctggttctctattgtcaattgcacgttcccttttccaacaggtactgaaatcgtgataaatttgaatagtatattctgtttcgttgtccattgtgcacttttttattcttgattttaacctttgtagataatatatacgcaccaaaagtcatttgagtcagaaacgtttgtggcaattaagtctgtatttcatgcaattgagaaaaagcagaacaaggtatgattctaagttatattttctatttttcgttccctttttcttgtcaaaaatattggaatcttcttagtactttatgttctttgtgaaacatagctacatctccaagtttacgcatctcttatcctttatgcagatggatggaatacagaatcttatctcactgattggctcatcaagccataataaatt

SEQ ID NO: 53119 - DNA, 761 bp, Arabidopsis thaliana landsberg
actatttaacttatttcatttcaatttgataaaacattctagctaacgaggaatataattataccttctccatgacacatacaatgcacttagttatatttattgtagaaaattggggatattatatagtgatagatatatgaagattaatcacttcaaatgtgatgtatgcttatatatatctttaatgtttagttggaataataaaccatagtacagtgactacagtctaattaattagcaccatatgcatgcgtcttattgaaaaaaaaataaaaaattatacgataaactgaagtcaaaagaataaaataataaagcaaaatgctgaacatgtaaacgattaaatcactcacagattgactagaaagatgaactgtgagataaatgtcaaactgatcaggcgacaggtatagttgagagcataagagaaacttttagagccagtgtgtgtgtacacaaatatttgaaaaccctacaaaattatgacggtcgagatcttatcaattatataatcgatggagtgatgatcgttttggatctatataactattttacttttgtcgtattatttattgagtatattataaacatgcatggattataagtttcttttcttaaaatgttagtttttttttttttttttacaccattagggtggaacacaaattcgtgaaataaagagattatttcgaatcataatgcatgatatttgtgtatattaacacgttgttcgtttaatccatatgggaaagaaaaac

SEQ ID NO: 53120 - DNA, 580 bp, Arabidopsis thaliana landsberg
tacttttacttcagattcatcaatccacaaatcagaaactgttttgttcggtgttgactcgactaatgaagagcttgcagcaatagttcagacaagaaacacaactacaataatactcccaagtggagttcacacattgcctaaagacggtaacaattctcctctcccgttgattaaccggtggaaaaccggtggagaatgtgactgcggtggttgggacatcggttgcaaactccgtgtcctgtcttataatcatacaaagactcaaactttgtcaagctttcaattgtttgatcaggtaaactaacttgttcacttcaagcagctttcgggtatcgatggtttgagtcatttttcaacaatttgatttgattctcacaggaaagagacgagccagctttcaaaatggtgagccacggcgatgaactccactctgttgagtttggctcatcgatctctctcttggaagcgttctttatttcgttagcagtaactagtcatcagagttggtgtcaggaggaagaagaagaagaagtggttgtgatcggagattgtctgtaaagagagaacaccggcgaag

SEQ ID NO: 53121 - DNA, 1068 bp, Arabidopsis thaliana landsberg
ttgaacacgagccgaagtttaacacaactctgatatactaccggtttcattttttggtttgatagtccggtctgttttctatcggctctttgtatttaaaaaacgcattccaaaaatatattacaaccatgtatttctctcttgttataataataataaaaaaaacgtaataaaattctttaaaagttaataaaatatatatatacaccatcgcctatgggacgatgaggaaattcacgagtgtacatgttcatgcttatggaccatccttgtatatatatgtaaagtacaagtttacacaaacaataaaatacatgatctacttaatcatttataaataaccatgaagttatcacacaggtgaggctgagagcagaaactcaggctgctttctctgcaagagaactccacagaagaggcagaacggtttcgaggcaactttgctaaaggaagattttggaagtgatttgagatcactcgggaacgaaggcaatgcaaaaaaggtctctggagcgggttctaaagtcattcggttgcagcatttgcagaaccataaaggagttggtggacatacttgcattgagacacaacacctctcaagcttgtggctttgatcacatctctctttgtctttgctcttcttctttttttggtgcgaagattcgcaaaaggcttcctctggtgagtggaaattgactggcgctgcacaataaggacatttctcttcctctaatgcagtttttgtgctattacttgatctgtgatgaattaaagacacagaacatatgaatttgaaaacattctagtatctattaccaagggaagaagaaaaaggtatgtgagaaaaattacctcgctagactagatttcacttctaaggaaagtgtttccagttgactatggacaatatcacgatttatctcaacccattgttgcaactgagccaatccagctggacgccaattccaagagggaggcgccacaccaccctgagatgactcagcgagtaaataagcaaagaaactgagaccaaccagtctttctcggagttctcgttctctgtcttaa

SEQ ID NO: 53122 - DNA, 819 bp, Arabidopsis thaliana landsberg
ttcgtttttttttcaaatgtaaacgcaaacaaaatcatcaaaaccgaaaaattaagcaataatacatctttataattccttaaacggaaagtttccaatatttgatgcaaaactgagttacgaccaaccataaagaagccacaagctttagtgtgactactgagaaagtacatgctcgtgaaaaggcacacacttcctttatctcttagtttgtctctgactatttccactaagaaatttggtgtaaccacagtaagaagaatcgttgcactcggaagctctagcgagtctgcaaaaagacaccaattgatttggggtgtgcaaaacattaataattaaatgtaagtaaaaaaaagaaaacaaatcaaagtagttaaaaccaaattgaaccaaagtttgtttataaaaccacttaatttcatataaaaaaaaacacaaacaaacaaatcaaacaatttttgaaaaaaaatattatttcaaaaatatacgtattaaaatttaaaaggggatataatcaaattaaatgattgtaatcttaaaatagttttaattcttttttatcaatatctgaaccgatagcaaacatatatacaagttacagttggttgtttatgatttcagttttaaccccaaagaaaccaaaaactaagacatttaaagttttaaactgtaaaagtgtgggcacaaggcaaagtagccgctattttagggatctttgttacttgacttgctctgtacccctaatttcaagtgcttgctaaaaaatgattacatacgagttacttggcttgttgtattacttgcgagttacttgctgag

SEQ ID NO: 53123 - DNA, 683 bp, Arabidopsis thaliana landsberg
  unsure (1)..(683): unsure at all n locations
ggacattgatgaggatgcttgcatggctgtaatatcgaattgattgcacattgagaagaaacgcgactaggaaacacacgaggattgcgaagaacttgagcgagaaggctcggtcgcttttgtctccaaacacaaaccagacagatcgctctcctgttgcgcttgtcattagtaccgcgattagtgaacacaacattatcgcggttgatgctaatagagttgatgccattatgttgttccttagcgtttgaaccgctaaaacgccgtttttggatgagtcctgtttacaatagttgttaacggaacataagttagtacaagaaatctcaaatccaacaaaaagtgaaaaaaattggtggaggaaataatgtaattataaacatttttttcaaaaaaaagtttcccagaaatgcaaagcatcttttgagtgttgttagctttcacacttgcggattcatttagtaaggaaatgttcaaaatcttgcattaacgtaaagaactttaacataattatgttcacatagaaaagaanaaatctgagcaaaagaagaaagaaaaacaacttgatactgtttaacttttcatgttagtatcaatttaagaggtgcatgcatgatgattatacttagaattatactcatatatatatatatatatatatatatatatgtatatatataaac

SEQ ID NO: 53124 - DNA, 830 bp, Arabidopsis thaliana landsberg
agaaagagaacaaaacatgaagctttattctgtttccataagcatcttcgtcttaattgctctctccaccatagttaatgctcaaccagctgctagagattcctgcaattcaactctacctctcaacgacctcaccttcaacaccagcctccttcaatgcaccgaagcttggactccccaaaatttcatcctccgagtaagtcaattttcctaattttcaaatttccaactctgaaaatattgaaaccgaatttctaataatattcacgcgtagtatgcaagaacggcagagaacacatggagctttatcttatcggctccggattcaagcgctttcatcgggatcggattctctaccaacggtcagatgatcggaagcagcgcgatcgttggttggataccttccgacggcggttccgggactgtgaaaccgtacttgctcggtgggaaatctcccggagaggttaatcctgaccaaggagatctaacgatcgtcaacggctcgttgaagatcgaatcagtgtcgtcgcgtctttacatgagatttcaattgacggcgacgctgccgcggcagagtcttctttacgctgtgggacctgccggattcttcccatcttcgccggattttaggttgagagagcaccgcttcgtgaccaccacgaccatcaattataatacaggtaagcaaaacccagcttgactaattatttaaagtcaatcttgaattaatccattatttgactgcttcatcattttatatctccactagtttggtaagcaaaccaacaacataatatttttctaagttaattcaaaacaaattaaggaca

SEQ ID NO: 53125 - DNA, 804 bp, Arabidopsis thaliana landsberg
gggaacaggcagatcaacggagcttcttcttctgcttcctcttgtgatgctgagaatgcaaagagtggtattttcaagaagctgaggtctcttacccgagagaccttagaattcatcatcgcggaggaagagaagaagggtgttcccgtcacccaggcggatctcgtcagctcggcaaagcagcttacatgcaaggcaaacatgtagatgctctccaggtatctttctcatctatctaacttttgtattcatcgctctctttcttttctagttagagatcattgtgttaggatttatgaaagtttgtttttttggttgttgttagatctttatgtggatgcatagaaaggagatgagtttctctacctctgaggttgcactctttgtggatatcattggtaacactatcggcatagctgctgctcactcctacttgaagaaagtagacccaaactgcgaccaaatgcacaatcgtaccgagaattggcctgctttcgtgtctctcgtgaagttggagactaagctgttaaaggaaaacgggatagttcacgctactcgccctcccaagtgaatgattaactattaatttggtctgtgtctgtgtctgtgtgtgcgcgctttcttatgtactctttgtcttctcttttcatttcatctattgtcgaataccttttcatgttataagcctctgaatttattatggatcctttcttaactgggtgaccttctcatgtgttgctttgaaataacaataagcctttgaattatgtatatcactctttactggaataatccagcagaata

SEQ ID NO: 53126 - DNA, 967 bp, Arabidopsis thaliana landsberg
ttttctttctcccctatatctatttatttagttgctgttttttgggtacgtcgtccttactttgcccctctttatctccaatctctgcatcattcctcattattaatttcatctttacatctctccccctctctctctttctctttgtttatgcatcctgcttgaactcaattccaaccagaaaccatatttcttttagttgtgtccttcacccttggagagttgaaaaaaaggaggatgtttgacttgcaattcaaggcacgttccagaggctaaactacgtgaacttcaggtgatctaatcgtttctttgtttccccttcttgaatattttttggtttaccaaagtgaacgagtcatatatggataatattacatagtagtgtataattgcccggaaattaggattaagtaagctaattacacattgttatggttgccaaattccgggtggagaacatgtgcgcaagcagattagcgagaaaagcttacatattttatgagtgagtcatttataatcaattgatattaatgcgcatactgcgaccgatttaggctctaggaaatatgattactatctgataaatttatcaaaatgctaatctttggtattaattgcacacatagattaatggcgttaaactggtgtgacaaagaagattagtgtttaatgttttcctacatatatatgcgattcaccataatatttataaggtaagtaaaagtactatcaatctgataaactttttccaagcctttgagtgagcacctttttagtttacacttgataagtcttcttggattactcataacaaaaacaaacaaaaatattggattagaaaaccatgatgatctagatggtcttgcgtgagaaaacatactaattaattaggttctacgatcatatctatctagatgatcaacatttattaactctaggaaaggttttattgggagattttttgagt

SEQ ID NO: 53127 - DNA, 919 bp, Arabidopsis thaliana landsberg
  unsure (1)..(919): unsure at all n locations
tatattcacatcatcttgtatctttttcttgttctttgtttagcgatcttttttctctcatcgttgtgttgttgtggttgaatgttttcttttgtgtacgtagtaactctctttgtttctcgattttgttttttttggattcggtttggtactagttttgccagatttcaataataccaagatatagaggaaaacaataaaactaagctttattccacattgtctggtgatctttcataaacaacattgtatgatttgattaccaaaataatcggttctagaaaagtttatgtcaatctctatctagtatatgaatcaccatacccatatttgtgcactttaattattacgtaaccaagatatagaaaagtgttgtgatttcatataacaaatgaaaatataataatctattttgctgcgttttgtatatataattattataaattaaattaattattaatattgaaatattcatgtataacccagtcagatatgggattatttttaatttaaattttgtataatactgttaaaagattcgaaatataatcataaacaaaaaataaaattgattttttcttgtcagcttccaataaacaccatagtaaacaagaaatcacaggacaagggaaatacnnnnnnnnnnnnnnnnnnnnnnnnnnnnnnnnctaggattcggacaaaatcatgtccaaacactttgaaggatgatcgatacaaaaaattgtaaacttgaatatgaagtgttggtgtgagaatacccagctcgaataatattgattttttcttctcaacgacaacaattatgcatccagtgatgaacactttttgaaaacgtgtttcaatccatagtttctacattgatgattcctatattactaaaacttaatagagatatgttaaaattctcaggataaac

SEQ ID NO: 53128 - DNA, 1039 bp, Arabidopsis thaliana landsberg
tatattttatgggtgatggcaagatattattctaagatcaatattattcctcacatatgaaaattctaaacgatgaatttcttttttattagtgtgtcaaaagtacaaatttagtggacgattgaattgattctcttccaaatattgatgacattagtaacttagttaaattaagagggaaaaaatatcatgacaacgagcatattacctatttgtaatgactccgtttaataaatcaaattgttttgttgaaaaaaaaaaaccctctttgtttcacaagaattcaattttctaattccacaacgaaaactcatcacatcaaaaaaaatgtcattccaattttatcaccatgtatatacgaaatcaaacatatatgctggttttggaaagttagtacgaaaaaggtatcatctaacgtaagtgaattatgctggttgtatttatcaaatttattatttacgttttttttcatgttactttttggagccataaatatatgtggatttcaaagtggaaaatgcgttgttactcgaatgtttcaaaggtaaatgatgcttttaacaaaatagattttttttttaaaaggggaaacaaaatgaatctttccagtgactttgagcaaagacaggtttttttttcttctaattgccctacaaaatctgttcaaagactactaatcactcactccactcatataaatatgatattagcaaaaacgagttaatttaaatagtatacatgcataattgacaaaaaccattaacattgctgaattcttcttcttcttaaattttgtcggttctatcgtctttatatattctttgcccatatgtaaatataataaacaagtagtcgttggttaaactccgttaaatattcagatattgtctaatattttttggaactattaagtcttaatgaaaacagtgtataatatttcgacaaacattaaaatccattaaaaaaaaaactctataaatgattggttacatttttttggtatatataaatgctgtagaagagtccatgtatttaggat

SEQ ID NO: 53129 - DNA, 1078 bp, Arabidopsis thaliana landsberg
tctaaatatggggcacactaatctgaattcatctgtgttaagtggaggaaacttgattccatttccaaaaccagattttttcataaaacgccatgcgcggtccttgtgtagttgtctcgtccaccaagaaaatatggggctctagtgtcacaaaaatcacacgctcgtcgcgtgagggagttaggcttttgaaatcctttagcggcgccgatataaatagatgacattacacacacagcttcccagatacgacaacaacatcgattgtctcgtcaatttggtcatcatcatcatcagatgatggagaatctactggcgaattgtgtccagaaaaaccttaaccattttatgttcaccaatgctatcttcctttgcgaacgtcttctcgcccaatttccatctgaggtatctcgatttcgattcttctatattcaactccatttcgattttcaaatcttagcttcgtctctttcgatcacatcatttttaagatgtggagtgactttttttcgttttctcagtttttgttgctcttgtggtctgatccgatcttctagtcgtagctgtcttttgttgtgtaactttttgagttgtttgcgaatagacaattctcgatttatgcggagttcaattctgggctttgttttaaggatcaaactctatttcgattttgtcggaatcgagaggatgcaattcaattcgactgaaatgtttatgattttgagttgattttgtgattttattccaaacctggaatttctaggttgagatttctgtttgatgtatgccaatgtcaattcagattgataccgttactcgaatttcacatcccttgatatatttttttggttatgtgaatctggtggtgatcaactacttcattatgcaggtgaacctgcaattgttagccaggtgttacttgagtaacagtcaagcttatagtgcatattatatccttaaaggtactctacattcttcggtactggtgctatatgtgaacacttcatatattgttttatttgtgtttgaaaaactaaccttgtttacattgtgaatgaaggtccaaaaccctcatctc

SEQ ID NO: 53130 - DNA, 717 bp, Arabidopsis thaliana landsberg
gcttacctagctttatcttcaggtttgacggtatttaggtacccttgccagttcgaaacgattacagtctgcacaaagagaagaaattagcaaaaaaaaattaaatcaaaacaaagaaagagattcagtttctggaaaaaaagattaagatgagagtaattactttgcatttctccgctaaggcagagagattcgccttgcttcctttcatcatcgcgctctatgctcgccaagtgttcgacgaaatgcctctttgatcgctactcaatgacagagacaatgttcggcgagcgaaggaagttaacggtatgtttaggaaacagctacaagggcccattagtgctgttaaaaatacccaatgatggctcagtagataaggcccattaatgaaaatcacagcttagtaatattgatgacatgttgacctaaagaaaattcaacatgatcatattgtgataataaatatccactgaatgtcatctaaccgcgtacgggatttttttttttttttttttttttttcatgtcgactccctaattccattgatattttattaaaagtttattttataataactagtaaatttcaaatttttgttctatgatttttctggttgatataatcagctttttattatatcgaaacgatcgaccaaccgggactaattatatgtcttttttaaatgaattaattggtgttttattagtgtgctatcaa

SEQ ID NO: 53131 - DNA, 982 bp, Arabidopsis thaliana landsberg
gttgcttctgcattgccgattgcatttcttcagatttcttctgcattgtaagagtaaagaaaacaaagtaaaaacactgatttcaaaacctccgaaaaaagtttcaagcaaaaacaaaacccaaacaatattcatatacaaagattcttagactcaaagaagttacatcaagattcaataatgagctaggaacagagacaatctcgcctcttcttcataattgtgtctatggaatctaaaaccctttttcactacttcaacaaatttgggggaaaatctaagccctaccaatttgacactagcaattcccaaatacaatgaaattgcaaaaaatgtacctccaaatcacggggtctagagagatcaaccgcacgaggttgagattccgcggcggtgcaatctcgaggcgactcgaaaagcgagagagaaagctgcttatcagcgacaccgacatcaaagtgaattaacccaaagctctgcggatcaacatgtattcctttcacagcaaaccaaagaaacagctccttctgcgtcacaccagataaattcccgatccgtccatcggagagaacgccggagatattgtagtcgaagtggaactgattctcgaatttagcatcgcaaggaacaggtagagcgacggtgaaacgccccgttttgatgtcgatcgagaaattggtaactccttttggaactattccggccggcagattgctttcccggagataatcgtaaaacgacggatccggtagcgaggaaagctgaaggaagagaatggaggagaagagaacgatgatgaggaagaagagatcttgactagaacccattgaataaaaacagaaattgtcaaagcaagagaaagtgcgaaagcgttttcgattgctatgaggaagaagaaaaaaggcggttggagttgcctctgttaacaaacaatccgtttctttctcagagatttattaaaatgttcattaactatcataca

SEQ ID NO: 53132 - DNA, 855 bp, Arabidopsis thaliana landsberg
gctatgtatttgtgaagtaagtgtgtatttctggttgaattatagtctgcgtaataaagaaaagtatgtgtagtaaaaataaataactgtggccagtaaaataatgcatcattgtcactgtattgccagaatatatatattactttttaaggttgtaaagaatgtaagattatatatttttaatggctaatttgaagttggatattaatttgttttttatataaatttcttagtcagaaaccagaaatttctcacgtattatgtagagccatttttattgaaataaagcggaactcaactaaaagtgtacttgaaatttgtaaatatccaagaaaatgtttggaaataaatcattttataaaatatttttattggtcgtagactcgtaatgaaattatcccaaaaaacattataaacaaatttcaataggacaacacaactaaagagattaaccaatttaacagacatgtacaaattatcttcgtttctgttaactcacaagtcacaacatctaaaaaaagctttctttcaaaaaaaaaaggaaaacatttcctgaaacagagctttctctttcgtttttcaaattttttgcttccaaattacattttttccaatattccgtttgtgtttgcgattgttcggcgccgtagaaaagcgttcggagcttttctgcatggcggtttgtctccggcgaagatcaagctctgcaaatttcgccgttcccacaaaaatcattcgaacggaagctttattcggtgtttccgcgagatgagaaacgcaagttgatggggagattgagattagcgtttttggcgatctctctcgttgttttcgtttgtgtttccgaggagattc

SEQ ID NO: 53133 - DNA, 955 bp, Arabidopsis thaliana landsberg
caagaaaaacattcttttacatattttttcggttgaaccggattgggcagcttaagggactaacgtatgggtggttaagcaagctgaggaaatgtgtctccatttcgtgatttcttcttccctcgcggggatttagtcttctctcttccagcagaaaccagaagaactgttcctcgtttactacgatccctaaccggacgcgaaatttcaaggttcgtcctcctcttaacttctcatcagttaatgtctcttttaagttgaatttgactagtatgattccaatttcagatgatagttaggggattttatctctcggatcgatcgttttgggttacaagaactaagatagaatcaaatgtttttgtttctccattagttaattagtctaagagatatagaacaaaaagtttcgcttctttcttgttatcttttgatgcacagaaaggtcatgaaacctagaactagggggagtgatcaatggtatttgtagccaaaactaaaaaaaaagttttggtcctttcttcacccaatttctccaagtttccaactcatgaatacttgtagttttttataaaaaagaggaaaccttattggtgctcaagttatatgagtgatgattggattcactatcttactttccacttctattagtattgagataagtttagctacaactttgtcagttatcgttgaatctaatttgatttgtgaatattctttagtgttttttcatcacatggcctcctttgatgggccaaagttcaagatgactgatggctcctatgttcagactaagaccattgatgttggatcatcaacagatatctctccatacctttcacttataagagaagattctatcttgaatggaaaccgagcggtgatcttcgatgtgtactgggatgtggggtttcctgaaactgaaaccaaaaccaaaacgtcagggtggagtgtg

SEQ ID NO: 53134 - DNA, 213 bp, Arabidopsis thaliana landsberg
ggggatctcccgtatatctagatgactatcgatgtacctctacgattggtacaacagtaagccaagattctcgtgcacaatatttcgtgcatcagatcttctacgtgtccgaattacactacttctggaacttcgatagtcaattgactcataagctacaggaccgtccctcataatgctactgagtcgatagtgtcatcatgagtagcatct

SEQ ID NO: 53135 - DNA, 756 bp, Arabidopsis thaliana landsberg
tcgggtcaatgctggcgatgcgagtattggtggctccgaggatgaactggtgcgcggcgtggaacggctggatttcaagtatggcgtgctcgacgctagcggcaataccgagtttctttctgctgccgacatcgacaaaagcacagccacagattgctcatccagagtggctaatccgctggatgcaacggaccgtggctgcctttggcgcaacgtcaagagcatcgaggttgatctgctgatggacggccaggtgccgctatacacacttgccaccaatgatctggcttacacctatgaggccgacggcatcactactccacaaccgccagcgaaacatggcatcaagcccagcgatcagggttttgtcgaccaaatgcttcgccgcgaattcacggcgctggtttccgtgcgtaatttcaacccgtgatgcccgaggaattcgtcatgtccacggccgatcttcatctgaatatgtcttctggcaatcttttcagcgcgcgacgatcgctccagagttcaaaggggcagcgcggtgccgtgctgatcgtggcgctgatctttctgttgctgttgaccatgctggcgctcagcgccaccggacgctcgctgctgcaaatgcatatggcaggcagcctgcgcaatgcgcaactggcggaaatgagcgcgaacaacgccttgcgtgggggcgagtggcgtttatggaccagcaccagcaaagtgggcgggcgcctggattgtcagaatggccagctt

SEQ ID NO: 53136 - DNA, 504 bp, Arabidopsis thaliana landsberg
  unsure (1)..(504): unsure at all n locations
cttaaccaaagcttttgctaattacctaaattgttgcatccgctgatatttgtgaatttttttatctaatttatttatatttttcttataacgttgagcattcattttaattacttaaacctcgatccctttcgttataacaagtaagaaaaaaaacaatacaaaaacaacaaaactcttattgaacaaaaaaaagaactcataaatacaataaaacgctccaacattagtgcagaaatgttgacatgaactaggaatccaaaaagacatttataaatgcaacgacgcaaatttaaagaataaccaaagtacatgttaaataaaattctaagtcagcaacggaacaaagtcaaggctttgttaaagtgtgttgctttggctgcaaggtactcttcccatatcaaacgcctgtaaataggaggatggttcttgtcgctggtcaacggtccgatctgaagngtcttgggagggccagcgaaataagcggctgagacacgggtggtg

SEQ ID NO: 53137 - DNA, 914 bp, Arabidopsis thaliana landsberg
tttcgtcctactggacaataaatagaaaggagcacttctcttcaggtctgaagatttttaaatgcagtgatggatacaaggaaattatagaaaggcatatgttttgagatcagtcattagtttgaaaaagaaggtacccgatgagttcgtctggagaggagagtccaagtgcttttaagatggtacttgtaagcatcgtttgtgggccacgaccatcatgagctctaatcaccgccgttaaggcctgtgcagcaattccatagccactgtaaatagtcacatcatcattcacacaattatcggttaaggaatctcaatacatttcaagtgtatttccaacaactatataatgagaaagtctacagctacaatcataattttgactcatgcatctgtgaagccttatacgaggtaaaatcaaaactaatattcttctggcaagatggaaccggtgataaaacaaacctcactggatagaaagaatgcgaaagcagagacattgtgatgtgattttttcttgttaatcgtagaactgaaattgatatgaaccacaacatgggaagaaagataccttccccaatcacctaagattggtccaccaccagatgccctagcctccttgccatcttcatcaaagccataagctatacatcctgtaccagcgattagaacgcagccatggagctttcccatggttccactagctaaagccactatagcatcattctgaacatataccttgacatgactaggaaacatgtccctgcaaaacatttgggaagagggtaagctcgagatgatttacacctaaaattcctataacctaattcacaatggacatgactaccaccttatccaaatttctatctttttctggtctgagggatgattaacacctgaaacacctaagcata

SEQ ID NO: 53138 - DNA, 338 bp, Arabidopsis thaliana landsberg
gtgatttattttatgatgataccactatacaatgtataataactggagtaatgatatcagactagtggagacacatatatacatatagtctctaaaaaaataaaacacacaactggatcgagactgagagacaggggacaggattgtaagtgccaaatcaaatcaagaacatgattaataaagtagcaaagtgtggatgcggatcggacatgcatggtggattagtttggggggtgcatgtgtgtgtgtatatatatatgttatagtacatgatggcaacatgctgtaccgatcatctaaagaagaagcagtttagtaatgtgtgttggggaaggaga

SEQ ID NO: 53139 - DNA, 753 bp, Arabidopsis thaliana landsberg
ctatcagtaactttgggatggggtttattcaacatagggcaaggccaacaatcatacaatcttcatcctaattttgcttcactgtctccaaatcgattgatagaatcgtatgaagattagagacgaacctgaacatcgacgacagttccagcttctccaaaaatctgagagagctcagaagaagtgattgtgtaaggtaaattcccaacgtaaagcctcccttcttcaccactcgcttgcgtcgtctgtttttcttcctctacttcttcttcaccttcatctccttcttcttctacctcttcttcttcttctactgatgcctggatttcatcatcggcggaactagcttcggtttcggcggcgcagaagaagcggtggcggcggatatttgagtggaggattagtggattagggcaattggcaacgagtttgaaggattttggtgtaaagcgatagaagagttgggaattggagtgggaggagagtaatggattaaaggtagcggcggaggaagcggtggctgcggcggatacagccacggcggaggaacaataagctgacgacatttttctaaagaggtttgtgcctttgccgcgtggatgaggaagagagtggataagatatactgtatgttcttctcaacgatttttgttgaaagtttttcctacatttttataaaatgcatttaacttgaatttttttatgaatcttaccaaaaaaaatggaacgggatcctctagcctctagagtgca

SEQ ID NO: 53140 - DNA, 907 bp, Arabidopsis thaliana landsberg
ctctcatttctgtaaacgtagaaagaacatcttgataccgcttcttccctgatataacagtccctctaagcaacgcattccaagagtaaacatttgagctagtactttcatcgaacaccttctgtgcatctttaaccgaaccacaagcagtatacatatgaacaagcttggtccttagaaactcattactctccaacccattaatacgtatatgaacatggacttgtttaccgtgaagcaacgacttccggcgaacacacgcctctaaaagagcagagaaagttgtcgcatttacaggaatccctctctgttcgagataatcaagaatcgtgagagcgacttcgagattgttctgcctcgcaaaaatttgaatatctctgtggataatgtaggggttcttggagtggagaggaagagaagaagggaaagcatctctttccctaaaaggtttcggctttttggcgggagaagtggaaggtcgtctagttctgcttggtctaatcggagatttcgccggagcgccatctttatcggaacgatgaggacggtggttgagactcgtcgtcacggagagggacgccgggaggtctcggattccgagagacgacactacttccattgtgaccactaaccacttgattaagccaaaggtcgttagtaatttatatgtagctttaaactatttttataaagtatacaattgaaattgaaagctaatatttgggccagaaaattgaaatatgggcttagggcccccaaaacaattgtagcccatcagttcacatacggtttcgttttttaaaaaagcatgtatttagaatttattggcttttattttggtggttgcttcaatcttcctcgtttaaaaacaattcatgtcaacttggaccagttacaaaaaaacgtt

SEQ ID NO: 53141 - DNA, 653 bp, Arabidopsis thaliana landsberg
cagcatgagactaggataaggccagtcgcaagaggtgccgaaagcttaagagtctaaaataaaacacacagaaaaagtttgtattagttggctgctcaacaattaatgttaaccaaatgtagtgtttccaaatgcacatagcatatgtccatatcaatcctctctacaagagaaatccctcaaggagtaagtgagtatgccaggaattgtttctacagtaactagaaagcaaatatttgattcaaacgtttcaagaaaaagtgatgtttggacatgcaacgactcttggatctaagttaatcaaagaaagaatattccaatcaacatttgatttggctaaagcgtatacagcccatagaagtaaaaacggacgaagagaaccaatatcttaaacaaaatagaatattgcataagcatccatttcagagaagcaaatagaagtaaatgtgatagacattagtggaaacataccattgcaatgagaaaacctagaattggcttgatcatatattgagcaagaaaaccaacacccacctgtaggagaaagactctaaacgttaaacaggtactgtatctaacagatagaaaaaacacaccagtgttcattggctctcaccgtccatggattacgtaaacatcctctgaaatcttca

SEQ ID NO: 53142 - DNA, 660 bp, Arabidopsis thaliana landsberg
tttcaaatcagaattacctcaaaagttgaagagatttatttggtaaaggaattaactacggaaaaaacaacgccctctttctgttgatgcatgggtctgctcttttccaatcttatctcccaaaattaaacaagtccaagagttttctatatcgaacaattgacatatcgagggagagtgagaaagagagatcttcttacatcactattattgagtaactttaatgtaataaattaattcatatcaagtagatcatgatatgttgaataaacgttactatcaatataatatttactaaactggacttttatggatttagaggtacatgtgactgactgcaatatatatataagtagaaataattagttttgagtattgcatagtgtgtgatgtgacttactactaaacatcctacaaaaatgatattaattgaattattttaggaacaatttaggtaatgatttagatatatacattcgaataaaaaaagaaaagatgccgaattgttctattaacgtcgcttcagtccacgaaacctggttattcaaaaacattaagggtcacaagattgagcacatagattagtcactcattatcatcttagttattattcatgagctaagtgattttacttcattttaactccctcgctgctccaga

SEQ ID NO: 53143 - DNA, 1008 bp, Arabidopsis thaliana landsberg
ccagaggatcccctgcatgccttttttaaatatatcatgttattttagacaaatacataaaaactttataactacaaccaccgatattttataaaaacaagaaaatttaaggatattttaatattttatccaccctataaaaggttatttatctaagttttctgatacaaggctattttctcaattgttttcaattccatgattactctctaatattactcatatatatactgctgacaaaaaagaatagatacaaatacttatggttatattagaaaaaaatgtcaaaattaatatacaagcccggcagacaaaaacaccgaagattcacctataagttaggacaacggctcaatgaaaaatgatagttgtttcttctatgatgtcatcgttcatgaatctaacaataataatataaactacgacatttgtttttcaacaatgcatactctacatctttaattccaaactatgacatttttgtatttaatactttttgtatttctgatgaagcatttttgttttgtagttccacatgtcataaagtcataaagagaaaaatagtcgtgtgttgaaaatgagacgatgacggtgaagatagttgaaaaatctcagctaacagcacatcccactcaattatatatatattgttgattaccaattagtttgtttattcagtttatgtttatgtgttacgttcttacacttctccctgatgtctttgtgttcttacatatttttctgtttcatctagaaatttttattaccgttcgatggtgaagttgacaaagagaataggagggcttgtgctgcgattggcagcgtttggtgcggctcttgccgcattgatcgttatgatcactagccgcgagagagcttccttcttagccatcttccttgaagctaagtacaccgatatggcagcgtttaagtatgtacaaaatttcttcttattttcttggtgagtcattggctgtaaattatacatctatgagttatgtgaatatg

SEQ ID NO: 53144 - DNA, 1083 bp, Arabidopsis thaliana landsberg
ctccagcactttcttcgactttggaattccggaagatttcatcttagatgactttatgttttaattttcaacatttgcatacacatgtcttgctttcacacatatgattctttgttgcattctttcttttgtttgatgtataaatttcttgtttttattctctcaaaagatattaagttattagtctataaaattttcatgaatgtttatgtattatctgcttaggcgagatatctaaattctgctccattagtccatatacacagttgacggaagcaaacatagaatcattagcgtcaaacacatcacatattcatattgctttgttcgaattatcgtcaatcaagttaatcagtttatgcgagttctatcatttaggcccaattcaaggcccaattcaagttcattttaaagccgttaatttggccaatttaaggcctatattccggaagcttgtagaactattttctaaaaaccaaatcgataatattagttaaacttggtctatataaaatgatattttcacttttcaattccaagcaagagataagtgtggaacagttaaatctaagtcttatatagataatttgaatttgagggatgaaggcattttgactaattggtatgggcaggtaagtaagcaacacaaagaacgtgtgaaaatgctttaatcggtggaatttggaacttaaagaggaagattaggaaatgcattagtgaaagtggggacgactccttttttctcgccttttggagttttcacctttttccctgacggaccgtttccctaggctggcctccggctcatattcatatacccgtttgaaataagaggtttatttctttttatttttggatttgtcaatgctcataaagcgtatcaatgatttaatatatgattggagagagtttttgtgtgtttgacctttagatatcgatccttttctttctgtgactatgctccattcgcatcttataccacctcgataagggctcgttatgtttcttcaccattcatatctctttttattttctctaactcctatcttttaatttttctttctcacatatttttgtagcgtt

SEQ ID NO: 53145 - DNA, 484 bp, Arabidopsis thaliana landsberg
  unsure (1)..(484): unsure at all n locations
ccagacgcttcccttgtctggcttccttcgtcgtccgctcgttgtaggtataacttcaatatcgactttcgtattgcctaggattttgtttcttacgagatttgctacaagagcgtttttctttttgttaaaaggcaataaagaccctaaaacnagtttgttcttgagggatcgttgttcttcttttgttaaaggaaggaaagaagggtttttttttcttttctttccccccaccaatttaaccccccccctttttttttaaaaaacaaaagtgttttttttttttttttaaaaaaacggggggggagaaaaaggctttttttttttggggcccccccccccccccctttaataaataaaaaatatttttcccggcggtgggaacccccagaatttttttttttggggaaacccaaattttgttgtggtgggcccgcgcgccccccccccaaaaattaaattttttttttttaaaaaaaaaaaa

SEQ ID NO: 53146 - DNA, 599 bp, Arabidopsis thaliana landsberg
atttcggcgatgtgtatttaattttgttaatctctatgcatttttgttttcataactaacttatttggtttggggggggagtttcaaacaagtaaaagaataaacttaaaaggagaaaataggtggaatcatatatttagaaggatcgtcttactaattagaatcatatactagtagttagtggatgtggtataacctatatggctatatcaatcaaattgtttttcgtagttatccaaaataattacagaaataagacgaattctcgtagttatccaataatttatttaatgttttcatataaaatctgaagcctagaaatgcaaattatgaaattatgtatggtttacatgtataattgtttatagtggtctcatatgttaaaaaaataattttttttaatcgagaatgtagtgtggattacacgaaatcggtcgatgtttttcaaatgccgcaggaaattatatttctatgataagaaaatgtttatgatcactaatattagtagacacagcaatatgtaataaataatattaaaatagagagaataattaaataaaaaagccgacagcactaaaaaaaggttattcttatctttt

SEQ ID NO: 53147 - DNA, 1577 bp, Arabidopsis thaliana landsberg
acattctttctctgtcttcttttagttaaaaagaaagtagactattttttaacagattaaatgctagctatatccaggtggcattatttatattcgttcacacagaaatggaaatggtgtagtggaatttatgatgaagattcggccatgttgaattatacatgcctagttttctggagtatgagaacgacaatatcatgttgcaaacactttatattttgatcagggaatttttgaatctgcattgattattggagttactcagtttgtttctctaaccttctgctcaaagctgaatcgtacgtatacatttacaaagttagagccaaacattacgtcaaaaactggttagcataaaagctagtgtgaacagataattttgtactctcggattagtgatctactaatgcaaatatgtagtgattcatttttcagttagtggtcgcaataattctccctcatgagttatgattcagagattcatatataatagtagtataatactgctcctatgagccaccaaagctattaccctttgatgccattctttttgttgacaggaatcaaattctcccgctttatagaagaccttttattcttacacattcttcattatttgaattaatttctttaatatttcttacattttctcattttgttcgatcatacgatggatattaaactaagatagaattgttatagaccacaatagctggtatatatggatcggattcttcatactttctatgctacaagtacgtctgtatgcgtctttatgtacgtattcatgtatacgtgcacgcatgcgtatggccccaaccattaaaccctttgggatcgatacataaattttgcatccgccaaataagctgtgtttagatatgaattcacaattcagataaagatggggaaaaactttatatcctttactactttgggttaaaaaacttaaagcgagttggatctaactgtattatccaaaataaacgagaattgtcttcttgaggttaattagctattatataacgtcatgttgtgccattgtgccaaactcagtcataattttatttttctctcaatcataagttctctctggtcaactctgcttcggtattgagtataattaatcaaaagccaaatagaaaacagtatggtacaagactcaaatctcaaaagagacaaaaatctatatgcatgccatagtgatttttgaaagaaatggaagagaaaaaaaaatgagaggggaaaagctagaggagagcgatgacccattaagattaaatggactaacaaacgaaacgatcatcaatgtgtaagtgtccctacgaggaccgcacccacttaattccccaaattcaatacctattgaccctcttttcttataatgacccacttataattattatcgtatattgttgtatattgtcgttacaagattgtgaaatgttttatattttctatacacgacgaataacctggtcaagctatatatcgagattcaagtaagtatatataatcgcatgcctggttaaatcagtcctccatttcgagagacaatatgattatactttaaaaaa

SEQ ID NO: 53148 - DNA, 1325 bp, Arabidopsis thaliana landsberg
tttccgcaattggactcagctgttgatggtctgtatatggactataaatgccgatgggtgatgctttagtaatagacctatttattaatctcgtcagttaaatgacggcatatcaaatgcacataattgtgaagttaaactaattgttttgattatgctttaagttcttagtagactttatcatttgcgcacacttatattttaaatgattgctgtaattatctaaaataattaaaagctatagtttattcaatattcacataaaaatacattatcactcgatcgaaaatgtagttgattactttataaatagattcattgtcctatcatgaattacagtactgagcggcaataataaagaaacgtgaaaatccgattgctaccatctaattaatcttttattgttccactaaccgaactttcgatgatgtcaagtggatatcgccttatcgggtaacacttacggctctatatatatcctcatttagatgaccacatcattatcttacgagattagtcaactaagtatgtaacatttcgttggtgatgtatttaggaacattcgtttggttaaagaaaagtaaatcctcgaatcataaaaacgctatatctaatttgtaaagcaaataatttcttaaaagcgagtgtttatctgcatagatatattttaagattaattaatatccatcacgattatcgttaggagatatatacagtatgataatgttttaaaataagaatctatgtttggtgccacatagaacgcgcgctttcggttagagattaactaatataattttacttaactttaattagaatgacttaagatcgctcatgggccatggctgcgccatcttaatcccccactaccaacgacacgccacgtcatatatcacattatttattcattctttaaaaaccggccggttcaggtattatttggccgacaccgttggaattaggaactgaaacaaaattaactagtcataaaaatattgttacgcattgcttaatattctgtcatgtagatatacaatcataattatgaatatccgaatgttttgattgtttgtgtggacatatcgatatatgcaagaacttgtgacaaaatttcaagaaattgtggttactctcactctctcagctttggtagttagctatatacatagtagtattagagatatatttatgtcggggaaaaaatgtttgaagtgcgtggataatgtcgtgcttagttccattccaacaactaccaaagtttgttgctaatataacattcatttaacggttgcaattacaagtattttttttttatatgagtgttc

SEQ ID NO: 53149 - DNA, 619 bp, Arabidopsis thaliana landsberg
tgatcaactaagtgtcgaaaaaggaataacctagggtattgagaatatggaatcgagccttgagcaccccaaatgctctctttacacccttcagtgtgccctcttggtatgtagcaaacatctactgatttagaatatatggaagatgaatggtcttcacaaacaacaaacaccgagggtagatgtcatcggcgaggtagtacccttggttgcactcatgaccattcaccataaattttacatttggtgcttcacgcttgagctggtcagtgaacaacggtgactcattaagcatgttcacgtcgttgttcgactctgtcaccccaaaaaagtatgtcaaatctacaagtcatgtgaggcaatttttttatcatagctggggatccaatgtcccctattgtaaattatcctcttcatcaaatgggacaattcctctacttccaatgcatgcaatatatactccttatcataccagaaaaccttatttctcctccttagctaatagttgtctgagatcatcaacaatgggactacgactatactccatgtcgaaacatgaagtacatctctgcagaatagtttgtgacattataaggtaatttttttcattattttgatg

SEQ ID NO: 53150 - DNA, 842 bp, Arabidopsis thaliana landsberg
caaagaaaaaatgaacccacttcatttattaatttcgtaaggaaaataatgctgttgaacttgggtttatcgtaaattggctaccaccaccgacagcaatgacaaatgaagtggtatatagtacagtagcatcctgaactattactgtcttttgatgacacttttcgtggaaatagattttcttttgtgataacattcacgtgaaaccaaaaaattaaagttctatacattttctttgtcttgtacattttctctacaaggcctgcaacgtcatttattctcataaagttgattggtgtaaatttgagagatttaaaaagcctactttagaaaattcatatgcacaaggggatcgattttttacccttcaaaaagtggattctgtagtaaataaaacaatgttgatattctaatgccgtttaaacgtgatctattagaatattctagtattacgggttttcacatttttgatagaacaacaagaaatggacatgacaattgtctatgaattcgtgttaataattgctaggtttgactagtattttacaggtaaaagttaaaacctacgcaaaatttggagttacgaatgagcccatttaagaaacctgacgttggccaaaaagaaaagctgaagaggaaacaaaaaaaaaaagaaaaggtttgggagagagaatgaaccaatcagagcgaatgggaaaaagagcaattcttacgggtcctacctccattgactaattattttttgtttcggctcaaagattaattatattcttttaacgttattggtctttttatatttttattataatattttttgctttattttttaattgtaaaaaatg

SEQ ID NO: 53151 - DNA, 568 bp, Arabidopsis thaliana landsberg
gtttatattgaaaagattgttgatgagaacaaaaaccttaaactgtggcaagattgtgctattttgctgcaagttcagattcgaactagtaggaccttcacgagattgaattgtgttatttgatgaagctacctccattactcctgcaacaccttcgagagggccagttgtggatgtggaagctggtggtgtctccttttgagagagctccttgaacatatgactcctcaatagtaatgttaattcaacaagtgcttcccgagcagctctgatctcgccagtaatctacatcgacattcacataagaattctcttttgagaccagaagttgtttagaaaatgctcaactcctcaaaaatagacaaacatacctgtataacaacatcattgatagaagcacatcggggaatttcttccctagctagaatttgtacgcttgttccagttaatcgtgatatctcagatactgatcctgctttcccttccaaacatatagagtctctagatgggacaagtaatcttgttgttattaaattatctttatccgaataagatctatgatctgagt

SEQ ID NO: 53152 - DNA, 620 bp, Arabidopsis thaliana landsberg
  unsure (1)..(620): unsure at all n locations
gaaagcgcaacacgaacgcaaagagcaaatgaccattgggggaaatttcaatagaagaagaaacacatgtatcatgctcacatgggtttcatattcacccaaaatcctccaaagtagaagaaacatgttgccactgtatatagtaaggcttattggcaaaacctgaccttacctaacatatgttttgaaaatttcaacaaaaaactattatttgtttagaatcattcaagcaatatgttttgtaaacgaccggttatgattttatgaatgcgtcaatggtggcacctagaacnnnnnnnnnnnnnnnnnnnnnnnnnnnnnnnnnnnnnnnnnnnnnnnnnnnnnnnnnnnnnnnnnnnnnnnnnnnnnnnnnnnnnnnnnnnnnnnnnnnnnnnnnnnnnnnnnnnnnnnnnnnnnnnnnnnnnnnnnnnnnnnnnnnnnnnnnnnnnnnnnnnnnnnnntgggccatgttttaacacctctacttttgatatttagtctctgatccctctatcttttatttatttatgcttggtcaaccctgtctttggttttcttacattcatacccattatcttttatgttgatcttggggagtttatgtagtagggtttaaatta

SEQ ID NO: 53153 - DNA, 810 bp, Arabidopsis thaliana landsberg
  unsure (1)..(810): unsure at all n locations
cccaagcagcaccaacacctaaggaaaagttaatctaactccatcaaaatcaaagagtaacaaacgttgaatatataatgtttttccaatattagtgatttaccggtggagactccgcagcttaggaggcaagcacgactaggaggaatcgaagaatcaatcttaacaacgttagcgacatcaagaaccgtgtattcgctgaagctggagacgttcaagaaatgaaagagagtttcgccattgaggtcggtgaatctgctggaattatcgtatcttggcatccaaggggataccttgaaaggaaatttgctacataagttgcttttgtgagatttgcaatcaacacagtcaccacagtcaggcatgaacgttggtagtacggtgtctccttctaccacttccttcacattttcaccaacactttccactactctgtacatagtcaaatgtcacttacgtacattaatatttatccgggtttattatgtattttagttaatgaaatctggcaaacaaatcttttaagttattagttcgatgttttttagacccatttgttgtaacctcccacgtgaggtttgtgattaggcgaagtcacattaaatttctttttctactactatctttcgttttctaattttaggcccgcacaggagtgaacattctactttcaacttgacttttgcgggtttctgattatcattgttttggttgctttattattattttgattttcgtttcagttttatatagaaaatgaagccatataaaacctacatgncattnngattgttttttggtttaagaatg

SEQ ID NO: 53154 - DNA, 1082 bp, Arabidopsis thaliana landsberg
ttcttggggttgttgccttgatggttttggttttggttatagctatggttttggttatagttatggttctggttatagtcatggttatgattctggttatgatgatttgtttcgtgggtttggcttgttttctcggcagtgagaatgtttttctgagtggtttcacgttcggaatgtaacagagaagctgggagagagtaaggtgatagtactctcggtgatggtgctttccgatgattctctgactctgatggagaccgagttttcactgactcagatgttgtagaccgacttgaatgagctggactcggtggtgagttcggttttcgcggtggtaaggcttcttgaacttccttgggagatggtggggacgtgtatgacgatcgaggcggtggcggaggtggtgtcgcagcctttggtggggtcggtggtgacatgtggcggcttggaggtgaatgatatggggaccgctcttgagggggtgaagttgggaggagccttctgacgtggaggggtaagaggctgttgctgctgacgtggaggtgaaggaggatcttgctgacgtggaggtgaacgaggttgtcgctgacgtggaggtgacggttgttttgccggtggtctgactacgagcgaactgcgagaggttggtcgaggttgaggtggaggtgggtcgcttgaaccttgcgctgtaggcctagcgatactagagagacggaaccatggacgaatgttagacattagtgtatatttatttgaattgtaattatatgttatttataagtgtggcaaaacacaatggaacgatttagatatcatgtaaccaaagcttatatatagatagattataaacaagtgtgtatgttgaagaaaagtgaaacacgagaaacatgaaaggaaaaaggtaaaaatgaagaagaaaggtatcagatccatgcaatgagatttacagcttgcaaaacccacattttacgattggtatcaatcgttaagagccacattcaagcttttccttataacttatctatcaccgttgataaataaataattcaggttctagattcgttgctatgtcggaaagagtg

SEQ ID NO: 53155 - DNA, 751 bp, Arabidopsis thaliana landsberg
tattttgtttctattatgtgtttcattttataagatgttttacaatttatttttgttttgtttttcaaatattaatgtttcaaaatttcgaggatggttttctttccttgttaatttgaattttcatattttgaactgagaagattctagaaatttgatctgagacttcatggcatgcaatgctatcattgtcaactttaaattgagaatatactagtcattggtgaaatagtggttaaaaataaaatttactcttaatttctggttattttagagaatttttttttaactgattaatagatcaaggtaatcaactttgatccttcaaataaaatctagatgcaaattttcagtccgatctttacgtcagtcatctttttattactgctttgttcacttcatcacctaatggcttagagtcgtcattactcatatttattacgtcttgaatatgtgctttcgaattcgctcatcttcttttgtacattaattattcggcacaagcgaaaaagatacataccttgccatggcacatgccttgtcatcacaaatatatgaactcataattaaaaacctaaagttcggttacaaagcatgaatcataattgttctttattaagcgatgggtgaagtcttgaaattttagtttgtattcgagttatttttcgtgttttgttagtaaaagtatagtttatattgattttctcttaaaaataaatatcactaacttatcctttcattcgatatatat

SEQ ID NO: 53156 - DNA, 1611 bp, Arabidopsis thaliana landsberg
caaaaaacgtggtagaaaaaaaaacataagataacggattgatcgagttacttcaaatgtatgtaccaacacgtaaattttactagttttctaaaactatggtatatcacgacagaatctttgcatgtatcttcactatgagcacctttttcgaacaacgtgtttgcattactgattctggagagaaacaaacaactttctctatacctctatacgaatcatagaatagcctctccaattaatgaatcatggtgcaaaacccctttctttttttttacttttttataaccacgatactttttttagtgactctatcggtgtcatctcccatataacacatgctttaaactctaaatcaatgacagtacgtttgttgcaactttcgatataattgtggtgtacttgaaagtttatcttatgaagctttttgaacggctaagaatctaggatagaccaagcttagtcgggtttttgggctttaatgaaattgggtctgatgttggaagctgagcctgtttatttatagtggggtagttcttgtacgagcctttccgtgtgagaggttgggccgatagatggttttgcttgtacaactaataaatgtgtgctcattatatggtcacatgccgtcaccaatttgtaacggaacattcatagcaatttgctagtgcggactagatttggctcggttgttaaacaatgacagtttttttttggcgaaaaaagttcaaatggctacagttgccatgaacatttttggtttgttacaacaatccttcactatataaaaattggccaatatatattgcaagttagtgtttatatggtgatgcctttaattttattttggaaaatgaattgtctataaataattgttttaaatcttttgatgaactttaataaagtagcgtaaaggaaaattcaaaaagactatttaagccggaagctcaggctcttatcttttccattcaatgtctgccacctcctgtcaaatccactcgtgcaatttaagtaggaaaatataaagacataaaatctaagatattattaaaaaatcgaatgggagacaaaatcaatcaagaaagtggaaaatggcctctctaatttttttacatttacacaaaatatattttatctttatttcgacgatgcgttattatgtatttccataagaaatcaaccgcaattaataacattccaacgaagtcgaaaatttatacgaaagttaaaaaaaattcaccaaaaagaagtttttaaaaaaacttcagataattgacataagtcaatagaatttgatcagaaatggaattgtgggctagagactgggctccgtaaaattcctaattaaaatatagagcccacaacgaaactcgatattgtcaggactcaggacacacacgtgcatcagaggcgcgtatagcgcgtgtatcgaaatggcctagtctgaaaacgctgattttagcctaaatccgtttttgtagaaatactcggcgcgtggaacaatccatgagcatttggttttatttttgattgtctccataattcatttcacattacagaaaaaaaaggcattttaactaagtaaacagtttttatttctccgaaaaaaaa

SEQ ID NO: 53157 - DNA, 1127 bp, Arabidopsis thaliana landsberg
catctgttcttcaattgccacagattaagtaaccgtttttctgcgaaagaaagaagattgcaacaggcgtttggtggaaatgaaagcaccagatacacagaccaatgcaacacatattcccttggaaaaggaaaaaagtaaaagagcaggcagaagaggagtacctgcataaaggtgcggaaaacagatttgaagtcactgatttcctgcaaagaggcatacttgggaacaggagcagatggaccactttcagcagctgcgatgctcataggcaaattctcatcaaggtcctggatcatcagaaaccaaattagatagaacaataaatagaaagaaggcaagttcaaagagcaataccttagcaagctcctctggtctcccggcatacatctgcggttgctcctgtggcatacgcgaattcactctttcatcataagcattgcatattctatcaagcgcagccatcttatcatcagctgtttgcggcatcggacagacgaagacataagacaaaccatccataccaatgctgcgcactcgctcaccgttgaatactatctccatgggcctctcatcctgactatgttccttcaaacgctggtgcatctgctcttgcgtataaaattcgtccccccttgataagtcgagcagccaagaggatttggcatggtctctgcccttcgcatcgtcgtcgttcttcgtgggaatggccgggagctttctacgtttccacgggtaaagatcagaagaggaaggtttcgccgggtaaagatcagaagaggaaggtttcgccgcggcggttgcatcttcaccgtcgatttcatcgttacagcgacgccggtaattcctaggttgcttagttcccattctctctctaaaattagggctcgaaatgaattgttgaacaagatagagatctttttctgatccccgtcgaacatttattcaaggccaaaaaaagcacacgggaatttagagtaccaatacatatcaaaacctaatgggctttgaatggttgcatgtgtgtgtttatttctgatatgcaaagcgatcgatagtcttttccatacaagtgtaaactgtaaacaacgtaattaagcataacaatacaactctttcttctcttt

SEQ ID NO: 53158 - DNA, 439 bp, Arabidopsis thaliana landsberg
accatcaactaaaattatggactttacaatttagggacatcggtctaaaatctatatataaatttgtttcatatcgtgttaaataatgaaaaccagatattttatttaaaactttaattttctaacgctatatatatatatttaaatttatatattcttattatatttatcttattcctttctatgcattttagagatatattattaagtatagggttatggttacatatgtgtatactaatatacattatagaacatacaaatatctcatagcaaaaaaaaatctaaacaaatatctaaactttgtaacattaattagtgtgtttttaggttttttttttttaagacggaaaatgtaggttactatcatttggctatctctcttttgataggccacttaaacctaacttgatcattcaaacttttaaacaccaaaaaa

SEQ ID NO: 53159 - DNA, 512 bp, Arabidopsis thaliana landsberg
  unsure (1)..(512): unsure at all n locations
cagagagctggatttgcttctcggcgagatcccccaggtcacctccccgcagcnggctagcgcggggtgggcgtcatcggcgacggcaacggcgtgcatggcgcctcggggtgcgacgggtacgcttcaccaatgcgcctggggggccgacgggtacactgccccccggggggcgacggctacgatgcgcacgccacgccaaggacgcttactacgacatggtcctgaaccgtcgcgaaaatggtgctccactccgcggcggcgcggcggcggggatgcagagggcgtgggcttccccgcgccgtcaccggttccaggaccattcatcggtagcgtggtgccgccgccgcttgcgctgggggtggactacccggagcagcagctggtcgtgaaccagctccaaagcctgcgcatcggggacgcgcagccgcgctcctgccgcagggcccagcgccagtcatgagcacgaccccgatcgaggtcccgcagccacggcggtaccacgggtacaa

SEQ ID NO: 53160 - DNA, 1045 bp, Arabidopsis thaliana landsberg
tgtaggagacactgagagaaattcaaaaaaaattgtaacatcccgatttcaagatatatagtagtgaatgaaaagagttttaaaaattgattagatcatctatatcgatgaaatacacatatcttttcgattaaacatctcgaaaaaactttacagttaagcattgtttgcactggttcaattttatgatagataatttaccggaaagtgattttcggtaccgtgtgaatgagaacaaaacacaaaaaaaaataatgtaaaattttttaatgccgacaaacaaatttttaaagccttcaaaaatagcaaaggtggtcgtcgaacaagaataggctttacatatagtggcggtcaagagttacacaaatacaacatcttaattgattttttctacattattttaaatttacattaccataatttgttcttcttctaattacccctatgttttatgctgtttctatgagttgaaaatcaattaatccgaaccagttcggaaataatatacatgtgttttgatttggtatctggttttgtaattattggggataaatttagcaaatctacctagttttttccaatttttgtacatcttcttaaaagaattattgtgtttttggaatcaaagctgaaaatagtggttttagattattcttttagtttaaagtgctgcctaattgtttatgttattgacgcaatagctaccaaactcttgtcttgtattattttccggaaatcgaatcatggtactagacatcttctagtttcctagcaaccaccaaaataccaaatctcattttatgttttgtctttttccttcgaaagttatttggtatcaccgaaatacttctctttttctcgctgagatgaggtgtggtagatctttttctcggtgcgaagcagtggcaaatttcttggcggattttgagtgtatctcagatggttttgcttgtggtttgtggacgccggaggtgccatggagaagcctataccggcttgaccgttcgcgtttgcacctgtgcttctcggcggaagcttgaaaaaa

SEQ ID NO: 53161 - DNA, 984 bp, Arabidopsis thaliana landsberg
acaattgactccaattacgtggcgaatcgtgaaaagatcatctatggaactgttcaaaaacgtctctttattttcttaaagatcaaaaacaaaatttctaatcatggactccaatttctctgatcattccctctaatttcggatttttgcatcttctccgatcatcttcaccactatgggtgcttcatcttctacagacgacaaagaatcatcggagaaacgagaaatcgaaagccttgctgcttcaaccggagctcttcctctgcttaaacgatccttctccaaactcgtcgattctcaaaccaatactgttccttttcaatccttgaaggtataattcgatttccgttaatctgggttttcaatagaatcgtgtataatctaacttagggttataaaaattggatctttgtttcagcaaagttttggtttgagctacgatacaattactactgaaggagagcaaaaagtttcagacttgtttcccaaattgttggagcatttaggatcatctttagtagatttgttcttcgtgcctgataaagaaggattgagttgggttgagtttgctagtggttatgtcaaatgttgtggaagaatgtcgaattcgatgtctttcaacactttgttgagagtttactatgtgacagctaaaaatgcaggcttttctccaaagcttgagtttgaatctgatgaagctgattgtaagattaacgggtcgatttcggttagtgaattgcttgtgtttctttggatgtgttggacaatgtcttgggatggtcgaagctctaaagctgctgaaatgaaagggtgtttgtttcttccggatattagtcatttgattctatcagcagtggtgtcttgcactgattctgaatctggaaatggtttgcatgtttgggataaaaatgttccggtttagaacttgaacttcctatcggaaaaattcttaacgtgggctttgatgacagttccttgcccccc

SEQ ID NO: 53162 - DNA, 598 bp, Arabidopsis thaliana landsberg
tacctttggatgaagacccgcgcccgtgctggaacgaaacgagcttggtgcctgtttatctgttacctagtcttgaaacctttgaatgggtagattatgaaggaacaaaaacagagaaacaagtagtagcattcatcttgagaattgcaagctgtttaaagcaggcaactattgtctcctttaaatccattgaccacgacaagaaacttgagatgctcaatgattttcccgtatcatcgaggtgttccccagcatgtatgcttgcattctcctggaatctttaatcggaatcttagataagaagttagaacttgttatgtttatcctttttatatttagctcattgaatttcgtaacttcttgctttgtgtctctacttaccggaagaaggaatcataaagcaaagatatggttttctcttaaggactgattactgtcatccttgagagggtaagacatgttcaatagccaagtagaattttttttgatcggtttgtgatcttagagtaaatcttagatatgttacaagcgctctaattaaacttaagatctttgagtttgctattttctcgctctgcctctttgtgctgtatgagaa

SEQ ID NO: 53163 - DNA, 777 bp, Arabidopsis thaliana landsberg
ggggaggtccctttaggtctccgtggggaccacagattcatacgtattttactctagaacagtgtgtgtatttatgtatagttatatacttatagcttaaggtgtatgtatataaatatacgggtgcactcgagtagttagttcagtcgtgtagtaagcaagatacgcctctacgtagcgtacgaaccacgctcttacagtccattattgccttttacatcttcagggtccactcttgctttattttgaaaaactctttttggtttgatttaacaaaaaagttatacgaaaagtatatattccacactaagaaaaaaaaacacgttttattttgtattaccatcttttttggcataaagaagatttttatgttttcttctatagtggaggagctcacataactaaaaataaaaataaaaaaaatagaaaacaaacgagggtatgtgatgtgaggcccatatacaagtactgtttattaaaacttaaaagaaggataagtcacgtgtcagacgtactccgtagtaatagcataataggattcgtagtaatccactttagctctctctctgcctctacaaaatatatcttctcacgtgaaatttttctactctagttatgtgataaatgaatagcaaaagttacaatattgttacttggatgagtttactttgaagagtgacacatgagtttactttgtcgtgtatatacttggatggatgcaccggtcacttttggtaggatagaaccacacactttgatcatcatttagcttggctc

SEQ ID NO: 53164 - DNA, 605 bp, Arabidopsis thaliana landsberg
agaaaaaccaacaaaaagaatcttaagaagagtataaagcttaatgcttttctcaacagaaaacaaaagaaactaggccaaaaacgctctactactataagatagaaccaaaaacagctttcttctactcttcatcattaaagaccgtcttcgtccctgcaagaccatacaaacacacaagttttaaaacaacactaattctacaatgcacaacaacaaaaaaggggaagaggagaggagaagaagaagaaacaaacctttggatgattccattacacttggtttgctgggtcctcttccacgcgtactgaaacggccacgaggtgctcctctatctgagtgacgtccacgtggtgctctatccgagaaacgtcctccacgaggtgctctatctgagtgacggccacgaggtgctcctctagcaggtgctctgtttgaggaacggccctcatcactatctcttggtctagactcttccacatgtatgtccctcctccaatttcacttccgctcagttgcacgcctcatcgaatcactcgtcaaatctatgtagcaaactcgtggaagcacagtctacgatctgttggacatgacccttgggtacg

SEQ ID NO: 53165 - DNA, 475 bp, Arabidopsis thaliana landsberg
  unsure (1)..(475): unsure at all n locations
tcccgcacgccccgcccgtgatgcctgccgccgcgcgcgtcttcctccttcctccccgccagcttcgcgcttccttccccggcagcccgcacccgccaagtcccccaccagctccgcgcttccttccccggcagcccacacccgccagctccgtgctccacgctccacgctccgtgcgccccaccagccgcgcgagcgccgctgggatacccgcctcccccgcgcccccaccaaatcggaaggcnnnnnnnnnnnnnnnnnnnnnnnnnnnnnnnnnnnnnnnnnnnnnnnnnnnnnnccgcgtgagggagagaaaggaaggtcacgtgggggagacgtcgggaaagctgccagacatcaccgtaaggcgagacccggttactcgcgagggagaggaaggaaggcgcacaggggagacgcaggaaagccgcactccgcgccccgctccctctcagacgcacagacactatctggg

SEQ ID NO: 53166 - DNA, 1035 bp, Arabidopsis thaliana landsberg
aaaaacccaacttttttcctccttcaattcgtctataaatacttacaccctcctacttcttcaatttcatattacacaatcccgagcaggacaggcaaacattctcatctcactcacaagaaaacagcacacattcttttttctgcaaaaccgatcaaaatcgaaatggcccgttgttgcagacatcttgctgttttcttatgcgttcttttgatgctctcgttgtgtaaagctttgagtagcaacgttgatgatggatatggtcatgaagatggaagttttgaatccgatagcttgctcaagctcaacaacgatgatgttcttagcttgataagctcagacgaaaccactttggaagcatcaaccgttagtgtttcaaacttcggagccaaaggagatggaaaaactgatgatactcaggttagttgtattctgtctaaacatatatgtttgttggatataaactttattaatatcaataattagttacggaatttccaaattccggtgtgaaaagatataacgatcatagttttttaaaagatatagatatgttttattttgtattgatgatgcatgcataagtatgggtgtgaaatatatgcttaggccttcaagaaagcatggaagaaagcatgttcaacaaatggagttactactttcttggttcctaaaggaaagacttatctccttaagtctactcgatttagaggcccatgcaaatccttacgtaactttcaggtaatatttgtgtttttgtttttgcaactttactcagtaatcttcaattaattagttgttttttttgtcactgattaactgcagatcctaggcactttatcagcatgtacgaaacgttcagattacaaagacaaaaaccattggcttatcttagaggacgttaacaatctatcaatcgacggtggctcgacgggaattattaatggcaacggaaaaacctggtggcagaactcatgcaaaatcgacacatctaaggtatgcacatatatagtccaccaatagcttcatatacat

SEQ ID NO: 53167 - DNA, 777 bp, Arabidopsis thaliana landsberg
  unsure (1)..(777): unsure at all n locations
ttaacctatctaactccttaaattactcgttgattttcttttataataaaagcataagactcgctctacatttacaaaatagttttccaatatatataacttataaaatttatatatttgtccatatattaaaatacaatttttagtgctttttgtggcgaatccttatttattctcaaccatttttattttttcctttctaattctaccattgctcttgccaaaggctttcattcttttatctttataattattaattataatatccttataatattgtaaaaaatttaataagctataatatatatatatatatatatatatatatatatatatatatagtaaaaataaaataactggtttggtttcagtttggtcctatcgagttcggattaagactttgataatctataaatacttgagttgacttataattatcatgataaagttgagcggtggtagttcaaagaatttttagtctcaatccatataagaaaggataggaacagaatgcattgatccattaaaggaatgtcaaaaaatttcaatatcactacatttaaggaatgtcaaacttcttctaactacttttttaactaccaaaatctgaacaattatcagtttcaaaatcaatctcctaacaatcccaaatttatgaaggcttatagcaaaaataaagacttgttttaattaatttggacacaaaaaccccatctttttaaaattaaatttgttatcatccttcataaactctngtttatttttatccgtctttta

SEQ ID NO: 53168 - DNA, 815 bp, Arabidopsis thaliana landsberg
  unsure (1)..(815): unsure at all n locations
tctaaanagccttgggacctcgaactgtgcagattactattgcaagagcaatttcaactgatattgtgaaagccattgaagtttcttgttcgcttctagtgcggttgcaaggactactcgtgtactctcatatgaaagtttcggtacctttttttcttcagaaaagaggttcaaaactttgaaggttggatataaagacctcaacgactacacctatcaaaacctttgagaaaggctatgtcaacaacattttttattgcgatgaactgataatcagcaatatcaatgaatcaaagaaccggatcaaaatatttgtctccaatagtttttgttatgtggttgcaatggcaaggttgatcatcctttttcaagtcaaggttgatcatcctttttcaaatcatctttggttttctctcgagattgttattttatcttgttccaattaaagttttgatagtgaatgttagtggcaaaattttattcaaaaattttataattattttttgtagcaaatcaattttaagttaaatttgatttaaaatgattttttcaacaaatttcattaaaaaaatttatagatgcaatcgcaaatttgtataaattttatttaaaaaagaaattcttgtagaattattcaaatatgagtgtttttcattaagatgtccatccaaaataatataagaatataataattttaagtagacccttaaaaggataaaagaaaaagacaattaaaacatgattttttttatttttcttgaaaattgatgtcacgcatgctaaagatgcatgcatatgggacatgactttacttt

SEQ ID NO: 53169 - DNA, 431 bp, Arabidopsis thaliana landsberg
  unsure (1)..(431): unsure at all n locations
tgttgtggtgtgtgtggtgtagttaggtgtagtggtggtgtttgttgggagttgtggtagtgtgtggtgatgggatgtgtgtggtgtggtgtgaggtggttgtggttggtggtggtgttgttgtggttnnnnnnnnnnnnnnnnnnnnnnnnnnnnnnnnnnnnnnnnnnnnnnnnnnnnnnnnnnnnnnnnnnnnnnnnnnnnnnnnnnnnnnnnnnnnnnnnnnnnnnnnnnnnnnnnnnnnnnnnnnnnnnnnnnnnnnnnnnnnnnnnnnnnnnnnnnnnnnnnnnnnnnnnnnnnnnnnnnnnnnnnnnnnnnnnnnnnnnnnnnnnnnnnnnnnnnnnnnnnnnnnnnnnnnnnnnnnnnnnnnnnnnnnnnnnnnnnnnnnnnnnnnnnnnnnnnnnnnnnnnnnnnnnnnnnnnnnnnnnnnn

SEQ ID NO: 53170 - DNA, 442 bp, Arabidopsis thaliana landsberg
ccctatgctgtttctacttttgcaggagtctcgccatcgatttgataaagctgctcattcgtatgatcaggtacttgcttatggagtgtataacacctttaatatcttgtatatgcagttgtacacccttattcttcgcctaaaataagtatgttttataggctggtgttaccaccacaagaatgcacagcactgaaaactttgtctgatattcttcatctgaactggtttaatgagttttcttatctgcttgtagtcgcgcgaaaagtttgtgtctttaaagaagaatacaagaggagaaattgtggcagagttggaagaggtagaacatttattcttatgtatatccttttggttgctttctcttcgtggctacaaagggaaagtgaagcaaaattacagcgaaagaatgtgccagcccgtatgcgcatatgaatataca

SEQ ID NO: 53171 - DNA, 2665 bp, Arabidopsis thaliana landsberg
tctttcagtttcaaaagattgtattattgtaacaaggtgaccattactcttaaaatttattcaaaattaaccaaatctaaactaaaacgtaactaaaatttgatattattcatgaaattctaagaacaaatccaacatgatcccttaataatttccctttagtagtctagccttcttagtcggtcactaataataaagagtaaagagaccaaaagagagaagtcttagataacggtgacagagttaaaaaagaactcactaaaatagacggaggaaaaagtcatcaattcaacttgacggctaagttaacggcgattatcttcgttcacacaagcaacacaaaagagaaaacatgaatcatctctctctccctctctccggttccacagtaaagaattgattcctcaatctcacgcggaagcaaaatccaaattctaaaattctaagaaaccactctaatcacatcgctctatcgatcaaaatcgaaacccttattcaaaaatctcttattttttccatttttctctcaatcatctgaatcggttttgagatgagctccgattcaccggcggctggagacggtggcgaacaagccgctgcgggaacaagcgtgccttcaccttcatacgacaaacaaaaggagaaggcacgtgtgagtagaacatctctgatactatggcacgcgcaccaaaacgacgcagctgcagttcggaaactcttggaggaagatccgactttggttcacgctagagactatgacaaacgaacgcctctccacgtggcgtcgcttcatggatggatcgatgttgttaaatgtctgcttgagtttggtgctgatgtcaatgctcaggataggtggaagaacacggtaaagcctgttcctttttattttgaattttgggttgcttcttcaagtttcttaactttgttatgattctgatctaaaacttattgttgtatttgtgggtatttgcagccactggctgatgcagaaggagctaggaagcagaaaatgattgaactgctgaaatctcatggtggtttatcttatgtgagtttttgaattcccttttctgatctttgtatagctttaggttagacattgttccttttgtttcatttgttagggtaggtgatgattgctattgaatatgaaaatgttttttgcaaaatttagaaactttcgtatctctctgaagtagctgcttaatgcagtgttgtttgttattctttagtgtttctattagtcatttttgttgttgtgtgtggatagttgttcatatgtagctgagtaaattcactatgcagggtcaaaacggaagtcactttgaaccaaagcctgtgccaccaccaattccaaagaaatgtgactgggaaattgaacctgctgagctggatttttcaaatgctgcaatgattggaaaggtatgatttgtgcttttgcttatccgtgtttagttcaatataatggagttttgagcaaatgagtttcttttggctaatttgaggttggtcacattctttagggttcatttggtgagattgtgaaagcctattggagaggaacaccggtagctgtaaaacgtattcttctttttctttcagatgatagactggttatgtaagttcttacttctctcttatatcccaattattattgtcgaagaagtttctagcttttagctgatactttggtatcgctctcacctaagattcttgtgtttccatacttgttgtgatatacagtcaggacttcaggcatgaggttgatttgctagttaagcttcgccatccaaatatagtccaattcttaggagcggtaaccgaaagaaagccccttatgttaatcactgagtacttacgcggggtaggttttcactatccgctgtctttttcttatgcaatttttcttcttggctaaataaatgattcatctttttgacagggagatcttcatcaatacctcaaggagaagggcggtcttactccaacaactgctgtcaactttgctttggatatcgcgaggtacttgaagttttaacattcgagatattatgtgagaatttgttcatcatatttagcctgagtgttttcgaaaattcgacgatacagaggaatgacatatcttcacaatgaacctaatgttatcattcaccgagatcttaaaccaaggtaatcaaaatcgcttcatatatatagctccttagtttcttacttcaaatccgctgctcataaatcgcttcttgcattttatatttcaggaacgttcttctggttaattctagtgcagaccacttgaaagttggagactttggacttagtaagctcataaaagttcaaaactctcatgatgtctacaaaatgactggagaaacaggaagctgtaagtgttgttctatagtaaaatcggaggtcctctgccttcttttcctttcatttctttaacttcaccttctttgtttctcttcttcgtgcaacaaaaccagatcgttatatggctcctgaagtattcaagcatagaagatatgacaagaaagtcgatgtcttctcctttgcaatgatactttacgaggtactaagatcttaactataaaacttcctttctctactacaaaaaacaaaacctaagttcaaaaaatcttaaccttaatttcattcccacatt

SEQ ID NO: 53172 - DNA, 407 bp, Arabidopsis thaliana landsberg
  unsure (1)..(407): unsure at all n locations
cgcgatggaaaaccgttcgagcgttttcaaccgacagcgcgtaaacttatccgttgcatctggcgagagaacccagaactgaccattgaagaagtaccccaacaggaaatggagcggggtctagccgaattctttcctattctccttgagaacaaagcgaagtacaatgcaaagccgactcatactttagaagaattgctaaaactaaatgcacttctgccaaatttgatgaagctttttcttgttcgcaaaggggatgagccgattgccggatcgctgctctttattgcgaacgaccgtgtagcgcttattttttatcacatgctgcgctatcaatatcaggaggttgcgccccatttatctgctaatgganaacgtaacatcgtcgtcgaaggagcatggatccc

SEQ ID NO: 53173 - DNA, 535 bp, Arabidopsis thaliana landsberg
gctctcatgtatatatacaaggaggtatgtgaatgtgagtggtggtgcgtatgtattaggaggtcacttgatctttattggttagttggctaatttggagaaaggagtgtctaaaaagcaaaatactgacaaagattgtttactttacttgtttaccttttattagtgttggatttaatgtctaagactgacttggaaaattggaagaatgtataaaaaaataaaaatgtcgatataattgagaaagaataatggaggaaagaaattaaatgatgatttttttccttaaaactttataaaatgttaaataaatcttgacatgatattttttaaaagacatgaatgacttagaaatctcacatgaagtttagtttgggatataataatccaatttataaaaaaatactatggttaattcattttgaaaactcataaattagtcggtttttaaacaaaaggagaaaaagtgattcttgttatatgttgtcaagtgttcacatggtttaaagtttggaaggcttgtaaggaaagaaag

SEQ ID NO: 53174 - DNA, 873 bp, Arabidopsis thaliana landsberg
tcacgcccaccattgatattagcatgcatctcatcaaaccgcctcaagagtgcgacaaggctcttgtcaatatgagcaactgtcatttccacatttgcaagtttggtgtttgtgtcgatctgtgtggcctccaattgccccatcttttcattcgtcacctgcatgtcattatcaagaccttccgtgtgcgtcttcaccagccttacaaagtgttgtatgatacccttggtgcgaggagagtgtggcatattacgagaagcatcatcaacctccaatcctgccatggttagacgaacagaggcaacaagaaaaaaaacgtgaaggaataaaaactctacaactattaggatgtagctgctgcaaggcgctcactctcaacctgccacacaagctcttaccaattcttaccttgcacaacaggaggggtgagaaaccaacaagtctgcaaccgtggaataagtgtatcggtgccgcagcaacacgacctgtcaaactgtagtcgaaatatgtagagttgtaggtgggctgaagcaaggaatacactagtaccacgttagttacaaaagcaagctgaataatcgttcaacggtggtacggtgctggtcctaggctaaaccaggctagagacgtgagcctaggcacaaaggtagtcactgaaaaagaacaactagcacagcacaaagagaaacaacagatttagagattcagcccccttcttcttcttttccttatatattcttttctattcgttttttttcttcttcttctgtttttttttgcaggggcctaaaccgtttttttcactatgacacacaaacaataaagatattgctacaacccctttaaatcagatttacaaatcttgttaatata

SEQ ID NO: 53175 - DNA, 698 bp, Arabidopsis thaliana landsberg
gcaaatttcttattctcttctgctgtcgttcggatgagagaaacctgtcaataacagtttctcttttaacagataccactagtaaagacaacttaacatggtaacatctttgtaacgattcctcacctgttcgttgtggacgtgaatctttctcgtttggaaatgagaaggtattgtatctttaccaccaaagttcaccatatctaaggcacctacacttaaaaccaacggtattcctttttctatggtgatatcaaaacgggaactatcgcatgccatcacccctccaacgagatggtcggcaacctcggttgttgtaatatccattactccctaaggaaagaacaggtagaggaaacattaaaagtaaccaacaccacaaccaaaaaattaagactaactgcataaatcataataacaaatctcatctgaatgaagagaaaaagagaaacctgtataaatccttctttaaccaaagattccattgctctgccaccaacaccagtggcatgaaacactagtgtctcataaccttctcttgttaatatctcctggactgcatttacacatggagttgtcactccaaacatagttatgcccacagtacatttgccgttatcgcttggggagcttctaaacaactcaagcctcccgactaccataccagcaaaagaagcccgagcgtttaaaaaaccacc

SEQ ID NO: 53176 - DNA, 882 bp, Arabidopsis thaliana landsberg
atcaatggaccaaagaaaccatcaaaaaaatcccatgtcatttgcttctgcattcctactgattcataagaagcaagaacatcttacttcagtttcttgtgatactttgcctgcttcaacagatgttctcatcaatgggtagaagaaatccatcaatgttacagattcttcttctttgtcttgctcctgcgtttcggttttagtttcagttttggctttgttttgttcattctagcgtgaatcttcaagttaagagcacgacgatccaccattgcagcttcttctttcatcttcataggtttgaaaacctctgtgacagatggatcaagcaaactaatggagcaactaagtgtaacatcaattgacaatgcctcttcccaaagctctcttcctttctcaaagtttcctcctttacatagttttggtatgagcagatcataaacctgaccataaccacccactgagcttctcttcatcttctcaaacaattgaagagcaaagttaacccgctcgaccccacaaagaaccccgatcagatcataatagaatttgcgttcgggtctaaatcctctctcgatcatctcatccacaatttggttgcctttaccaaaccttcctgtcaaatacaggaccctcacaacgaagtaatagctccctgtatccggatcacatcccgatcttttcatctgttctaaaatctggcaggactctctcaccctcctagtccttcccaaacaagagagcaaaatgttgtaactcatagacgtaggttggattttgtaagacctcatctccaacataatattcaaagcttcaggaacaagcccagacgggtttcgattcacgtttctttcgcaaaggcaggtcagcaacaagttgaaa

SEQ ID NO: 53177 - DNA, 605 bp, Arabidopsis thaliana landsberg
gccacgaaaccgccgcccgcacgccacggccgcatccgccgcgcgtccaccgccccgaccagccaccgcgaaaccgccgcccgcacgccacggccgcatccgccgcgcgtccacgcccccaccagccaccgcgaaatcgccggtcgcccgcaacggccgccatcccgcgaaatcaccaggatgtggtcggcgggggtcgcaaatcacgctggcgagtggcgactgagacctcgcgcgcgcggtgatgcggcacgaggtggtgtgtgcaaaagctagaaaagggtgcagtgctcgatccggccggcttcgctctgtttgtctcactccttttgtgctgcttttcttaccattctgcatattttgtttctttttcacattggctttcttgctactgagctcctgcaacttctgagaacaccgatttgcaatgtgtgcagtttcatggatctgagtaactgtaggattatgctgaaaagactgacgatgatacatccagctatccctgtgcatgggttctattttacttctgctgttaaactacgtacaaaaatgattttgacaattagccgattgccatatctgatgtaggatggaactggggtacg

SEQ ID NO: 53178 - DNA, 572 bp, Arabidopsis thaliana landsberg
tattaagttaatcgatttcttgaatttattttgatttttataatgtttataacatttggaattataaaaaaaataaggtttggaaaaaaaccaatttggcctgccccagcccattaacccgcatttcagcccactcccccacagcccattccctcgtgtcctcgcttacaaatagggcccacctgtgagagctttcttcttcctcatgtcgtcgtgcgcccgtgcccccacgtccacttgcctccacgcattcagtaattgcccgcatttatgctcgccttgactcagtggagagttcacttccacgcccgtttctctccttctccaccgagcattaagcaccaccaccattccgtctcccccactagccattaactccggcgagcaatcgagcatggctcatgcctcctccgctacccctcatggccctatataaactgcctaagcccccatgttgcttccatgtgccagcattctcactcatgcaccctccttagctctgctctcatgcaccgacgtgcagccatcacttgccacggacaggtcattccaaagcttcgcaacgatgctga

SEQ ID NO: 53179 - DNA, 300 bp, Arabidopsis thaliana landsberg
  unsure (1)..(300): unsure at all n locations
tcatagtcatgatgaggaacacacacgatgtcagtctgagattatacagctgtcaaagggcctctgaagatgctgagcagagctgcnnnnnnnnnnnnnnnnnnnnnnnnnnnnnnnnnnnnnnnnnnnnnnnnnnnnnnnnnnnnnnnnnnnnnnnnnnnnnnnnncggtaaacctatagtgccaactgagtctatgagacgcacgacgccctcagagggactgtttgcgtcgtcaacgccaatgccacgcgtcagttaacctgtgagactgtcaactggctgggttcgcgtcaccggc

SEQ ID NO: 53180 - DNA, 1041 bp, Arabidopsis thaliana landsberg
atttgtacatttttcttggggtgttctattccatctcttttctgtctatatactcaatacaacactaatcgttactattcatgtataataatttacttaccaattgatgttgttgaaaaagtaactgtcaaatccacttatttacttttacttgagtgtcacaatgtctatctgtctgcgactatgcctgtaaaaattgatcaaatatctgaactattttctcaaaaatatgtcggattatatgattacatctgtcgaaatctcaaacacaaattgtaacactagaagccatccccgagagttctccatcatttactcttttccattcaccatctatcataaggcagcttctactttcctcttcatcattccacatcagattctcttctgctacagtttcagtttcctcatatgcatgttctatttccatctcagcttcttcctcgtatgattccaatgtcacatcatttgattcagaatctcctgcactcttccttgctcgcttgcatggcgatttctccaattgatttctattacactcagctcctctcttcgcattgttgttaccttgtgcttgttttgagatgctcttagcattctgattgtcaagaagaggtaaacgtccagaagatccaatgatccgaggcaacataccaattggacaagggctccatgtttttgcctttctccatctgttaccggttttgtctgtgtcaatacctttcttctttgagagttgaagtttgacgaactcaagtctcttgcctgcattaccgagattcttctcttgctcaaggagcgttgtactagctgttacaagagtagaactctgtttcaatggaacaattgcagagcttttatgcataagaggaagttttatgagcttctcctttaagacacggcctcccacaatctctgcgagtagaaatgctgatttcaaaaccagctcatatcctaaggctcccaagacaagacatctacgtataagttccataaggaaaatgcttggaggtttcacttctagagaactgtttctctgaa

SEQ ID NO: 53181 - DNA, 807 bp, Arabidopsis thaliana landsberg
atgcaaagctccgggtattgtcttgaaatggcctcttccattttgttttacctgttttcgtagatccaatatatatttggatgatgggtaaaacccaaaatcctacatacaaaatgcgatatcatataaaatatcgcaatatcgaactaaaaaaaaatagcgtgttatatttgttgaaaattaacataagcaaaacgtctattaagtaatgtttataaatactatcatgccttgatgatgcgtggcttagcctcagcggtcgatagagctggatctaatgtgctttttctactagccaacgaagggacgttggtgttgaaccactgctcgattcggcctttgttctccggaattggtgctgcatcgttaccgaaaaccacgggcgatgtaatcaccatgagcaggattgttactatgagggacacataattgtatcccattgtactattaatatttgttactacttttctaaagtaaagatgattaactttctgcttcttcctttcttatggtatatatatctataccatctctgaaagcgaagaatacccgttgccgttaatttttgctaaattggtttctggttcttcactttttattcattttaatcccttaataaactctatatatattatgtactgttttaagtgtttcaatctaactaatttagtttatttgtctagaaaactaatttactttaaggtgtaaaaccgacgttagttttatttttggaacaaatgattagctaatgctatattactaaacaagaaacttctcaatactaaacatctaaaccgaacatggcgg

SEQ ID NO: 53182 - DNA, 953 bp, Arabidopsis thaliana landsberg
aaccatggagaaatctagcgtcagagagaaatacaaacacacaacagagagagagagagaaagagagagcttacattgtgagatcagagcgagagttccatccagagagagagagtgagagcttatatagatggttttccgaatatatagtgtgagaacgaagaaccatcttttgtttttttgtttttttcttaagtacttttatataaaaacacgagagagagagagaaaacacggagaagagggagagagacagagaaagcaatggtaatgatcggaatatggtgcacggcggtgatgatggggaaatggtgcacggaggagagagagagagctaaaaaaaacttacatagtagtacatgaaatttaattgtttattttttggggtttctatgaaatcgtagaaatattattttattaaatatgaaacttacaataaatattattttctttaacctagagaaatagtagagatacaagtggatattggatataaatacctctttatcaaagacattttatacaacacacatatcaatattaataatacaacggttgattaaagtcaaaaacaaaaaatcccaacccaaatttttttaagttcacatatgtgtagtttgtttagcgtttcagaattcttttcaaaccaagtaatccgactttatttttaactgactcgtttttttaattatgttttggtgtcaaaactaatcaacccatggaaagtatcaacccacatatgtggtttagctttttcataaatatacattttaatcatttcttgtttagttagtgacaagacatgttacttgtttgatgacaaatatttgtatctccaatttctaaatcttttagccaaatgaaattatatatttgaccaaaaaaataaaactaagaaaagtgaaagagtatgggggcatcagaatctctgtcatgtgagtactattttttga

SEQ ID NO: 53183 - DNA, 1099 bp, Arabidopsis thaliana landsberg
aaggtttactgtgatgaagaagaagtctcagagtgattcaagttcgaagcgtaaacttcaatccaaatccaagtccaaaactaagaaaagtattatgaggaaaatagattagtttttgtttttgattagttagcagattcgtgtgttggtgatacatagaaattgttgaaatttgatgtaaagaaactgagattaattaaccaaaagggatagtaattgtttccgaaattgttggattccgcagatttttgtgttataattgaattaacgaatcaaaacacaaaactattttgtttgttactactaattttcgttgaacattaacaagttacttttgttctgctaggaaaaaaacagttgctttcgtacataaacgttggaatctttcgaataatgttaaattgtcattcaaataaactgtagtttgaacgacctatcgataaactttctgaattcatttttgtcaaaataaggagttttctttatttatttttccttctattttggcaacttggttttattgggtttttaattatttgtttataaaaatatgaatcaaaagattatatacattttgtctttagttgccagtttgaacgaccaacggataaatgatttttttgtatgaaaataaatttctgtcatttttctggaaatgaaatttgattttgtcagtttctgtcgaattttggcggtttctagcacaaaattgaataggataaagttattaatatataggagctaaatatattttcgatttcatataggaaaacatttatattcgaatgcaaaagaatataacaatgggaaaaaaatttacaatggaattaacgaaagtgattatagtttcatcattttagtcattttcatttttgaaaaatctttgaattaaaaaagaaagaagcaaaactggtaaaagctggtcgtaatttgtgataaatgtttgaatggaaattattgggaggagggagatagagaaggcacgtgtttgaggagtgtttttggtgtcagtctcgttatttgatttgttaactaaagtgtgaaaaagagacaaagaggagtcaaagaagtcacctaagacatctctttttctttcttt

SEQ ID NO: 53184 - DNA, 751 bp, Arabidopsis thaliana landsberg
  unsure (1)..(751): unsure at all n locations
ggattcttttattcgtatcatttccaccttccttttcgattctttgttctcttaagcatagtaggtttaaagatagaatttgacagatcctttgtaaattatctctggaatccaattttctcgatattcgaaaaagaaaatggggatactggcagcgaccggacgttcatataacaaagatcatcttcaatcctgttcaaccacaccacctcagatatgtaacttagctctatagaaggagagcgatgaggtacatctttaggacaaatggcatatgcgtgaaatgggcgagacggttcttttttgatcccaaactttttaacgtattctaaggccgaggacaccatccatagatagcaatagtggttgtcgtctttctgcgagagtgttcttctgaatttgcaaagtccactaagtcttgtatcgagtattcacatttcttagtgtcaatttttttcatgtaccagcccaacacacctctttgaaaagaatagaaaaaagatgtgttaaaaccaaattttgttattttcatctctgtcgtgcgattagagcaccattatcagtagttgcttagattgattcttagaaaattttggttataaattaaaaaatttaatcatagatagaataaaatgttcttagctttcatttcaaaaaatttaaaattaattataagaaaaatcctaagaactaaactaatactaacctaagatactaccaataattttagaaacttaccgnggtatgctta

SEQ ID NO: 53185 - DNA, 560 bp, Arabidopsis thaliana landsberg
atcaccaccaactcgttcgggtacaatagcccttaagaccatttttgcagctatatccaaccatttaacctttttttgggttaaaaagcgtagatccaaccactaaaccccaccctattatcccccacctgagttaatttgttaaacaataatcaagtcaactaacaggacaactaaccaaaatgataactgcaagaaaataagaggctagttacgtctgttcatcagaattaatacgttctacaaattacatatctcccattaaaaggaaaaaaaaaaaaaagagttctcctaaactatataatgattaacgtgtgtgatcaattgtggaagttcgaacctttaatttggaagactttgttagcattattatataacttaaatcaacataattaaaatatcgaataaagacaatgtcaaggttagattaaaaaagggtatacaaattagtgtggtatacctttggtgaggcaattattagacatcttatcaacacatcgatcctaatcttattcttttatatacttgatacaaaggattaagccaaatgattgatcgat

SEQ ID NO: 53186 - DNA, 591 bp, Arabidopsis thaliana landsberg
  unsure (1)..(591): unsure at all n locations
actgcttcaatgcagtagctgtctgttatcatcgaactattgaatttaaacctgttgggttcgtttgtgttctttcgccagttgtaccaccatgttatggaacaaacaatatcatcgctagacaaaggccattgttggttgattaccagcttgccgctcccgtaaagcagaagagggccccaaacggaacaaaccaaagcgtacataaaactaaaacgctgtgtatcacttgacgtctggaaatgcaggaaaattgcgcgataaacaagagccctgagtaccaatcagccttctttcttccagcaagcttgcaacaattagcagttttggacatcagcacgccagatacatgcaccgaaacagaaatcaacatctcacaagctgcatgttgtactgcactagctagcagtctctactccctaatttgcttacggttacttgctttaaccgtctagttcttgcctctactgcctaattgcttaggctaccgctttaaccgtctagtccttttcctcgtgggtacatgacctatctcagatacagcgaggcttttctccttgaaagcnctgaccatgttgtaccctgttttga

SEQ ID NO: 53187 - DNA, 409 bp, Arabidopsis thaliana landsberg
aaagaaccaaaacgaagcacaaaacagaggagcccgagaggccgagcagagggggcgcagagagagggaccgccggggacagggaagaccgagccaacaaaggcagacgccggagaaagcaggaggaccgaggcagagaggaacacaaggacagaccgaggaggaaagggagacggagaaggagcgaggcgcgaacgcgcacagggagaggaggccaaaaaagcagcaccagcgagcagcggaaccgaggaaagagaagcagccggacggcaacggggaggcggacgcggcggagggaaggacgaacgggaacaaaccgggaaccaaccgaggaaggagagggaaggaccggagggaaaagaagggaagaacggcagcgcagcgacaaaccgagcagaggaaccggaac

SEQ ID NO: 53188 - DNA, 998 bp, Arabidopsis thaliana landsberg
ataccctgctgtaatatctaaaacgctttcctttcctatatttgtttttcattgcctgcaaaaagggtggtaccaggatgggggatcttgctgagaagttccctgacatgatcatcaaggttgttactgttttattcgtatttggtggtctgatctccagtaaatatcattctgagattctttctcatgcgggtttttgacacctcaagtcatggttttgcgtaggtaccaattgatgtatttgcaggaatcactgatgaacacgctgctaaagttgtggatggtctggctcccaaagctgctgacagaaaagattccattgaacaagtgaagaagctatacgaactcttccgcatgactgactgcacaatgtgggaagtgagttctctctcactgtcttttttctacacacttcttcagttataaatatcctttgaagaacctccaactgtctgtcgtagatcaatccccttgcggagacatcaactaatcaattggcagctgctgatgccaaattgaacttcgatgataatgctgcgttccgacaaagagaggttttcgccatgcgtgatccaacacaggaggatccacgagaggtctctgtctatctcttgtatcatcaagaaatccattgttatgttaattcgataggatgttaaaaggaatagtgtgttgtgtctcataggtggctgctgctaaagttgacctgaactacatcggtttagatggagagattggttgcatggtgaatggtgctggattggccatggcaaccatggacatcattaaattacacggtggaacacccgccaatttccttgacgttggtggaaatgcttctgagcaccaggtaaaaggaaccttctttctttcttcactttcgggaatcattggaatgaaaaccaattgtactagacgtctgtgtcaaaaaataaggcggtggaagcgcttaagatactgacattggacgataaagtgaaagcaatgttggtgaacat

SEQ ID NO: 53189 - DNA, 577 bp, Arabidopsis thaliana landsberg
ctgaattgcgtctttccatcgataaagcggggcgaggatcgcgggatcaacggagcgcgggcaagagtgtgtcggaggcagaaccatggtgcacaggtgtggacgcctacactataggcttatagagtagtagagatatagatgtaacaagttagtgcatcatgactgataatcatatcaagtagacctttttttatatagattatattccttgagcaaaaatcatgaattatactatgtttttaaggtagccatgatttgcacaccatgtaaagtctgatagtgacaacatcaacaacgacatgtgttcagtcacctcatttagccagaaattctcattggtcttgtagtaatcagattgatagtccagctatgtgcgaactcatgggccacaaccaaagcacatgcaacatcccgctttgatgaccatggaagttaccaaatttgcaaaaatcataaagtaaaattataaaagaatgccacaattcacagaacagcttacagtaacagagcaagaaagaagattaactaatcagtaataaccagaaccgaatttgcaaattacgtcatattggtt

SEQ ID NO: 53190 - DNA, 648 bp, Arabidopsis thaliana landsberg
ttttttttcttccaatcaggtccatcgagcagttttgaaggatgggtcgtatgttgtcgtgaaaatacaataacctggggttgcagatagtgtataaagtgatgttgagaatgtaagactacttctaacttacacaaatctcattcctaaaggtatttttcttgatagacctatgaaggtaaatcttttttcttcattattttgatgaaatatggattattcatcctgttcctttttcctcatcttatttctgcccgctgttgcaacatgcttttgcttttttgttttttctgtcaaaatgataattgttgcgcaaacatagactagatgcatataagtttgttaagctcttttatgtatgatatgaacaatggttggtctttacttaatataaaaaggaaaagaaaatccaaaaagatttatggaattttcaattgtcacatcaagcaagttctgttcgtaaaacttataaacttttaaccacacatactggtcatacattgatatttccatgttttatctccattttggtaatagagtaaagacactttgatgcagatttgtaacataacaataagctttttgatatcacgttatcaattcaagtggaaaggaggagctgacaaggtgagttgcacgtaattagat

SEQ ID NO: 53191 - DNA, 446 bp, Arabidopsis thaliana landsberg
atgagttcagctcaggcgaaacgtttcatcgagtctgtgaaaatgtctggcaaagacttcgacaaaacaaaactcgaagaaatgggagcactacctaaaggtcttgatgatctttatcgtaactttgatcgtccactctctaaaatggccgttctaccttacctggtcttgccactaagtattggtcacgaagcttctcagcttcagcactttgcgcagtcctcggtgaccgagacctctgccggtcctggtatcaagatgtgctcaacgatgaaaagcgttacgccactcgctgacgttcagacacgcatcgatgcaattcacacaaaaatggatgaactgaatctaggacttcgttcggcacaaggtcttcatgaccaatctaacgctgagcttgttcgcctgacttcaaaacttgaagggcagtctttgtttatcgaaaaaaa

SEQ ID NO: 53192 - DNA, 1016 bp, Arabidopsis thaliana landsberg
tagacttttttcaataatatttattcgtgtttttcgctttgtgatacatttatggagtacatgataccaactcattcaaaaattagtgaagatataatattttaatggtgtatataatatacacataagatattggaaaaaacagacacgtattaccacgaagttatatgttgctatatatcgtataatgcttggaaacttgagacttattagtttagcaccagttgtaacctgatgtagattattgtaaaatgatctgtgatgcgtgttgcgggtcgtgaacggaatgagaaaaggtagacattgcaataggtttgtttggtcatttatgttgtgtattgattatgcctggaaaatgaaaacagtggaacgtaagtatagacttattcagtaactaaacaaaatgaaacagaaattaaagatcgtaaatagagtcagctacttttgacacttaagtgtttgtgttggtaatgatcgtgtttgtaatgtacgcgatcatttacatatgtataacaattgaacataacattataacaaaagtacataaagatagatttagccaggccatatccaaaatttttttttcctcgtgggacctatgacccaagcaaagatgttgggcctgttcatagctaagaaaaagttagttggcctttccttaggaatttttcaaaatttgatagtagtggcatccatttattttttcctaggaaatgaggttagattttagacgttgaccagatgaaatataaacagagatcgtactacacaaaagcgcattttttcctttttgggttagagcgataaatacacataaaagaaaagattagtatggagatacacagattcatgaaacgtatggttcacgtattactattgatactagcgattcatgcgcatatacaagccgttgctttaatcacaaatacttttgtctcatccgaccatctgaaacctaattccatcttaggaacaaaacgtgttgtaagatagattttccggtttggcagcgggag

SEQ ID NO: 53193 - DNA, 882 bp, Arabidopsis thaliana landsberg
tgtgtatatatataagcacgtagacaatatcattaaacttaaatctcagtaagtacaagtatattagaaaaacaaaaggtacatcagttaaaacgatgttagattttatacagattgttggtaatttatacgaagcacacaacaatttgttcatgaaaaagaaacaaatccaccaatgactcaaatatttctttcgatgataaagaaactagtttttgttattaaattttcttcttactacatgatttttctattatatccaaacttcttctaatatcgactctaaatattattctttgataggtatcgaaacttaaccaatggcaaccaaaaattctccaccttttatattactttcattgatgatgtttgctctgatctctctacccataatttcaggtaacataatcatctaattattggtaattcgtatatattaaacaccaaatttttctgaatcttttcaaacatttcatgatatccttactgattgagtcaaagttactagatgcaaaaaataatgttttgtatttccatacatgtactaaatgttattagatcatttttttatatttgaatattttataatgtgtttactaatgatccaaacaggatcacaattaatcagattatgtaaggagggatgtcgagatgcaaaagaatgtgatagatattgcaaatcattaggatggtatgaaggagtttgcctgaaaaagaacactctttgttgctgcaaagacaattaccctccattatttagtccttcgtattaagaattattgtctcatttaagatgtatcctcaaccaattatctataaataaaaattctatatatatatatatataataataataatactaactaataataaacatatttt

SEQ ID NO: 53194 - DNA, 618 bp, Arabidopsis thaliana landsberg
aaactaattgagtaatgtcaatcaatttactaatatttgacgtagagacattgtttctttaattaatgtaatgaactgatgatagtttagtaggtgtataaaatttctgtagagttttttttgtataaagaaaaaaacaagagaaaaagaaaagaataatgcagaaaagtggagaagacaaatataacaaaaataaattattctctaagaggacaacggataataaggcgaaattctcgcgggaaccaacgcctccctctttctctcccttccgtattaaataaacagccaaattacatacctacaaacacaccaaaatatactctcatacacataaattatacattcacacactgacacacatatatataaatatatataattggttttgttaaaccatacatatacattctctgtactcggatgataaatgtaaattacaaagaacaaacttggctagtgtattaaatccactatagtctattcaaccgagtagagaaatatgtaacaatttggttgaagaatataaatcagtaacagcatattcaattctagacacaaaaactaccacattactatttcttttatataatcccttgaaccttatcacattaatta

SEQ ID NO: 53195 - DNA, 560 bp, Arabidopsis thaliana landsberg
gtggatactatgaatacgatccatctaatatgctgtacaaatagtaaaaacagttcataaatagatgagtgagaaaagcattatgaatctttaagttgaacattaaacacttccaactgtacaccactcacccacatgtgaagactacttcccaacaatatataaacactacacaagtaattgggtaaaaatataaaaaaaacattgaaaaggataaaaaaaaacttgagtaaaagagagagaagacgatggccatgaagataatgcctgacctgccatatgaaattttagcaaaaattgtgaagctcgtggcggatgatcgatggtggttactaggtcctattttgagagctggaaaaaggggaagatatattgtgtactgtagcgatgttttgaaagatgcaaacatctaaagtctttgtactgatccaagcgacctctactcatttcgttgtcaaacaactggcatccaaatgagggggtggtaccgtgatttctttgaaagatgccttaattctgggaacaagacaactatttactatgaagggttaagggtttgt

SEQ ID NO: 53196 - DNA, 521 bp, Arabidopsis thaliana landsberg
aaatcccttcgtgatttgtaatatcggttcatgaaccctccatagaaaatttacattgcccaaatagacaacgcacaaacacaaaaacaccacactgtctccatctttctttcctcttcttcaacatctctcttctcccaagaaaataaaacacaattgcccagattcaaaacttctttttcacaaatcacaacgtcttcaaagggatcaagaatcttattactcttctcgtcttttgcttttaagaagaagtaaaaacatcatcttaactttcactgtttgtattatctttctctttcactcactttaaagtctatttagagattcaaaaacaaaatcttccagaaactgcttctgatcttagaagatgactcacttttcctaaaaagcaccaatttcaatcctatttttttctcttggtttccggcaagatttgggaaaattttgtgttctgaattggtggtttgaatatcaactatggaacaacggaagaaaggttgtaagatcaggaagagaggtgg

SEQ ID NO: 53197 - DNA, 504 bp, Arabidopsis thaliana landsberg
ttttttaatgtgctagctatgtggatgattttcttagatgtaaaacgataatgctacatgatgtaaaagttttagcatttaagaaatatgaacatgtccctacgtaaaacaacgaggttgttggtgaaaacttcaaagacatagttcttaactcgccaaagaaaggtgtaccaattcctttatgatatttttctacgacgactaactatgttaacaatctttgccggttatattaatccatccgagatttgaatttgaggaatcatgaatttgatataataatcagttttaatttctttataatgcaatcttgcttgaattctatgcaccttggtgtggacacatcagaatcaaaatcatttgaaaaaaagaggcataaacatccaggatgaactgtgagaatccatcaaactaagcacaaccaaacagtaggactttatgtttatgtgtctcgtccctaccagtggatcccacatcctctatcgggtctattggcccacctta

SEQ ID NO: 53198 - DNA, 604 bp, Arabidopsis thaliana landsberg
  unsure (1)..(604): unsure at all n locations
ggaccagtctgccatttgcgatcttgacaagaaggttcctcatgttagattgttatggggattgatttggttgtttggtgggataggaacgagaagcaatggaaagtgatggatgacacgtgtcctcatcgtcttgctcctttgtctgatggaaggattgatcaatgggggaggttgcaatgtgtttatcatggatggtgctttaatggttccggtgactgtaaactcattcctcaagctcctcctgatggtcctccggtaaatttttatagctattgatgatgatttgtttgttttagattggtttagcatatggtttatatggaacataaagtcaaagtctttggttgtatcaatgattattttggtaatgcaaatcaggtccacactnnnnnnnnnnnnnnnnnnnnnnnttacccgagtactgtgcagcatgagatcatttggttttggccaaacagtgatccaaagtacaaaaacattattgaaaccaacaagcctccttacattccagagttagaagacccatcattcacttagttgatggggaatcgtgatattccttacgggtatctattggcttttacatcatttcaactatgtg

SEQ ID NO: 53199 - DNA, 615 bp, Arabidopsis thaliana landsberg
tataggcttttacatcatttcaactatgtgtggtaattctccgttgatgtttttgtgtaaatctgaaatctttcaggtacgatgtcttggtggaaaacctcatggacccggctcatgttccttatgcacattatggactgatgcggtttcctaaaccaaaaggcaaatacataatttgtatttcaaatagttgttttaatccttttaccaaccttcagattcttcttgcagagaagattgacagagaaggggggaaaccactcgaaatcaacgttaaaaaactagacaacaaagggttcttttcaaaacaagaatggggttattctaattttattgcaccatgtgtgtatcgctcttccacagaccctctaccagagcaggaacatgagtatcccgcaccagctgcttctgacaaggtcatagattttaacttgtatcaagattttcttgtttagagtcacatgttttagttacctaacagtatggttctgtatacaggcggcattgtcaaagcggagattgtctttgatctttatatgtattccggtcagtccaggtcgtagtaggctgatatggacgttcccgaggaagtttggtgtatttaaataaaagatt

SEQ ID NO: 53200 - DNA, 315 bp, Arabidopsis thaliana landsberg
acccaacctaaagcatggtcttcaatgcatctatgtcatgtggttcttgtaatctattcacgtttgaatgataataaggaataaacataaaaatactttagaatataatttttgtaacctaaaattatagttaccacttacaaaaaaactaatttatcaaagctaacacacgttcatacacaaattgttttactttatttcatttttctcaaattatagcatttatgtatagatcaaatccatattttgcagtaaaataaaaccttgagataaaaattaaaaaggtaaacgtagaaaaaactataaattatcacc

SEQ ID NO: 53201 - DNA, 568 bp, Arabidopsis thaliana landsberg
aaacacgtatataggaaagggtactatggtaaattagttattggtaatataggaagcccagtaaactaaatttaggttcgggatcagcccattatccccaaaagaaggaacacgtcatcaggagtgagagacgagtcagaaatctctgtctgggctagaggttcttccgtggcatcggagctgataaactcgccacgacacgaaaacggaaaatcgatccgccatgtttgattttgccaaataagagagtagagttctctagttttgaacgaagaagaagacgaaagaagaatgcataacgcgaagggattgttgggacgaatcgttcgagataagctatggagatttggttatcggaggagcttgtgctcgcttaaattgacttccgaggatcttgattaccaggttcggaggttttatcgtcatcattctcactctctgtttcaatttacggaaattttgaatgatcgttagctcaatttttgattaggttctcgttgaaggaagtggttgtcccgtactgcgattctcaatagaccactgctctcaatgcactcacactcacatg

SEQ ID NO: 53202 - DNA, 461 bp, Arabidopsis thaliana landsberg
  unsure (1)..(461): unsure at all n locations
gcaggctcttgcagctcgatttcgcccagcccggccagcgggccagagttcatccatcgcaggtcgttggcgatcttcatcagcgccacggcggcagtgttgagctggccggacagggccaccgcggtgtcctgcgagccgatcagggcgaacaggttctgcccgggggtgaactcgacctgggtcaggccgctgagctggctggcgaaaccggcagcgaactgtgggtgagcgttgatgccggtgcccacggcggtgccaccctgggccagcgcctgcaggctcgggaggggtcgcttcgatgtgtgccttggcgccattgatctgcgccgcccagccatccagcacctggttcatgcgcactggcatggcgtccatcaggtgggtgcggncggtcttcacgtgctgatgcacctgtgccgacttggcctcgatcacctgtaccaggtgcgccagggctg

SEQ ID NO: 53203 - DNA, 888 bp, Arabidopsis thaliana landsberg
cttgtgcttctttttaaaccactgtttaaggcacaggaaaaggaatgatcagatattttcgttattctcacagatttagtagtgttgatagtgataggagaagaactaaacaaatccaaaaaaacagagcagtaattaaagaaacagagcagaaagcagagcaagaaacaggggaatcttgaaataaggagaaatataaagagacttacggttccaattttgtgaatagaatgttcgaggacaatcgaaataaagagtaagacaaagcaaacaacagcaactgcccacgtagaggtctcctctaaagtccgctcttttacttgatctgccattagagcttaatcctaagaaaaaaacccaaataagattcttctaattccagaccagagatcttgtctttttatatataaatatagaaacacacgaagagaaagagagacacagtcagagtttcgtgttcttcttttgatctaacttctctctatattgaattagtacgctacgcaattttgaatctggtcataatatagagcagacgaaagagggaagaagaagaagaagataagaccctcaacgagagactgtaaactaaagaaggcgatattcgagaaagcttcaacgttttgacttttcttgttgttcctctcatgtgacgagtgacgacgactcctcaattatcagcatagccattattctttttggactactgtatatggcttattatagggacaatcatggggggcacgatgctattttaaatcgataacattgtggtttcagctcgttagattgtcagaacaagataaagcaaatcttgaatttttatgatccattacgtcgatatttatgatgatatagtacgcccatttagagcactgaggaagccac

SEQ ID NO: 53204 - DNA, 1004 bp, Arabidopsis thaliana landsberg
gcattgttctcatattgaacaccaacggaattttatcgaacatgccaataaagaacccatgccaatatatatcatgcttgttaggtttgtcttaaccctaagatacatgcatatcacaatgtatatattgctgtcagaagatgtgaatcttcagaagacttttaattattcaaacaacttacactcttttgtgtgaagcagtcagctttcacactcacaacgagacaaagacacaagagacgcacatttaaaaacatgcaccaaacgcaatggacgattttaatatcacgtggcatttgaccagcaagctgtacaatttatcattgactggcccaaatataaccaaatctctataggccatatctcaattttgtactaaccaagtgtgtataactaaagagaatcaatctttcattttcgtccatcaacttcaccatttacgtgttattgattgcttgtttcgccttttttgtttataattgttcattgagatatcaatatgtcattgttacaaagcttttagacacgaaataacaacaatagattttgagtaattcaattagacgtgagactcatcaagtgttgctttctttaggtttagacgtgaaacccatattgcagccaaaatacgtggtctaactaacctatttacataattactgattccgattgtacaacctacaatacacataatctcacacaaaggtgttgaattaatccaaattcttaacgttttaattctacatttttgttatatgcaacccatgaacaacgaacttcattagactatcattagatccaaagatcaaaatttaagaacacatgtaaataaacgttgataaaccagaaacttcctggtcaccaaagaaaatatataaaccaaaatgtattgcaagaacttttgtattatggcctatttaaccaacttaaacaacaaattttcgttgctagatttcaataatttctaacaaaaatcaaaataaaactgaactatatcatatgaa

SEQ ID NO: 53205 - DNA, 1185 bp, Arabidopsis thaliana landsberg
tactatcatttcatcaagcttaatcttaggatggtaagtgccagctcatgtactttaatagccacattgcacacatataaatagaaacagtttctagatttctacgtaaatgttttaaatatgacaaaaatttactatatgtttcgaatcgaaataatctagcgtagtagtattcataactaccatctaccaccaacattattatgatactgtaatgtttgcttttaataaactgtcgaaatagaaaggcgcaattagttgtatgtagagtaacttaatagtctactcatctctaaacaaatgtgaaaagactttttttctcgatcaagtcgacgaataacaaacaaatacgatagattttttaaaaattaaacttttcgaaatcataatacgtgtatttttagggaattttctcttctttttttctttctaattcatgtcgacgaataacaaaagctcaccatcaaacgaagaataataacacaaacaattagaactagaacaaaagaaaatgataaagcaattttattctcatgtaaaaatgacataattcaatgacgcgtgtcccaccaattatcaccactcactctccatatatacttcacatacaatctttcactcatatatataccacacagtcacacattctttataatgtaaatcaaaagagaactaaaccaagaaacaaaatgggatacgaaaggctcggaccatccggagcaactggttcggtcaccacctccactactacagctccaatccttaaccaagtctccacgtcagaacaaccggagaacaacaaccgaagaagcaaaaagaagcttgtagtatcatctatcgtcttagccatctcacttatcctcgccgccgcgatcttcgccggagtcagatcacgtctcaagttaaaccaatcagtcccaggtctagctcgtaaaccgagtcaagcaatctctaaagcttgtgagttaactcgtttccccgagttatgcgttgactcactcatggactttcccggctcactcgccgcttccttcttaaagatctcatccacgtgactgtgaacatgacgctccaccacttcagccacgctctttactcgtctgctttccttccttcgtcgacatgcgccacgtgctcgctcagcttacgatcttgcgtcgagctacttgacgattcgtgacgcgc

SEQ ID NO: 53206 - DNA, 1080 bp, Arabidopsis thaliana landsberg
aaaaatccatacttgaattcgatgtatgaagttttgaaagctacgttgtcttgcatgatgctgtgggggatgtatgctccaccaccaataagagtagttttcgtaataattttttgtcttttttagtttttcctttacaattatatattcgttaaacatcgctatgcaattaaattcatttattccttagaacgagtatcgtcaaaatagaatgttacagactatgaatcatttcgttatcatggcactttggtctttgctttctactagtttctacgagaagcaacaatatataattttttattttattttttggtaaaacaacaacaacaacaacaacaatatataattaagtgcaataagttatacgaagggaccaaactcgcttaataagctgactattgcattaaaaccatgtatgagtcacctcgattgtatttccgaaagtatatacataatttttatatattttctaatcaaaattagaaaaatacacattaaaatacatagtcaaataaatatatttagcatctttaataagatacaattatgaataaaaaactattcaagcttaactttctgacctactacaattgataaactactcttggtacgcaagtcatcgtatagaaaacttgtaatagttggaaaaacaatttatgttattttgattatgaggaacgacaaaaatactgatctccttaatgtaatctagacgctaagtactaatttaccgttggactagtgttttagccaataatgaaacatagattaaaacaagacacgtgtgtatcataagtctcatatcaattatacgacttattgaataagacttgcttcaaatttctgtttggttatacacacaaccgcacaaatcaaacagaagcgagaggtccacttggtggtcgacaagagtgcgactaatacgagccaaaagaagagcatcaatggaccacatataatggtctctttctacccacatattatttatttttagactatagtattagtacatgttattataatttgaaaactatgcaattattttctcgacgcgtgacatcagtagaggcttcacac

SEQ ID NO: 53207 - DNA, 461 bp, Arabidopsis thaliana landsberg
ggcacctgcatccccttcgtgcgcgttagcgcacaggaagggtgggcagcgatgtgtcggcgcagccggctgaactgccgacggagggattaaactagatcgttatctgcgatcctagctcaacaactcttcccggcggcaactgatagaatcgtgcgggcgacagtgcgactccggccatcaggcgatagagccagttgcgccaacggcccagttcggagcgctggtcgggcaccagcgtctcgcggccgatgaagaaggtggcagtgtccaggtccagcgccaggccgaagcggcgcgcctcttccagcgcgcggggcacgtccggcgtctcgaagaagccgtgatgcaaacgcacggtatagaagcccttgcccagcttctcgacctcgatgcgcttggcggcggacaccagcggtgtgtcctcgaccaccacgttgcagatcaccacccgctcgtgc

SEQ ID NO: 53208 - DNA, 1083 bp, Arabidopsis thaliana landsberg
tggttaaccacaaaaaaaacatattgtgtatgtccaactactcatccatccttttaggttcttctttttgggaagtacgctcggtagtggaatggatagttttttttttttttttttttttaatggatagttgtttgattgttttattctcaactttagccacaaaatctaaaacttggatgacagtttgatatttttgatctgttaaaatctcggaggcgccaaacttttcatttgggtgaagagatcctttgataactcccaagacacataatgatctgataccaaatctgtttttattagtgtcatcttatataacatttttttttttatgataagatgtgaatatattaccaaaacgtagtaggaattttatttaatgagatttaattattaatataaaaactttttccaggttttattttaatgagttaggaatgcaattgaatcattttttcaactatttcaacttaaatagtaaaaaaatggatgaatatttattcaactcttttaatttcttcaattacgtcaaccatttacacccccttatgtggtttgtcaattacagcaataagatttttctctgaaaacttattacaagaaaaattgttctattctttagtgagtttttaatctgctaatttgtaaattaataattcctcaaccacaatttgcacccaaaaaaacaaaattccttaaccacgaaaaaataaggaaaaaaaaacaaaattacaatttaagggggaaagttatatgaaattgcaaatataaccaccaaacaaacaatcgactatcgaggttacccttaagaaaatctttattcgcaagatctctctctctctctctctcactcgacgcactttagaaagaaaccctagtccgacgacctctccttcgccgctgaatcctcatcgctggtcagatttctatctatctcgctcttctatgtttccctatctcgttggtcagatttcgaatcttctttttgttctcatggtttttgagctcaaaactttggggtttcaatgtctcgatgttatacttagcgaggttcaatgttggctagtgaagtttggtattgca

SEQ ID NO: 53209 - DNA, 601 bp, Arabidopsis thaliana landsberg
ttatgccctgctccccacggcagtgatagtaaaggactgtcaaggaaatgtagcttgtattgtagtggaatatcctcggcctccacctaaatgtctgaattgtggaagatatggacatctcctaagccgttgtcccaagcctctgatgaaaaaaaaccttttcagaaggtttctccctctggttcaaaagaggtatatcacactcatgtgcttctaccgccctccaatggtctagctggaactgacgaagtgcctttaggcacatctttggcttctagcttcaaaatgaagtgcagacgttctcgctccaagaagagattcactagcactcctcctagactcattgttaatggtgtggttaagaaggggaagaagattctagaggggccttttgaatgcgttaagaagtgagtctgtaagcatgggttgacacattctgagccttcacagggtgaggcgatcttgtgcaccccagcgagcgacctatccctcctaagggttctggaacggagaggatggtcttgtgctccccagcgagcgacctagctgcaggtttatctgcaaggatttctgatcctccggacttagatatgtttcctat

SEQ ID NO: 53210 - DNA, 423 bp, Arabidopsis thaliana landsberg
acaaataagaacgttataaatattaaatcatatagtactactatatcagaaatgaataaaatatgataaagtcaatatgaaatagattgattgcatacattgcatagaaggacatgaattagagaaatcagttagtaattaatgagattcttaaatcggaatcacccatcaaaattttgaaatatatctagaaattaattgaaagtcaaaacataaaagaacgtaataaaccattattaataatattatattgtaaatgaataaaattatgataaggtcaacaaatactggagaaacaaaaatatacaacacaagatatctagtattactacttttaatttaaaagaactataagctgataactaactagacaagcaatcatatcatgcgcgcacatataattcttcaattatttaattttat

SEQ ID NO: 53211 - DNA, 550 bp, Arabidopsis thaliana landsberg
tctaggcctacattattcacaataaatcaacctctaaaaaacaaccagctacctccatatgaccaacgaatgagaaagaataaaaactagtagaagtgcccaattatgcaagaataataggcaccaacttataaagaaacgccctttcatataaacataaatgtgcgttatagagcacatgacaaaagattcttaagatcaaaacagttttctattcttctctaatcccactccttaacatcaaccagaagcttatacgaataataatctcccttgatgattaaaatactcatagaggttgccaaaaaaatcacaactttgactaaattcagaccttagaatcacacaaagattatcaattttatcagttaaagatgagatctttataacttccccgaatcaatcaatactatactatatatattattgtttttctctctctcttttgatcggtcagaattaaagcacatggcagccagcaagaagttggaattacagcacattctcttcctctcaaccaatcataaccaaagcattttacctcagagac

SEQ ID NO: 53212 - DNA, 456 bp, Arabidopsis thaliana landsberg
gcttcttctccattgcctctgtggtcgtgtccgtaaacagatctcaaaatacaaaaacccatcaaaccctctctctcaagactcccactctgtctctctctacctatacagcgaaaaactaaacctctctctctcacactctacactctgaaaacagcgcttatcttgctttctcctgccaaaaagtcccaaaaaacatcaatttctccagagaaacctctcaggttctacatgtgaatgtttggtaaagacagaaagaaagaaaagaggagagacatctgtgacttctttcataaacggtgtcgatctcatttctccttttattcccactagcaatctttgaaacggacccttcagtttttattttttttgcttgctggtctcaatagaaaaggtggaaaattttctaaaaagaaaccgggctttttttgagattttagcattcggggcttcttt

SEQ ID NO: 53213 - DNA, 481 bp, Arabidopsis thaliana landsberg
gcgtagtttattgcaaacttcaagtcaatcacaagggcaattctctgtcagacaacacataatgggaaccgtatcatgtatctataaaagtagagtgtttaagaaaaatatatatatatataaagatcagcagtgaatatgtatttgaatttacgaatcgtttggtccatggctcacaggtggagaagttggagtgaaccaaagggaaaagaagaaaaagcaagaggaaaagtggaaagtgaaggtaatggtgaaaaggggtgttcgagagattcattagagtttggataagttggagtttaaagtggaattatcgtcgggacaaaggcttagaaatggtctgcgtttaggtgatgtagttgggtgttaaaaagccggttagagcaagaggttggtagttggcgcgcgggcaagtagaatgggacacaagcgtgtgagagggtgtcacggtcgcgcgttgtcagtgtagtcagatggggca

SEQ ID NO: 53214 - DNA, 211 bp, Arabidopsis thaliana landsberg
  unsure (1)..(211): unsure at all n locations
accgaaacaaaattttcattaacaaacaaaccancaagaccccaaagacngagggcaccaacaacaacaaaaacaaccaaccacacnaaccanaaacaccagagcaaccacgagacaacaaaacacagangacgcaaancaagacaacgacgcnaaacaaaacaaggaggacagccccagccaaacgccacaccngaaaaggcccaccgcc

SEQ ID NO: 53215 - DNA, 1112 bp, Arabidopsis thaliana landsberg
gtcaagttgtatgtctgcaaaactttcctttggaaagctctgtctttgtgcccatttacaaacccttgttcaagagtagttgatggcacggaaattcaaatgcacgtattgattcaattactgcaaatccgtcaaaccaaaatatgaaaataaggcccaagaaaaatagcaatttcgcccaagagagagagagggtgagggtgccccaccctttgacattggaatttagtgaagaaccagaaagtgtagtagtcccttccggaatcggcaatatctgtgatcgcttcattttcaagtccataaaaaggatccggaattgctttgtttttcaccaatgtgcccaatacactgttcacaattaagatcctatatcagtaaaatctctcattcatgcatgaaacaattagaggtatttacataaataaaagctgattcataagaagaagaaaattaattattagttatcaaggcaaaatccaaacttgacagacacattcgaacaaaatcaaatacttaaacaattgttcttactttgattattaatagcttcaaattttcgaagaggaaagtgaacactattacttacgttccaggtacggcggcttccatccaccgagattcggaactgatggccggaggattggtggtagtgagctgaacgccgttgacatcgacctccgtggatctcgccgctatccagccgaaatctaacaccgtcttcccgatctccgccattttagtatctgatctcagcttctggaatgtttatgtcgaaaacagttgagagagttgatgaagaaacttgttggactggaaaaacgaaaacgtttattgtctggataagcctaaataagtaaatagagtaaatacatttttctctatcacttattatgtcatcaattatttaacacttatttttaatgacattagattttattttttttgctcaaatattttttaaatgacattagatttttttatttttttttagtggcactagatttgattgaattttgtattacttttattgatatattttaagagctattgaaaaatccgaaagaaatcgataatgctatgatcaaacactcgaatacccatactgaatatac

SEQ ID NO: 53216 - DNA, 1081 bp, Arabidopsis thaliana landsberg
taatgacgttttacaaaaaaaactctgaaggttgtaatttatatgatccctagaagaaaattatcaactgggggacatatgcgagtcttgtggttcaccggagaacgggagccctaactggctttcacacttagccccaatgctaatcatatccttacctctagtcacattaagcaacctttattagggtttaacttagagatcaatggaatccaacagaatttttccgcagctctcttcatatcttttaatctcatgttttttgcgcatgttagtggctgcaacacttgctttccacctaccccaattcctaaccttaaccctatcagcaatcctacaacgcctagttgctcaagagacgccataaaacttggagtttgcgccaaaatactagacgttgcagtcggaactgtcattggaaacccatccgacacgctttgctgctcagttcttcaagggcttgtcgatcttgatgctgccgtatgtctttgcaccaccattaaagctaacattctcgggattaacatcgaccttcccatctcgttgagtttgctcatcaatacttgcggcaaaaagcttccctctgattgcatttgcgcctgataagttgtatatggatgaatctatcaagtagttttatttttttcgtatgttatgcttctctttgtttggtcggttctcgtctaactcatccgcatgtattcttgttttagccatgtctgacaatctattggttcctacttttgttggggtaagtttttatctgtttcatgcgtttagttgacaagtcttaagggtattaccactaaaaacacatacaatgacaatataatgatccgataacaatttttgatgtttttccatgatttatctaaaatttgttattgtagatattttaaatagcaaagatcatccaattatattaaatttcgaggaaagaaatggatttcaagtcaaatatctcggtttataaaaaactaaatttagaaaacgtgtattagctagattaaaagataaaaatgtagattccaacttgtaacatatagttaaaatatacgtcaaatactctcaagtacgtagg

SEQ ID NO: 53217 - DNA, 637 bp, Arabidopsis thaliana landsberg
cgaggctttaattttctctctttttcagaaagaaagatgcgaccttttggttcggtgcccaacagtggcccctccattatctggatctgatgaagctaagcagcaagcacagtgactgttccatccaccagtgctgctacgtactgcatcagtgatctcaccccccactgtactgctgctagctgatgtttctggttctagttttattagagcaggggagtgccgcgctgtatggtgccgtgcgcatgtagtgtaaagcctaaaatttgtaccagagaaaataatgatataaataaacaaatacaattatgttaattattttggaaatttttgaaacatttggagattgactagttcctttcctttcaaattagtcaactgaccaataaagaaatatgtatctcatgctgatgttattttttttgtgatgcattttaattgaataaagggatcataacctaagtttgaccttaaattataaatgaaaaatataaaacagaaaacgagaaaagaaatttggaataaagtcatttattgctaggattaaataatgggaaaggagaataaatgataataatattgaaaatagtaggatttataatcgcatttggattattatttgagattggacatttga

SEQ ID NO: 53218 - DNA, 501 bp, Arabidopsis thaliana landsberg
acaccattctacagcttcttacccgcgaatgaccagattattcgcgaccaagatcgatcattcagcttgagaaccaagagatatgacacagtccctgatcatggcattgatcttcgccttaagttataataagttttgttctaagcagttttcaaaacttcgaatctttacaccatgagtttgtagttttggataaatatgtaacaaaagatatgccaaagacttggattttcttcgtttcttataaaaaaccaaaaccataatgcgagtgaaagaaacatacttaatcatggctatttcgcctttaagattaataatcaaaagactgtataaatggagacaaaacttaacttcaaaaatacaaacattatgttacaataatgttttacaccaagatcataaagtaacatatgaaaacgtattgaaacttgtagaatattgataagggtgtcatttgagtttctcatttcatatctagagacttgggacatgaatatagct

SEQ ID NO: 53219 - DNA, 934 bp, Arabidopsis thaliana landsberg
attcctataacacaaagagatcaacaacaactaatagcacaaattccatatcatatagaattttcacatgacatcaaagcagatatttggcaatgacatatcaaaagcaactaaagaaaagagacgtattcttacctatggcgccaattgcatcaaggcgatcagcatcttgaactaccccaaattctggaagagactcacagagtgctactcctgctaattcgtctttaaaacctggaaagaatacacttgttctgttcacaaatttatatacaacagaatgacttaattgttgtgataaatcatgtacattatagttgattggatatgttgagtaaaaagtaggagctggaaactgacccattccattgatgatcgttagtatcttcgtcttcttggtctcttctataccctcatcatctaggaaattctcaacaagtttctcttccgaagggtctctgaattccggttataattatttttgccatgaagcaacatatcagcggaaggaaagcaatcttcagcattcatagttaagtagtttttatgtttatatccacaccaagttccacttagtagagcctagcaatcctaaggtaagcaaatctgacaaggaattctcacaagctttacctaatggcattcgcaaacaaaacacttccaagtttctttattcatccagtttagataaaacaaagttaaaagcagggaacttagagagtttcatgagaaaagtaaacacttttgtttcctggaagtgtgatcaagaatgttggaagggacattactagtctatactcaagcggttcaaaagaaaagaaaacttagagaaacaaaccttatgtacttgtaatcacctgataagagagagggcaagagatacgaattatgatcaacctgtggactagaaccacattactaaaacagaaatgaa

SEQ ID NO: 53220 - DNA, 729 bp, Arabidopsis thaliana landsberg
atatagtactattccattaggttacttgtagtaccttgagcccaaagtttctcttttgacttttaaccaaattaacagtaatttaatagctagacttagaaaacaacattttgtatatatcttctttgacatcaaaattcaacaatctttgggtttctatagtgtttttatcttcttctaatagatttaccactcattatatcatataaaaagtgtttctttttcaatcaacatccattttctttaaaaattagcaagtttgttcttatatcatcattcagcagatttcttaattaaatttagtgatttccattttgcatctatatgtttctttttcttagtttccttggtactttaaattttaatatatataatttattaaaagtaaaagtaaaaactccagtttaacttatgttaaatgtttcatcacatatgtgcaaacaatgtctagtgaactattattaatgtatataaatgaagattatatattcaatgttgacacttgcaaaatcttccaaaatagtcaaatcttatcccttaaacaaacattatatgcctcactggtttttttttcttttttttttgggaccaaatatgcctcactggttactcttctcttttttagttaaacattcaaaattcagttggaagatcaaagattcatatgcataagagaattcaaattaaataatagactaatcggccttaatggtatcttcattcaacatt

SEQ ID NO: 53221 - DNA, 246 bp, Arabidopsis thaliana landsberg
catcgtatgaggctccccgtacctggttttcccgtggcgtcctattcttgcgttcttgtccgttggctggttagttgcggaagagtatccggtttatgtgactcctcgaattcggtctggcaacttgttgataccaggggtcgtattggacacagctggttttacgagaagaggactccttgtaacggcgtctggcgcgttacagatcgctggcgaaattggtggaccagtggagagacgaaatca

SEQ ID NO: 53222 - DNA, 886 bp, Arabidopsis thaliana landsberg
aaaattcaaaattcttggggtacaaaatatgggcataacggttttggcaaaattataaggaagtccagccagtgaaacaacaaacaatctatgtttctcaaaatcattcagctgttggtttgatattgagactctctcttctatatgtttgctaaataacttaaggcttcctttttctaggtttagttgcgagtagattttgaaaaacaaaagatgcatgaatggtattaagcgctgagctttactgatagacaatactaatttggttaatcttatactatttatttggggagtacatcgtaagttataattttgaaagtataacaaatatcattaggatgccatttaaaaacttaataatataacaaaattattccactaactaaactcgcacgtcatggatcataaatcgggtttacaaatatttacaaagattacacaaatatttaaaaacaacattaactatttagttagcaaatggtggtagaaaaacgacagtttgttaaatcatggacaaacggtaatctaaaaaaaaaaaaaaaaaacaaatctgtagctcatgactttttcgattggacagatgaagataaacgatatggaccatatgggtagcagaagctaagcttattagaagctaaagatgagactcgtcaacagaaagcgaaaattaagatgcttaaagaatctctaaagatcataaatatataagatgtgagtagtgtgaacaatacgttaatgaataaatacgagtaagaaagaaactataatttcaaaatgaagttatggcaattaatgagaagaaaaaatgcttcgtcgacaatttatcgtgttgttttggaaaggttacgagactggaaattgaagtggattcaaaaatagtgactgg

SEQ ID NO: 53223 - DNA, 321 bp, Arabidopsis thaliana landsberg
agccatattgagcattatatgtatctttcatctattcaaatgtttcttaaagaaacaactaaatccttattacaccaaaattgctgttccatccaaatccttaatcagttatgtttctgttgttgttgttgttgtctgttagaatgtgatgaggatttgatgtattagctacataactttgattttggaatggtataatggttttactaagctaaatttttgagagatgtcagatataaaaagaattaactgggcaaaaagcatatggaaccgatccagctcttttggacttttaaaagtgtttagtcgggttctgtcttc

SEQ ID NO: 53224 - DNA, 168 bp, Arabidopsis thaliana landsberg
cagagcgctgttgtgcattgtcgcgactgcttccagtgcgtctagccgctagcaggtcacactgacctgaacgtcgagcttcgccctcaacgccgtggaaggcacagtggccactgctacctctaggtcgtggatcgacgccgaatttgcgccaccatcgactcccgg

SEQ ID NO: 53225 - DNA, 1188 bp, Arabidopsis thaliana landsberg
gcttacgattgtgccaaacttgctaaagtggtttctcaaaccatcaggctgtgtgaaccaagggagatttccgacatagaccttgtgttggctttcgtacatcagaatcttctttggagttgagttcaagacttcagggtttcttcttgttcctggattcatgtcaacagagtacctaacccgcatttcccgaccacctacttccttcatatatagcaacaaaaccaaagcactcaactttacactcaaccagaagaaagatagacttgttttttggtttcccgggctcttactgttccatcaagagaagcaatggcgattttggcagagtttatagaacccattgtcacgtacccgcttccacggctctctcccgtctgaggatttcgcgatacctgcaacatcatttccaagcaatgcacacctctcactatacttgtcaatcatccatatactcaaaagagtaaccagtacgtttgattcgtcttgatggaactcaaagctaagtattttcaaattacattgtggatgatctttgaattttcaaagctaagttgaaagagtaaaactttgaattttcataaaggcattgtaggatcaatcaaatctggataagaagtaccacctctacagagattacagttccaaaaggctgaaacatgtcaagaagctgagcaatgtcgtagcttctagggatattacacacgtagagctcgcaaggtctcggtttctttactggttctgctttggagacgacactatctttattgggttctgcttctcctttaactacttcttcttctttttcttcatcgagaactgataattctgaagaagagaccttgatttgaagtggttgagctacaaagggacgagaaagagaagagtgatgaaaagaattggaagaagagaattgaagtttcagagattctaagtaagagtaagaagaagaagagattagggttttgtatttgggaattgcattgtgagacgatcgagaagaagaagataagggaattgcgaagcaagaggccgtcattatcgaaggaccagaaagtaaattatttgagatgaatgattaaaaaaaaaagaaatgaaatagaaattaatagaacaaatcgggtcgggtcatttaacccgttacaatcctgcttcgtattcgctacgtcagatgagacactctctttc

SEQ ID NO: 53226 - DNA, 970 bp, Arabidopsis thaliana landsberg
accattattgccataatcattacgtacgcatacacatagccacgatgtctacctatgtttaaatctttgaattctgaaactacgtatcttttatttttgttttaaaaaaaactagtacgtatcttctttccttacttagacatcatcttctagatcgaaattagaagaaaaacaaatgattaatatctacaagaacagaattttgcatttatactcagatactcttctagtacctcacaaaaataaaatgaaattggaattgaacacgccctaaattcaagtactatacggtctatacccatttgagtatatgaataatgcatattgtgagtgaaagagatagatacgatacactcttttctttgtttttcaattggacaaaaggaaacagattttgatctctgaattgaacggtcaagatcgtatataattatttcaggagattaagatcccacgtgcttaaaaactctctgtcagactctttatgtataaaatcctcggcccactcttgttttgatagtacactcaatagaaagacacaaagaaagaaagaaaggacaaacagaaataacaaaaccttccatttcaagaaagcatcatctttgtgtgtccgaaaaatggaagatctcgaccatgagtacaagaattactgggaaaccacaatgttcttccagaatcaagaactcgaatttgacaggtgcttactagaatcttggtccatttttttttttttttgtttctttagtttttttttccgataaagattaatcttgctttagttggtaattaatgaaaattgttataaattataaaatttaagttggccgatggaggaagccgttttcgggttccggcgagtcgagttcgcagacggagcggcaacgtcggcggcttcttcgaagaacgttgtttccagagaaacagacggcaaaagcttaatcagagactttttgctttcccggcagttgtt

SEQ ID NO: 53227 - DNA, 403 bp, Arabidopsis thaliana landsberg
taatatgaatctatgaagcagtaatgatgataatgataatgataatgatgcttcctcgtttgataattacatctatctgcactctctactttataagtagtagcaatctaagaaaaagggagaatttttatttgcctgtgaatgatgcaaacaaatgttttgattaaaataaggaaaagaaatgtgatgaagaaactggaagatttattctttacggagaaagagaggagaactggtaaaatgagagtttttttttttttttcttttgaagaagaagacaagacacagacctgagatagtaacgtttgtcctttgctttcttctctcggacactttgcttcactcaaacgtctctgttttgggttcccaggttcttttgccgacgtccgtgtgaagcgttttg

SEQ ID NO: 53228 - DNA, 509 bp, Arabidopsis thaliana landsberg
ataagctttggttttaatatagttcctagggtggatataaaatatcaggatagatactaaaaataggaggacaatattatatttttccacaagccacgtgaacaagaagagacacatagggactctgtataaaaacgtcacgtatgcgataatgcttatgtaagcttcctttatatgtcttcttcctcccatcttttgtctactcctcatgaaaattcggaacaaaaagagaggaccatttccattttttaatggacgaaaagaacttcgacttttcacctagagataggtatatattaaagcagagagaattgcgggaacattttacagaaatttgttgttgacattttgttattgtgggtctctctatatgcctagttttaataataaaacgattctagaataatatcatgagaaaagagtaattgaggtagacgggcattggtatatattcaaagttggcccaacactaggaaattaaagaaagaagaaataacagaaaagaaatg

SEQ ID NO: 53229 - DNA, 514 bp, Arabidopsis thaliana landsberg
  unsure (1)..(514): unsure at all n locations
tcgttatagtggatacttagtagtatagttctaaggttattcttatagggatatagatacgttccttaaatgggaggaggcccttaggccctatactctagcccttaaaccccggagtcgtacgcttaatagcggtctttcggcgctaagtctttaggtcttcgtcttaaagtcgcctaataagctccttaaggtccttatctaccttagtaaggtaggcctacttagaggcataagctagctatacctacgcgttagggagacagcgcgtatacccgagctctccctaattaattatattaaccgatttatccctatctttattctcttcgaagtataggatacttaaggtaagcgtacttatagttagcgactagactataatagaacggtgattagtcgtctacgattcgttagctatttagcggcttaacggcgaaattaggttaaccttatagttactcggtagctatcgccgagagggtctatncgcgggatactcttnctagcgcga

SEQ ID NO: 53230 - DNA, 592 bp, Arabidopsis thaliana landsberg
gcggccatacttggcagtaacgggccctccgcccctgtccctccctcctccagtcctccggatcaggccgtcaacgaacgaggacagcagtcagcagcactctcacatccaacggcccagacggcgagcaacacaaacccaacgaatcaaattcgactacttgggccgtgttgggcaataaaagcccaacttatcaaaccagagcgagcccaccaagcagccgccttcttcctttgcggaggcggaaacccgaaaacccttcctcttccgccgacctctcgacagcattagacgcaggcgccgccgactgccgtggagagcgcgaggtagctgcgggtgctagggtttggctcgagatggggaaggcaaagagcaagggccctaaattcgcggcggtgaagaagattatcaccaagaaaaccatcaataagtaaggcaaccatctccagctgccagtccgctcccctatggttaggttcatgctactggaaattctaatttttgtgtatgataggtacaaggaggatgtgctgaacacaagaagaaggacgcggacaaggagaaactcggccggaatgtgtgagtgttgtgt

SEQ ID NO: 53231 - DNA, 631 bp, Arabidopsis thaliana landsberg
  unsure (1)..(631): unsure at all n locations
ttcctgacatttgtgaatattttcatatattataaaatttcactcgtgtatagattgtgaattttacagtacacattgtacactgtccacttctcaagtggtgtttacagcaaaattggtcaaattaaatttgaaactgaaagaaaaagttactaatgaacctccagctgcaaaagaacttagggaggtcataatgatgagggagatcgatttcgagtcgttaacaaatagctattcgaaaatttgtcatatagatctaacatatacttcaactttttattcttactatataaaaaagaattatttctactattattttagtatggttgaacactttatatatctatcccatgtacgtaaaattgtaagattatccttttttatatagattttttggaagtaagcatttcaatataacttttccctttctaaatattatttattgagaaaacataaagaaattatttctagttatatataactaataaatattaagcctgctcttactccacgacggtggttgctaatagctatagctataanacactttttatcaataatttggaatatatatttaagtgtttatacttgcttggaagttgatgcatgagtgtatgattggttgaattgt

SEQ ID NO: 53232 - DNA, 946 bp, Arabidopsis thaliana landsberg
  unsure (1)..(946): unsure at all n locations
tcacagctcgattatctcattaatgtcccctctacgttttcttaagtcaaatgtttcccaccataactaataatgtacttatgtacacatgacaccgtatgtagcctcacctaanacatgctacaatttatttgatttagacattaaaatatatagtaatctcaaaatattaatattcggaagatcttatgcagcacagaagaatacaatgcataattgttgttacatatacatgcgtgtgtctctcaccctctatcttatagatttgcgatgaagagagatccacggttaggatttactggaggctntgtcacatggggccatggcccatagggagtctcgtcacacatcgccattattgctacagcgatcgattcgcgctaaacgccagtacttaaaataatcaaagtattcgttatacactaaataccaaaatgctgaaattaatgaccattacgctcatgacatgaatcagatatagtcaatcaaagaaggaaatcaacgctagttaacataaatataaatcaatgataacgcttcttcatcattattcagaccattcgtttcagataagaatattcgactgacacaccgttacctgcttacttgtagtgcggaaaagaaatttcatatgcatatgcataggtaaaaatattaactttcattttctttgacaaaaaaaagatttaactttcattttctgtaaaaataaaagtgaatcggatgtccagagagggacatcgatcattcattgttggatttattacttaactataatcgttgtaattgaaaagaaagctttaaaaaagaaaagaaaaaaatgtgtatcaatatcataccgaaaattattacgtataatcgcatatatatagatgcgtgtaactaatcacgtgtatgcagctgcatagacagtggatttaaccatttaggtcttctttagtcatta

SEQ ID NO: 53233 - DNA, 943 bp, Arabidopsis thaliana landsberg
agttttttacatgtgtctctttctctcaagctcaatctttctcataaactcagaatctccttcaaatctctccattagtgtaaacctctttcttccatatcggaaccgatgccttcaactcgtcgatcaagaacttgcaagcatctaaaccatctgcacggtgaacagatgagaccgcaatgagcacgctagtttctccaacaggaactggtccaagacggtgagcaacagcaatcttgtggatatcccaagttgatctagcagttgtacagatcgagctgaggcatcgtgtggccattggcacatatgcttcataccttaactccaacactgtcttgccctcgaacatgtctcttgtagtgcctgagaatgtcgcaatagcaccagcttgaggggcactgacataatcaatgtacttaacaacatcgactttgtgaccttcctccaagatctctataaggttcttctcctctgcagacatctttgatccaatagtaaacctcgatacaatcgatgttctaggaagagtaaaccaagcttagcagatgatccgatagcaaattctaacctgcaattggaggaaataaacaaccatgactatctcatcacctatcatccaaaactaatcaaacagacaatttgtttagtcaaaggcaaacagagcaaatgaggaacctttcttgcgcaatctaatggcaatcacatcttactaatccagaaatggaagagtcaaatcaacaaagtaggagaatagtggaccaatgaacaaactcaaaaaacgatgtctcaaatcggattaagaatttgccaaatcggtcaatttttattgaatcagacaaaaacagcaaaggcacataactcgtctacaaaactgaccaaagttcgagtttttgtaagattgaggatcgaatggatagaatcatagaatgacagagattacgac

SEQ ID NO: 53234 - DNA, 251 bp, Arabidopsis thaliana landsberg
cccccaccccccccaccacaccacaccccccccaccccccccacaccaccacccccaccccccccacccccccaccaccaccccacacaccacccccccccccccacaacccaccccaccccaccccccccccccaccccacccccccacccccccccccccccccacccccaccccaccccccccccccccccccccccacacccccccacccccccccccacaccccacacccccccccacccccccca

SEQ ID NO: 53235 - DNA, 832 bp, Arabidopsis thaliana landsberg
tttattatctctatatgtctcacgagggtcttataaaatttcaagttagagcatctgtattgtttcgaaaattagctctattcatactgcggttttcttctgtagtgtcttagcccagcaggagaatacaatcttcgtctagggattattaaggagctacatccagatatggtggcaacgtattccggcaggttgtcactgcaaccctcttttctacgaattcatctgatttagatatggagtttatttttcttatagtaatctcatatgtcaagctttacctactttgtcgttaatctgagctttgtttcatcaagtgttgacttcttcctggaaactatgtttagtgctcaggtcttcgaaggtcatcctttcattgttgaagctggtgttagtttgggtggaagagacgtgaaacaggcaagtcatatcctccttttgtttattcatgtgtcatcaagttctcatagatttaaggttgctctaagtatgagcatgaatccaccataaccattgctctttatcttttgtcgatctcactcttctactatctaatgggttattttgggaatttgctggaactgaaatggcaggggatcaacatattccgttttgcaaaccgtattcctctcctttttgaacaaggagctgatgttgtcaccaggacggccttaaaaagaatcaagtgagactctttctttagcttgctgtattcctctctgtatatcgttatagttggtatctttctccaacttttttttattaatgagtattttcaaaacattgcagttggaatagttataagatcaaccagacgccagataaaatagga

SEQ ID NO: 53236 - DNA, 1061 bp, Arabidopsis thaliana landsberg
  unsure (1)..(1061): unsure at all n locations
ctcttttatctcatccactctaaaattacttattcatcaaattttaacagtagaagacttaaaactactgtttcttagcaaaaaataaataaattacatagtccccaattatatacttcgaaaactatatattactaaaagctcaaatataatgttcaattatactctcatggaaaattataattctgttctactacaaactcaaaaaatatgaagataattaatcagggcaagtatctcgctgcacgtcacaactatctaaagccatcgatatctataaccgactaatattctttcttctctaaagaacatattcattggtttgtcctttcgtattctctaagccgaaatatacggactcattgaattcttttttcggtttaacgaacctcattgaattctcacatcgatgcaaagtaacatcacaacccaagaaaaaaacggtgcaaacataattaaatatagctaattaattaagaaaaacaaaataaaaatgccgaattcattgtcataacgccctctttcacacacatatctttcatttcatccaacaccaaaccaattcatgcgactcacctcctccctccacgtgaatctctcccaattttaaccttgccaattttcctatattttacatcaacattacttatatataaacgggataaattatatagaatcatttcaaaaccgacgtctttcttcccatgcattgcgcatttaattaacgctgccaaaacatacatgtggatatatatatatagtttttatatatagatgtacctttaccttcaacttctccattgttcttctccaagtacttctctcttcaaccaaaaaaaaagagtactttccttctcataggatttttttgctttctcttgaaaaaccttttgttattgttattggttcgtacgttgttcattatttgacaagaaacaagattacaaaaaaaaaaagtacatcaacccaaaataatggagttgatgaatttggcttcaaaagaaacaagctattggatgattgcactgcctgccggttttggatccaaaantacatgatgt

SEQ ID NO: 53237 - DNA, 935 bp, Arabidopsis thaliana landsberg
ttgattagggttatgttttttgttataaagctagcatctaaagaaggtttacatatcattttttggataaacaataataaatttgaaggttgatgatcataatcaaaatcagtagaattaaagaacgacacctgatacaagtaacggctactttagtagttagcgggtgaaaaagaagaagacatgctaacggtcaattccagcctggcacttaaattacgaaagtaccctccaacttttttctttatcctttttaaatgatacgctcctttagttaaataaaataaacatttgtctctatttctctaataaaaattcaataattgaacctcctctctctctctctctcttctctcccttcttcttctccgatttcgactttgaatcatttcttcgagagaggtagcgagaaagggatcgccttttctcactctctgcggattctcaattttgggcaagaaggcaagaacgtatgttgagatttctgatgaaaaatccattcttttattctttcttgaaatgatcgacttgggatgtgattcgttgctttctctcacatttcgtcgatttttgtatttagcttagcctcaatttggtcttatgagttgttcttggaaaccctagagtctctgtctccgtcaattgcggtagatcccaaattgattcgttttagggttttctttgattcatcaattggttggctttgttcttgtttcttggatgcgtttcgttcttatcaaggtctaatttcactaattttgctttactctcagttaattcgtgtcttcactctcctccaagagtttcaagtttagatttttgtacatagattttgctcaattgccttacttttaatagttcatttctggtgtggaattggatttatgatttgacggattgatatgtcgctgaaacgttaatggatattgttgctt

SEQ ID NO: 53238 - DNA, 864 bp, Arabidopsis thaliana landsberg
atttccaaatgttgggcgtttctcttggtcattaacctttatcaaaacgttgaggacaatttttggtgaatcttgtttattcttttgggatttttactaacaggaaagcaaggaaactgagattcccgtggcattttgtcgtggtcttgcaacggcacgtcttcatgggagagctcaagttattcatgatgtagtttcagatccgcaggactcatcagactcgatggaaactccatgcggtgatctgatcttttacttggatggtgctcacagtccagagagcatggaggcttgtggtcgatggttctcttctgcagtcagaggagacaaaagcttatccactgctgtcaatggttacatgagacatggggagtatggtacagacttaaacagagtctccaaacaggtattcaagaccaacaatgatcaatgcaatttctttgttaacacaactcttttgctttactattcaaggtattgcacattgatttgtgtttcaaacttttgatctgactttgtgaagctttcctatttgtcgacagattcttctgttcaactgcatggaagtgagagaccctcaagtcttactttcaaagctggtcaccacttgcgcttcctcaggtaatacaaaacaaactatatactctgtttttctagtttcgtgttaatacttatgcatattggtgaatgaaacactctcagacactcatttctcaagagcgctttttgtcccgagcatgtctacttacaacaaagtcatttcgggtgcatcagcgattccttcagatacacgtagaaaggatttgacttggcaattcagactacaaagactatgggagaaatcaatccaagggactggttagc

SEQ ID NO: 53239 - DNA, 526 bp, Arabidopsis thaliana landsberg
  unsure (1)..(526): unsure at all n locations
atgtgtaacgggagtttgtcccacaccgtagaagtcacctaccaccaagcaaagacaatatagtattcgagtgtcgaaatatatatacaaggttagtttgagattttcatttttccaagaaagttagtttattttctcttagaaaaatataaatccttttggaaaaatgaagttagcactaaagaagtaaaagcacatctgctcgtatgctaaaactctcaaaatacgacataaaaactactaaaagcgatatagattcataaggcatagcttttaataagaataagaatataatcaacacgagcaacaaaaatctctcgtgtatactaatgtaaactaaacaaacaggtaaggaacacaaaattctggtgaatgactgtttctctagatgagtggaatgatcagagactagacgaatgcaatggannnnnnnnnnnnnnnnnnnnnnnnnnnngtctgaacatctgaaattcgtttttagctcgggagaaaagcaacatgtctacatggtcacatcttttttttt

SEQ ID NO: 53240 - DNA, 694 bp, Arabidopsis thaliana landsberg
ttcttcaaaggtcagatatttttgcttctaattgaactttgctttctgattttgttattggtggggaagaaagatttcaatctgttgtgtttttcaattgcaggttttcaaagatgctgttcgaatttcattgaatctttgctatgggcttggttgtcctgtttcaggcaggactgtttttgtttatcctgttagcggaccttctttaagtgatcaattcaacgggaatggtggatctcgctatgatgatgttaaccatctatcgctgcttgcctgcaaagagttgtgtttagagttgactcccttcaggaatatgttacaagctaagaatgcttttgaaagttcttacgagcagaacggaaatgggaattcaactcctaagacaccagcaaacttgcaaaagtttagttctcctcgccccaaatctccggcttcaccaatcatagaggactctgttttcagttgcaagcagcggttttcatctgaaagctcgattgatctacgagaggtgttgagcaatgaaagttcgaaaaaacttttgcagatttgtgcaagttcgtggctttacccttgtagcctgctatatgggaattttgtgtctgtgcccattctctcagaaatctgtatattctgcgtcaaaagagcttgataaaggccatctgacacatccaacagaaatcatgcttttatgatc

SEQ ID NO: 53241 - DNA, 876 bp, Arabidopsis thaliana landsberg
aaaaaaacgtagaaaaattgaatatctaaaagcatataaattgtgataaacatcgatccaaccctagcagattttatttcttaccattattttgtctaaatgtatatattttctataagacttaaaacatcatgtttttcacacacttataatcctaactaaccaaaaacttcaagaaatttcaattcatttaaccaataagtattacaaaaaaaacaattctataattagacgaagaggaaccaaattaataaacgaataataacataagtaaatcgaatttcagtaactagccatacatcttttcgataataacctgaatgattgataacaattcgacaacatttgtataatagaaagtgaaaggagacttttgtatcggtccattatttttccattcatcttcgcatttgaacatatagtgtgagccatccactgcagaaagctgagctatggactcgagcccttcttcttgtgcttcttcataagccttttggaagaaagcagacgctaaactgtagtgctttccgcaaaaatagagtcgtcgagtcccaatcggaccactaaacttttggcgaactttgttgatttgtttggttgccttggtcaattggatttggcattgagaaatctgataataaattccaataagaaatcaatactttttacgtatgaacaatacataataattaaaggaattacaaacttactgcaataacaagcacatcatggaggtcgcgtgcggctaagatacgtatgtccgttccaatgtatttcaagcagaagttgacgtcatctgtatccttgtaaaatgcgtacatgttcttgatagacatcgcatctgcgactgtaaacgcaaagaacacgaatactaac

SEQ ID NO: 53242 - DNA, 604 bp, Arabidopsis thaliana landsberg
atctttatgtcggtcttccacactaggtggatcacaggtgacttctgtttctctatacggtccgatctatgcaaccggacggtctgtgagaggaccggactgtctggtcctgccgagcaacgcctgcgacctttgtgatgagctctgtgcgactccagactgttcggcgtagggtgccagacggtctgacggagggccagacggtccgagatcgtgtgtggatagtccagctatgctcagggtcgacaaaagcgtcaacgaagatggcggtgatggtcgtcctggatatgagtccaccggtctacaagaatatggctggaaaaccatttattgtcgatgtgtttggcgtaattgttttggtgcccaattctcatgacaaagaattagatgcgcacatttttttctaacacatgcctaagtttctctatatattcgtccacccttttaacccgatataaagaatttttagaagattgaacaacatcggatgtcatggcgttacttacagtggggtgccatatgaaaccttttagagaaatgtgtcccaagtggaggcgcaaaaagtgtgttagcgcgatctgggcaacgaaatcactaggggtgt

SEQ ID NO: 53243 - DNA, 597 bp, Arabidopsis thaliana landsberg
  unsure (1)..(597): unsure at all n locations
acaatattcataagaaacataaatgatttacataatatagagttttgcttcataaatacctccaaaggaattaagaaagccggaaaacaccatgtttgctgcacacgacccttaaaatattttatcatatggaagatgtttttaatgttatcgtcaaatgtgtatctcccccacggacacgtttcacaagcatctaaatcatccacaattcgatatataaaagcatcgatgaacccaaactttttcttaggtgcaatgacagtgcttaagaaaaaaacgatcgccatttgtttccgctctccacattctcccatggaatgtagcttctctctcacagctttgatgctgaccactatttttttctcttttgcttgttcttagtcttcttcttcttcttctccttcttctttaaaatagcttctcacaaacctttcactccccaaattcttatagtttggtggataaatacaacagtcaaatccacacaacaggccatgttccctacatgaataccggacgggaacaccgtttgacacaaaccaacagacactatatatttncataggagccgtgcaaagcaacaacatccacatatgc

SEQ ID NO: 53244 - DNA, 503 bp, Arabidopsis thaliana landsberg
tattatcaccgtaatgtcaacattgatccttcgataatatactaaatattaagaaagtatagagctttaaaagtttacaccacataactgatatattagtagattagtagacacgtacttaattctagcacatgactaattccaaaattgaagtatcacctaattagaaaactcaacaatattgtatgtaatttcttcacattttgacgttttcgaaatatgattacaaatcattcacaatctgttttgcatgaaatcataaaattaataaaataatatacataaattttattttcattcctttttggtgtttatttgtcttgagttactaacttactagtcaggtcaaattacagtttttcattaattgtttttttaattagaaaaccaaattgtaagtcaaaggtttacatataagcaaagtgacataatggtcggtgaagatttaagcaaagtgacataatgaaaagtttccacttgtcgtgaaattgaaatgatttgct

SEQ ID NO: 53245 - DNA, 1121 bp, Arabidopsis thaliana landsberg
cagccggttttacccacccacccattttttacttccttcttttttttttggggggggggggttccttcttttggaaatcacatttggggtccattattcaaggtttgaattaagagattccaaatcggagaagaaaagttttataataagtttgccggaaacagacgcaaaatcatgtgcaaattggggaaatttgattgagaagcaatgcattagcgatgtcagtgttttttctgaacattgcttgtgaattttgataatctcgaattaaaagtcaatgaatgaatattaaattgttaattacgtaattagggataagaataaaaacgttaacacgaaaaatggatttaaattaggtgacaacacactagctagtatcatttttttagcaaccaccacgtgtataaacgtaactacaaaattgaggattaaagttaaatttgaattcaatggaaactgaatacacaaaacagattccgagagatacatttgtcagcataattttttatatatataaaagcttaaacatgcaagaaagttaaaagcattttatctttttatgcatactaagaaatgcctatgaaaaggacataaaatgagggtataataaaaaaaatgacatttaaatattaaaaagaaaattagtgtttgcaaattaaacagaagaaaatatggtagaattaaatattaggaaaaaggaacaaatctcatatgtaaaaatttcaatcctctttactcaaccacactatattaattaggtaatctataatttatggggaacaaatcttcttatctcaaatattaattgttatttttattaatataagccaccccacactataaatatgtgtgttcttcaactctcatttaccaccattatcatcatctgtgtatcacgcacacatattgttcctttaccttattttatataagaaatggcttcttatgaatcacaaagagatgtcgctgaattggcgacccttgaacaaactaaaaagaatgtggaggatgtcgaggaggttctaaagaaactcgaacaaacttatttggggaaggaaaaagtcacagatgatacgcttttgagtgacgaagaaatggaaaaagtcaatcagatgatgaac

SEQ ID NO: 53246 - DNA, 594 bp, Arabidopsis thaliana landsberg
taattcatcctaaacaagttacaaaacaaacaaacaacagagattattaagtgaattgtataatctatatatttagattatgataattcataaacaagttattaattgcttatataatctataaactggattatataatcctataagcaagtaaacagtgtcataatctaagcagattattaggtgcttattttaaattatcgtttagcgttttacccactaatattttttgtaaacaaacgtctctaatatgagtatataaagtggattatataatcttgattacataatctatgtgaaataagctaggttatacaatcatgcaggaaacaaacatgccctatgtctataactatataaatcaaagcctattgtcgtcctccagtctgcaaaaggctggataagtcgtccttcagtcaacctactaccggtgagccaaaaaccaccgcagtaattctagttcttactttcacaaacattgctaccaaatctaaccatgtagcacggtgtggatgttttgagccagcttcgacaagtaaatttgtttttgtgtgttctgtggctacatggtgtacttgatgggcgcaagattta

SEQ ID NO: 53247 - DNA, 1146 bp, Arabidopsis thaliana landsberg
agctcaatgtcttcacactccttcttctttatttatccatctttctatgcatttctgtaaaacctaaacatttacatacaaaacttaatccacataaaatattataaccatgtccaagcgacgcatttgctgcatagtttccggaatcatctttgtcctcttcgtaatcttcatgaccgctttgatccttgcacaagtgttcaaaccaaaacatccgatactacaaaccgtctcttcaactgttgatggcatatctacaaatatatcactaccatacgaggtccaactaaatttcactcttacgctggagatgctgctcaagaatcctaacgttgcggattttgaatacaagacagtggaaagcttggtttattacagggatacactagtgggaaatctcactcttccttcgagcacattacctgccaaaggttcagtgcttttgccatgtcctctgtttcttcagctcgataaatttgtcgcgaatttaggtgatatcgtgcaagatgtattgcatggaaaaattgtgatggagacaagagcaaaaatgccaggaaaaatcactttgttgggaatctttaagatacctttggattcaatatcgcattgcaatctcgtactcggctttccttcaatggtagtggaggaccaagtgtgtgatctcaaaaccaagctgtaaatagttttttcaggtaaacatttaggcttaagagagcagtttaattctagctagtttcctgtaataataaagattgtagtgatcttgatcgctgttctttaatcaactccatttttgtgagttcttgaaattaaatgtattcctttgaatttgaaataatgaatttgattcaaaaatctgaattattttatttttacctccatttgaaaaaaggaaaaatagtgaattattttttattttttttatgacaaataatttggagaagacttgaaaacacgaaatcaacggatagcgacatcatgaaacagagttagaaaagcgtgcctcctttttttagtatctatctttctctctttcggatcattctctcctctgattccgaatcgggtaaattattatggattcttcttcttcgtcttcctccgccgccgcacgccgccgcatcaacgatatccactctcacctcg

SEQ ID NO: 53248 - DNA, 516 bp, Arabidopsis thaliana landsberg
cttcctccgccgccgcacgccgccgcatcaacgctgggcactctgagcctcgtcacctcttctcgctcttcccctctcctccgctccaatcccaccgccggcgagttctgtcttggtccgtatttcctcatctctctctctgatttacactagtagcttcttctcgctactgattacttgtgtttctgatcgcaatcagataatggctatagtgttgttcttcccgagaaattgaatactggcaattggaacgtctacaggttccttacgcttcctcttcttctctattcaattctctttttttttttttgtttatgttttgaattcaatttttttcagatctgcaaaatctccgttcaagctcgttagtagattcccagatcatcctgacatcgctactctccatgacaattttgagtatgaatcagagtctccctaaagctgatcgtctcttctatatcaattctttagtcatctcttttgattgatactgttcttggggtctatgtaggcatg

SEQ ID NO: 53249 - DNA, 1148 bp, Arabidopsis thaliana landsberg
  unsure (1)..(1148): unsure at all n locations
tattttttgtttaaaaacaagtaattaaataaaacagacaccaaataaaaagggaaaccaaagatatttacgaaagttaaaaaaagggtgttgtctatgtcagtgcaatgaacctcttcggttcatcttttcccgccatcccaactaacagatctctcaccgtacacgtcaacctcttcaccaaatctattgactttctctctgtgctacgtggcgatcatccggtctgtttcccgacaataatgggacccatttgattgttatttcgaaaatgattttatttttcttcaatattgttttggaagtaaaaagaatcatctgttgacaacacaacacttcttgccttctcgagtttgattctcctcctttctgtttttggtatccacccgattgtcattattttattttgaactctagaaccaaaaatatcagagcaagctctctagtcagtaaattttgtaattattatagtacctcatttttattagtagcattaatgtactagtgtggtcagtgtagatgaatatattttctactaaactaataaaaattgtatcataatttgtatattttttggtgttttcatcttctactataaaatatatttttgtgacatatggcatgttacactaaacaaaaaataaaatacaagaaatttgcttttgtataaaataagtaaattacgttttttgtcgaccaatattgattaaagctcaaaagaaaagagcaattcctaggagatattatttttatgtgaaataagtaaattactcattatgtaaaaagtttggatttatcttaaatctaatttcataacgtttaatgcaagatattttggtaaaataggaaacgtataataaacatctgtattcaaaacttctataaagatacccaataataatggaggggtgacacgatagtaaatagaataagaaataaaatttaatcaagtcaaaataaaataaataccctttgtttttgtttccacaattccttaagtctttctaattacttttttgttcactaaaacatctcacattgtgctattttttttaataaataaagacctctctctttaaaactgattatnccctaaactatttgtttgtgagaaagaaagagaaaaaaaagtttttttggttggaaat

SEQ ID NO: 53250 - DNA, 1407 bp, Arabidopsis thaliana landsberg
ctacacgagtacttttgttttatgtcacaaagattttttcttttacttactccatgtgtttttttcttttttcgttaaaactactcctcgtaaattataatcaagattttaagcagtgtgcatataaaataaaatacatgtacagtctagaaataatatatgtggattcatgaatctttcatttttaatttccccacacaatttgtatcaaacgtttaatgcccataaaagtggtggtccaggaccctgagattaaaattttaaaaaaatatatagagaagaggcttgggcttgaagaatgaaaaattgaataacaaatattttaagaaatttgggacccgaaagtgattgggataaagtgagatatgtcactttacctaacattatttaattttatattaatgtatgtaccactaaatttggcccttttctccccatcgactctttgtagttatttatacttttgtagtaccaataatagaagaatcaactataaaaatttcagctcaataaagaaaaacagaactatgaattaagtgagaaactcaaaagcctgcttctaaaacatgaatacgtccacgataattatcacaaagttctagataatctaattttgcgggaccaaattgatgtatatgcgaactttttcatacttttttcaccaacaaatgtatatacttcccatcatgcatgctcccatggtatctcgccgagtgtcaatatatgtgaacttacataaccaaaaattgatttataaagataacaataataagggagacctaaaaatagagaaaagggtggtgtggactgtggagaaggtccctacttacagaacatagcttccatcaatcacacaaaaatccaaccactctgaacctttcacttcaggaccaacttcgttatccaatcatctcccaatatgccaatactttcacttatatatgaacgtgtatatataaacccttcacatttacttcacaaaaatatcttttaaaaaaagatcataatcacaactactaagctagaattttgttagtaaatttactactacggtaattataaacaaattatataggtttcttaaatagtagaacttaaaatataatgcaaagttatgtacgaatactatcttttaattaaaaataacgatatgaatgttaaaaaaaaaaaaaaaaattcttgtggatgatctatatgttgaagtaaaatttagttattaggtttaggtatacgtcaatcattcatgatacatggatcccaaacccataatatatcatgcatcgatctctgaagatgaccaaagcaaaaaaaaaccatgtgacatgatatactatagtttgcatcatttcgccaacgtaacttgtttgatgccctgaacctatttcacatatgactcatgggagagac

SEQ ID NO: 53251 - DNA, 697 bp, Arabidopsis thaliana landsberg
atcaggattttccattcagttgaaatatcaaggaattcccaatcttttgttgggttggaggcgtcatatactgacaaggatgcaaggtatttggcactaggatttcgaagtttatagacctgacctggaataaatcatttgaaaatcaaattcgttttctacgtttccccatatattagagcacaccaggttaacaaaaatcgattgcagcaacacaatatttattcacatttcacatttcacaggaacaaggctcggttagaaggaaaatggtaaacctgtcctaactcgcactaggtgaagccgagcttcacaaattggggcagtttttaaaagtgtgccaccagaaaccacagatggatgaaggttcgccgactgtctgaccagcctccctactaacctagccacctgttcattgtcagcttctctggtttcacatacaagtttccaatcccacaaatcaacagacgggatctcaggcagggtcttcccaggggattcgatgacttgaccatattgtgctagccatctttcttcctcgcttgaaggagcagctagaaatgaaacagtgagcatgaaagctatgaatatgagccgaagaaaacacatcatcgaagtaataagatccccctaaacagcactacgggggttagtaaattatttcaaattttaagatcagcttacgagagaaaaatac

SEQ ID NO: 53252 - DNA, 575 bp, Arabidopsis thaliana landsberg
gatgtccatatgcctttcattagtttttaatttcttcctcgcacttttcctctaccctttagttttagagtctgagctagagaagcttcgtcattgggtgggccagactgttgagtgcattggggctcgcgactccttctcggtgggacgcttagacagtatgtcgtgtcacatccgagatattatggattttagcattcaccgaggggtgggcgtacgttggtcgtcgaggagcttcggtctggatgctgtctctaggacgtcattggtcttccttaggacattcctgatgatgggctggaagacatattggagggtttcgatgaggttgtcagtcccatcgtggacaggctatctgcgaatgataccattcgcaaagcctattgtataatatgtcttgttgtttccttttgaaaaggaacataagtttcaatatttgtattgccccctgttgtttgcctgcggagttgtgcttcgtgatcttacgttggttcgattccttcagaggttccataggccaacttgttaggtccaaggtcacaaccatctttaagatgtgagcactaaacggctac

SEQ ID NO: 53253 - DNA, 473 bp, Arabidopsis thaliana landsberg
tctagagtctagaggatcactttgaactccattgtcaccaaaaaaagatagcagaccactcaggtttcggtctcatcagaagcagtagcactcggtagtattcttcctagccgatcgattgagcaaactaggttccctataatcaagcatcgcagtccacttgttgcatgttgttgaatagtcttatttttcttccttggttgctcttcattctgtataaattactaattatggatggatgagtattgactgcatggtctctattttctcgatgactaaatctattgcctttgcttttctaaacaaaaataagaacaattaatctagcagtctgcttatatatttttctaagttgcttgaaaaaagtcgagattctatacaattgctccctttttaatattccgtatcagaattccatgtctatgtttcttacctttggtgctactattatagccatgatgattttagcatgg

SEQ ID NO: 53254 - DNA, 918 bp, Arabidopsis thaliana landsberg
  unsure (1)..(918): unsure at all n locations
ctcttaagcaatcacagtgtcggaaaaaattatattcatgcagagataaaacaacatagtgtatggatcaactttcactttacattatcagcatcccaaaccctgacagtcttgtcaaacgaagaagtcgcaaggcgaagctggcttggactaaaacggatatctgttatcatagctgtgtgctcctctagggtcgtctttggcttcatagtgtctgtgtaccatagtacagcctgcaaaatgaaccaaaccaagaggctctctaagtttcagaacgctagaacacctaatgatgatttctggcttacctttttgtcatgtccagcactagcaagcatttttccatccgatgagaagtggcaacaggtaactttggttgtgctcgcacgtactgaattcacttcagtaaacgtaaaacctagtgcagagccatcattgtagtgattgagaaatactgttggattactgaagaaaagttcaccgtgttatagtcgaataatgttaagtgagactaaaacacacacctttactaacatccatacaccgtgtaacagcgtcccgttgatcaccatcctcctgggataaaaaagactcaacattgtcgtcaagtgacccatcttccacaaatcgatccatatcagnnnnnnnnnnnnnnnnnnnntaacgctactaattcatattgattacagaaaccattattcattcccatcaacagtttaaggaaacccaccaactgatttgatggagatgtaagagtcccagtgccttcagtgccaaacatcatcattgatttggaggaacaccactgtgcggcagattaggcatagagatcaaatctccaggagtatgagttgcaggtgtagaaggtcctgagcttggtgatggtccgcagtgttagctgttccatgactattagct

SEQ ID NO: 53255 - DNA, 983 bp, Arabidopsis thaliana landsberg
gtcctatttttacttgaggtccttgtcgagcagtggaatcaaaaggatcaccaacggtccaatctttagctttctctactaacttctccacaaccttatcgtatataccttcttgaacaaacacacgagagctcgccacgcaaatttcaccctattgatacatcaaatttatgatgtttaatatatcagtatcttcacattattatacattgacggaaattggaatgaacattatgaataccttgttgtagaagcaaccgagaagcgcaagatcggcggctttgtcaatatcagcgtcgttgaatatgagaagaggcgatttcccgcccaattcaagggaaacttttttgagattacttgcggctgcggcttgcattatcttccttccaacatctgttgatccagtgaaactaacctgatcacaacacacacagaaaaattcaagatttcatatacaaccaacaacactagtcactgtgactcataaagaaaatagatccttactttgtctacgtccatatgggaggcaatggcagctccagcagttgatccaaaaccagttacaatgttgagcacaccatcaggaattcccgcctgttttctcgcaataatgtttagcttgtaaggtttctatcgtttgttacgtatacgtttgctttattacatgttaaaatagtgtgttgtccttataaacacaacctaaatttttagtgttttaagtaaagcaaaattcttaccgttttaagttaacacaaacacatcatttgtttttaaaaatttataggccttaatcaaaaacttctaatctatatcgacttacttcttttgagagatgggcatagaacaaagcagagagcgaagtctgttcagctggcttgaccaccatggtacaaccagcagccatagccggagccacctttgtggcaaacataatgctagggaaattccaagggatgatattaccaaccactccaataggttct

SEQ ID NO: 53256 - DNA, 822 bp, Arabidopsis thaliana landsberg
  unsure (1)..(822): unsure at all n locations
gcaataccagcttgctcaacacgtttgcactgcttcgagcataagccaccaaccttttttgttcctttaacaaaggaaataaagagagttaagaagaaaaagaacagagtagcggaagatatgcttttcaaaagcgtattctaattactaaccaataaatttggtgaagttgatgtccatgcctctgatgccttgtcgtaaggagcagccaagaacatagctgaacttatgttttgtttgtcctcttcgtagccttttctacttgacatgaagttatcctaaaaataccagaaattatttacaatgacatacggccgttctaacaaatctaacccaacactagacccattattaaagttgggactcacattgatctctttctcgtcatttctaccaaagtcattgtttatgtcaacaatcaacgggtagaacatccattcatagtctgctagtaatcgcaagaacctgttacacggtccagcggaaagatgtgatgttttgattgttggcaacagcattgcctggttgttttccataaaattcataagtatggaagcgcggaaatgtaccttaagaatccattaatccgggaggaaggaacaccgagtgggagaggtgtgaggaagagataagcaaccaaaagttcaatggcctcttctgccagacaaccagaaaagagatgcgcagaaacccatctttttgcaagccttcaagtagcagacaaggtctgggttatgaaacttcaaagcaaacaaaagtaaaacacataaattntattgacttttacnnctgcactgtgcgtatacaggaaatcgaccttgc

SEQ ID NO: 53257 - DNA, 583 bp, Arabidopsis thaliana landsberg
  unsure (1)..(583): unsure at all n locations
ctcagcttggaaaccaagggatatctggggttaatgttggatatggtccaatggctgtcggggctagatggttagcttatgcttccaatagtcccttgtcttctagtataggtcgtctgagccctcagaatgttactcctcctggtgtcagtccatctacctcgccaaataatggtaatctggtggcaagatacgctatggaatctagtaagcatttggcagctgggttactcaatttgggtgacaagggttacaaaactatatctaaatactgtcaagatctcaagcatgacggtcctggtccttctctttcgtccagccctggccggaaagttggtcgggtcggttctcattcagctgagtcagatgttgttggaacggttagtcttttagagaaagcatcttatcttgattatattaaaccctcgtttttttgttcggttgcttgagaatggtatgcgttgtgnnnnnnnnnnnnnnnnnnnnnnnnnnnnnnnnnnnnnnnnntagattaggatagtaatgttttatacgttttgtcttatttggccgcactttggatacttacacnaggagtatacat

SEQ ID NO: 53258 - DNA, 679 bp, Arabidopsis thaliana landsberg
  unsure (1)..(679): unsure at all n locations
cttgcttacacaaaccagctatccaagaagtgtacatgaacttatctggaacaagtccagcctctgagattttactaaacaatctctcaacttctataaagtctccttctttgcacaaagcatcaataagcacagtgtacataacatcattagctttctctatacagaaataaactatagcttcatgtagttgtccattcttcgcaatcccatcgatcatagtcgaaagagctacaacatcgggctcaaagcctctctcaattaatttgtggtacatgttaaccgcagccttcatgcgtccggatttaaaatatgcattcatcattgtagtaaaaatcaccatatcaggaactaaatcacttttctccatatcttctacaatctcagttgcctcctttagtttaccattaccacaaaggcctgatatgattacgccgtaagctgttatatcaagtctcatcccttgattgagcattttggccagaaacttcatggcattatccgaatctcctctctgaaaaaaaccatcgataatcgtagtgtatacaagagagtttggctcaactctatcctcgaccatccttgaatacatttcctcagctctctgcatttcccccttcttgcagaaaccatctatcatagcagtataagtaacaacattcanagacatccgaacgcg

SEQ ID NO: 53259 - DNA, 246 bp, Arabidopsis thaliana landsberg
  unsure (1)..(246): unsure at all n locations
gggccaacaaaagaaccngcccccccncccaacaaaaaacnanaaacagggcaaccccaaggcaaaagagacagacaagaccgcaccagaaaccggaacaggaacagangccaccggagaagcgaaggcaaaagccgacaacagacagggacgcacaancnaacagaagaagggagaaacacgaaaacggagaaccgcaaacacccacacaaaacacacacagccgcgggggccaagccaaggcaa

SEQ ID NO: 53260 - DNA, 1307 bp, Arabidopsis thaliana landsberg
cgtaattctgaaggggatgagttccacctaattattactgtattgtttttgaaagaagacaatatcccttgcaaaaaggattttgtccaaagcacccacagttgtcaacattttaatttttcaatcaaataatttatcaaattcatgttagtaaaattactgtattatagataatatgcattatacagatttaaaattgggtgatacttgtggatgatgctaacaaatatatttatcaaaaatttactttgatacaaaaagaaaaaaactgaaagttattcttctttctagttttacctgacctatatccaagatgatatcatcaacgacttgtcggaagactaagaaattttatatatcatacatataaaaaagttgatacaaattgaagtcaatgatgtttaaagaaacggataggatgatgactcgtgctggatgaaaaaagccgtagttgtaattggaccctcgtagggcccattaagtcttttgtccttcaccttatgtctctgagcccacttgctgacttaatattatttagctttatccatttgcatcaatgatatatcaactttctcataatgagtaaacttttttttcttttctaattgttatcaaagaacgaaactcgaatcgatcttacatttcatcggaatggaaaagtaatattttacatcaaagtaagagagatataaaatgattggggtaaacgtttttcgtgtttatatatattttaaggaatttagtcgttgagagatttgataacatatgacgtaagatggtttctaaagacaaaagccatgtcactagcgttgtttttgccactaatgaacaggcaaaaactaataaaagggggtttacaaataaacgatccttcgtcgtgggagagtccaagagacatatgccccttcaacgattttattggtcgtatcccctaaactctttttcatctcctaatccacgcactttgtatttggttacattaatacgtcatccactacatgtatttttaaaatctagagaaaataaatgagtacttaatctactagtagtaccttgtttattgattccttccacacatgtcggatctgttttaaagtaataaatatacgtttttaaggattataattccattgacttcagagtgtgtgttcaatgattttttgtttgtgagttttttgtcggtatgtaacaattattgttttcatatgggcaaatacatacaccgaaaatacattaattaaaataaggttacgtaattattcaaacaaaaaatagttataaaaatattgtcactcactttttttttt

SEQ ID NO: 53261 - DNA, 1090 bp, Arabidopsis thaliana landsberg
tatggtttcgcaataattgccgttctggcatctaaaactgtctttaaaacacatcctgaagcttttggtatcaaagcaatatcatattcattcaagaaatccttatgtgatcaccatcaccatcatcatcaccaccaccggcataaaccttcggataccaaaagaaaggtatcaatatgcgacgacttccctaaaaatatacctccattggacaccgacacaacatcctatctctgcgtggataagaacggttgctgcaatttcacgacggtgcaatcggccgtggacgcagtggggaatttcagtcaaagaaggaacgtgatttggataaactccggcatgtactagtatgttgtcgatttagttactacaataacaattaagaaatctatataagtaaatgatatataagtattgcatggcagtgaaaaagtggtgattccgaagactaaaccaaacataacgttgcaaggacaaggcttcgacattacagccattgcgtggaacgacactgcctactcagctaatggcacattttattgtgccacggtccaagtctttggttctcagttcgtcgctaagaacatcagtttcatggtaatttcattaatttatcaattaacatatgtacttaaatagaaactaatcaagggataaaatcaaacatgatatgaaatggttactataaacagaaaccggtaatcaattgtttcgatttagtacagttttgatttcaatttcttataaaactatagctttagtttgaagtatatttttgaaagatgttgctttaatcggtttgatatttcctctctcggctttttctcggtttggttaccatatggtcgaattagtgttctcttctttactcggttttctcataatttttttggtacgctttcctttaatttaaccggataaggttaactagtatcaacaaattaaagatatctttaccgtgatatatattgtgatagaacgtggcaccgataccaaagccaggagacgtaggagctcaggcggtggcaataagaatcgccggagatgaatcagcgtttgtgggatgcggtttgttacggagcacaaggca

SEQ ID NO: 53262 - DNA, 744 bp, Arabidopsis thaliana landsberg
cgtttctaaattctgatactacattttaattcagagattataataggaatttgcaatacacatcaagatatataaaaattaacagaatttactcactgttgttagtgagattataataggaatttgcaatacacatcaaactaaataaaaagtaacagaatttactccaaattgaaacagaatttactgtgcgagacaacaaaaaatttattataacagaatctaatccaaattgaaacatcaataaaatgattttttttttttttcaattttttgtttgatactttttaaaaataacatttaagtcctcgtcaatgcacgcatcaaatttgtattatacggtattatctaataatatttcgtattaaatacgtatataattttgattttgaaaagttgagatatatagttttggaacataatgggcccattaattctaattatttcataactaatttaaaaatatgctgaagtaagtcccccgtcaaggacataaaaccataaccgttagatcaaagatttacgtcctgcaaattcatctccaccgtcgttagtttcaccaatttcattatttctcttatttaatattcttttcttaataataaatctctctcttcttccgatatgcagagagcattatatgcacacagtagcacagctctctccaagtttctgactcacttcacctacttcatcgattcgccattgaagctcttacgcatttatcgatcggcgaaacttctg

SEQ ID NO: 53263 - DNA, 588 bp, Arabidopsis thaliana landsberg
gcgctgcttcagattacataaaacctttataacctggtcatgtcctttatattgttcggtcgaagccaggcgggttaacgtaaatataacgggcgtttgagcggttaacctgtacctttccaacaattgtgccggtttcgcaaaattttccggcagcctcataaagggatcaatcgcattgttcagcacctggcatgcctgctcacataccttatgcctgctcatcatttgtcctttggtaaaattgcttacgcaaactaccttgtcgcaacgttttaaaaacatttttttggttgcagataacgggcgccacacttctatgccatgtgctataagccatactttactcttgggtttaataaatttaattaataatccaataatcgcaagattaatgtggcttatgataactatatccggacgcttacgcaagagtatggtttttaaaacaaatgatttgcggcttccgccaaatccgacaaaattttcagcgggaaggtattgcagcataaggtcttcattagagtcataagccgaccaaagctgaaaatcccacccgcaacgctgtgacagcacatttaacgaatg

SEQ ID NO: 53264 - DNA, 650 bp, Arabidopsis thaliana landsberg
attcaatcaaacgaatctcgtgctagatataccttggtcatttcaagaagaagagaaaaaagttatggtcaagaaactaaaagtctaaacccatattaaaattctagtgttgatatacgagaattatatattggtcacttgcccaattaaaaatatcgtgtatagaaaacagtcaagtcaacaactatagcaaggggcaaaagcgtaatttcacaataagcaacttgctcggttttttcgttatcaccactcacatgaactctgcattaaaaactctatctctctcaaatcgaaaggcacagcccaacttttcgcaagtcgctgtaaagtttgatttgcttctttttatatacacatacttctcctccatacactttcctcttcaatcctcagttttttttctaagccctaataccatctcaaagaagagatcaagatttgaaatcaagaagacaccattactcagatcaacatgcttgccgttcaccgtccttcttccgccgtatcagacggagattccgttcagattccgatgatgatcgcgtcgtttcaaaaacgttttccttctctctcacgcgactccacggccgctcgttttcacacacacgaggttggtcctaatcagtgttgctccgccgttattcaagaga

SEQ ID NO: 53265 - DNA, 1264 bp, Arabidopsis thaliana landsberg
aggcttggttagacattaagttctacttaagttcctaacaattcccataaagtccaaacaacaactgtaaacatgttggatttatgatagaaataataaggcccaaaacgtttataggcccaatattacctaaacggcaagttttagtagagcttttctgtgttagcacttatagagatcgaaattctcttcattttctcaggctccaatgtcgctggacttagctcgttgatcatcgtacaaaaagcttgctcgtagctatcagctccccggagaagaagatggtgcggaaacagtttcaacaggctaaaactggtgagatgtttttctaccatccttttacttgttttcccgatcgaatctcttctttcttctatctttttccccgcattgggatgaaatttatagggatagatccataaaatttatgtcctatattcgcttttatctccgtatatcgtgggtttcgtcaaaggtttcggcttttacttgttggtgtgaccttaagttagcggtctcacataaggtgttcgatgaaatgcctgaacgaaatcttttgagctcatttttgactcggttggtaattgttttggtaattttaggaatagaggcattgaagtcaatggatgctaacaactacttgaagaaggttggattatggcgtgacgatatgttcttttggaaacaagtgggaaaagcattgctatgcacttacacaatctttggtatggcttggatttacaatgaaacgtctcctttaggttggtggacgctgaagccaagaccaaaggaagagagagaattggctcatttgtatgagcggcgtgagtttccttatcctggtgatacagaggctatggaggattttgttgcaaaggggggaatgattggtactgcaattggaccgaaaggaattgttgagtccgaaggtgaggctgataattaccaaaaggaaatggagaagaagaagtttgataaagaggctcagaaactgtggttgagaatgaggaatgaggttattactgaacttcaagagaaagggcataatcttgaataaggaagtgcaatagggttttgataaataaaaaagctgtgtgtaatttagggtgtgtatcagttagactaaggattcaaccactcgtacaagtgtttctgtctacgtatagctgaaagtactatactggttgatgttcttgaaattggggaagtaactcttgtcctttattggtggcttgattcatgttttggcttaaaccctttgaat

SEQ ID NO: 53266 - DNA, 1092 bp, Arabidopsis thaliana landsberg
tttgccaagtggaaagttaaaaacagtgacgatgctctatcaattgcataattctaataagcactctagctgcaactataagtaccctactaagcctctcctctatcttcacatatcttttgtgataacaaattctgatatcaattccctatcgtgtgttaagaaaaagaattaatagtcttacaatatttatagataagataacaacaatatgaagcaatctcacgttttgcttcttctatttgttcaagtcattatcattttgcctctcctttgtctatccgacgattttgttaactctagagctacttattatggcagccccgattgcaaagcaaatcctcgtacgtattaaaactgttattgctatatatcgtgtaccttaattctttttcattttatttgtagttgtatatacttgtacacattattggtaaaagatacattggtttaatatctcactataagccttaactaattttattttttttaaactagttttttattttatttttaatctatgtatagggtttttttgtttttgttttttttttgaaggtttattcaaattctaaatatatgattgaaaacggttccattatagtgtccatatcttcagttcgagtattactgcgtaattagtaatgagaactttctattatgagaatatatagaaaatttgtcgtcaagaatagttaattaatttttgatgatgcagggggacattgtgggtatggagaatttggaagagatatcaataacggtgaagtgagtggtgtttcatggcgactatggaacaatggaactggctgtggtgcttgttaccaggtttttatatatagttatctacttatctcaatcaatatttcatcaaatattattatagtatatgctatgtcattaattactaaacttatattatgggaaaaaaacaaacttaaatattatgaattataaaaggtgaggtgcaagatcccaccacactgcagtgaggaaggagtatacgtagtggctacggactctggagaaggagatggcacggacttcatcttaagccctaaggcgtacggacgtatggcgcgacccggcaca

SEQ ID NO: 53267 - DNA, 734 bp, Arabidopsis thaliana landsberg
  unsure (1)..(734): unsure at all n locations
aaaagaccgagagtctttgtatacttaagacttcttgaagtaaactgcagagacatttccttcaacaactataaaaagtagtctacactaactataccattcatgtgtccaataaaaaaagaataaaacataagatttacttttcgattcggatttccaaatccatcaaaaaaacgattgaagtttgtaactattttgccaaactatcttgtgaaagatactaataaattcataataacaatacatcctgataaacagttgaaataagctttgacgttttaagaagaaaaaaaaaacggaataaataagcaaaagacagtgaaccaacacttgattttctctacacacgtctctctttctccatcttctacccgttataaaaaaacacaataaagtgcaaaaggcaacgaatcaactcttaattttcctcttcacaaatctctattctctctctcactctctctatcccatcttagaagttacgacttccaagagctcatcatcccaagttcttagttctggttcgaatggtgtgatcgatgaacaagatcatccgtggattgnnnnnnnnnnnnnnnnnnnnnnnnnnnnnnnnnnnttcgtgcatgtaagttctctctagtcccacttctaaatctagtcaaaatccttcatttattgatagacctcttatgttaaaatagtcaaccaaattatagagatatagaggatctatcacttcttcaatggattga

SEQ ID NO: 53268 - DNA, 442 bp, Arabidopsis thaliana landsberg
  unsure (1)..(442): unsure at all n locations
tcgagatctttcaaaacccnnnnnnnnnnnnnnnnnnnnnnnnnnnnnnnnnnnnnnnnnnnnnnnnnnnnnnnnnnnnnnnnnnnacgggctttagcacatggatatacacactaactgtttatttcgcacactatacattggcttagatatacaaccacatttagagttttcaacgcgcaacaaatacgatcctcacacactttgtacagattagatgtacagagtgaaaaacgcatagacgcgacccgttttttggtacctgtcatcacaacgcaaataccagtacgagcatgcaccaatcccagagccaaaaaaggtctcaacggaacccttgactcatgcactatgttgcaacagagtgtttgtgcgggcaatagtctggtcaccgagaccctccttaagcatcaccattcgcaccacgagcagcgcacccatcaat

SEQ ID NO: 53269 - DNA, 1158 bp, Arabidopsis thaliana landsberg
tgcctctctacttaggccaagatatattaagctataaataacctgatttctagatttactttggttttgtccaaattttttgttttttaaaaaagaatcaagaaaacaaaaacaaaataaaccgtgtttgggaaatgcattcaatttttttttttctatgtgcaagtatatgttttacaggagtatctacatattacatcgtatgttcatcccactcttttggtctttatatacaatgaccttgatttattgaacataacacatctaaaagaatttgactctctttttcttttgtttttcaaaacaaagtgatatatattttcaagaatattataagagctctctacctctacatggagcaaccagactctcttcttcagtacgcttatttttccagtgaacatgacaaaacttcaaggccaagaacgtgagtcctttggctttaacactcaagaacttgagcattctctgttgatcttggccagctacaaccactggaccatcccaacacacccaagactaaatccaccttagcgcaaacactaacctgtgagttacagatccatagagacacgggttagtgtttagtgatcgaagatccaaaaagaacaaaaacaagagttaaaagagagtttagatcaacaggacatattaccaaactttcaatgcttgcttctatttgaaataacattactgctaatcctcttcctctgtcaatctcggcctgcaataaaccataagttttgtaagatgagtagttaggaactataaaatgtttttagaagcaaggtttaaagtaaaaccacgaaccacgcaagaacataatgcaatgccttcagctgcgaggactgttgtaacctctgcgattatgcctgccaaatgtaacaaagagttcatatttactttgtaagttgttggaatcatcaatcatgactaaacaaaacgaatatacccatacctttgcgatccatggatactacacataaccattcgatggactgaccttcgagatgatgccatgtggcaattttactgtctcgccaactgtctaagccgggcaacacttccttattagcagggatattagcaggtaaaatcctggcaattccatctccaggtaggaggaactctggctcataagaactagaattatatatg

SEQ ID NO: 53270 - DNA, 704 bp, Arabidopsis thaliana landsberg
  unsure (1)..(704): unsure at all n locations
cacaactcagatcggtggacgttcaaatcagcttggtgggaaaccactttcgtggtcggtgtatgaacatgggccttacttagcctaaatagagtcaaaaagataattcaatacactactatattaactagaccatatttgtttatgccagggctactttctttttggctatcattgactataataacataattgtgttctttagcctaaatgttttcaaacacagatttgttgtacatggtcccttctgtttaatgagttggttaaggctcattattgtgttattgacaaaatgaaatcaaaattaatggtacggcaataaaagatatttagaaaatgggatcggtggctatcagtgaaatatcagagattagagattggtttagtctttaaaccaatattttggttgtaacctgataaacaattttgtaatcctcttggacatttgtacaaacgaattagataaattgtacattctagttcattaatcattaaacatttatctgatttttcattttggtaatactttatctgtttatcagatcataatcaaactggttctctacactttatggaatcaaacaaccaaatttctttaacatcaaacaacacattttcaaagttgcgacttgtatcaatctgttcatcttaacaatgactattattttggtgtgataacatttgagcttattcgactntatatg

SEQ ID NO: 53271 - DNA, 647 bp, Arabidopsis thaliana landsberg
  unsure (1)..(647): unsure at all n locations
ttcctagcaacatttagcttggaggggattttaggaagggcatgaccaagggaaggataggtggatccaacttctcccactcgttacgagccttagccacacatctaacctttggtgagttgatttcgagcctaaaaccttggattcaccttagatcaaattttagttgttcatcacctagaaaatggcttctaatgaacatttgttggattagatgtaatgcatataaattcacatagctggacatgctttatggaacctttcaaacaccgcataaacaagtatgcacatgcataaatcctagagctatatttggtttctaaagtactaaaaactcatgtactatgttgctacagactgtatgtgaggacaatagacagttcaccaagacaatcattaagtatcaacattgtctccacaatcaatgttcccacaaatcattagtgagaacattagacaatttggtaatatttcatttattcaaacctaatagtactccttttgagtcttgcactcataaaccatcttctgcttcaatgaactgtccaagaaatcaacacttagaaagttatcaagatgtgccacataatgttcccatggatcgtttgtgnaaggganatggttttttaccatttctctaaattgat

SEQ ID NO: 53272 - DNA, 522 bp, Arabidopsis thaliana landsberg
cgcgtggtggtagccggcgtggctctcgaagtcgtcggcgtagtggcggaagaagtcgaccgtctcctgtgcctcgccgagcgcctccatgcgattcttgcccacctccagcaccagcgcggcggcgacgtcgtagacgcgctcctccagcagatcgccgacgcggcgcatcagccgcgcgcgctcggccaccggggtggcgcgccaggcggggtaggcggcctgcgccgcgcgcatggcacggtcggcatcggcttcgtcggccagcgcgaagtggcccaggtgcagggtgttgtcgaacggggcgcggcggtcggccgagtgctctgcctcgatgtcgcggccatcgatgaacaggccgtggcgcgcgccgagcgtaaccgagacgcgggccagcgccgcctcgaagcgttcgtgcatggcttccggcgggtcgtacatggtggcgtaggtgagacggaagctcatggggacctcgttaggcatgggcgggaaagtgctttctcagcagtcggtcgatca

SEQ ID NO: 53273 - DNA, 1205 bp, Arabidopsis thaliana landsberg
acatgtagagtctccatcaactaatgaaatgaaagagagcaaatatgagtgccatactatttcaacaagatcatgtttaaggttcaagttatgacaattcaatgaagaacattgtggttactggttgtttacctgtaatagcagcggagtgataataaccagctgaaatgtgcagaatatccttatctagtccagaaacttcaagcggatcctaaaatatcaaatttataattgaattatctgagataaagacatgtgaaggaaaagaaaagaaaaaccagcagctctatagtgttttgaccaacctaccaattagtaacataccatagcatgacttttaacatctgatacgccaagttgaccacaatcattaagacccgttgcaaagactctcctcgtttctgtcacatgtgtaagcttattatcagatactcttcaaaaccaatcactgattcaaaagatgataactttacaaaaacgcaactcaacaaccacatgcccaattaaacaaagccaagaaatgctatccaacgaagaccactctaatactgattatatgcagctatgatctgcaaatggcatataccaaaatgaatgaaatctcagcaactcattgagatgccaattctccggatttctcagctcaatagtcaacacaattcttctccctctacttttattactcacattgcaacctcttaagatttcaaagttcctggataatccactaaataaaaaaaaaaatatatatatatatatatatatatatatatatatataaaacaagtcgggagctgaagaaatcaccggtgagaaacagagtgtgagctccgccgcaagcgacagctgtgatactgtgatcactcaaggcagagcaaacggcaggtgtccactgagaatccaagtttccgagccctaatctgccgtaatctccacttccccacatcgccgcaaatcgtttcccgctctcgctcgatacccatctgctacagcaaacaccaatcggacccaatttcgaatcttttaaaagcccactcgtacaattcgatccctgaatcctcgacacaggaattcgaactcgtccgatggctctagtcaacattttcacttgtagaaatcaaaagaaaatgaaattaaaggagatcaatttagatagttaaaatggatggattcttcttcttcttcttgtccgtttaaaagagact

SEQ ID NO: 53274 - DNA, 630 bp, Arabidopsis thaliana landsberg
tcgtatataaagacatgtatatctttaatctttaaacagtcttaattatggtagatctaagtagtaactcagagaaaaagcatttaatgattaggagtagtttttattgggttgttgagaactttagttgtgatgttttcagtgaacaaactcatgattatggtttttctgttgtttgagtaaaactagacgcaacgaacaaaccacacacatgcacatgttatatcaccaacacaaagaaccaagtacgagaattactgactactacttccacattaacagtagttttttttttttttttaacttctttttcatttatatttacgtttgtatctcatgatcaacgtcgtacggaatggaatgtagaacaaaaaaagaaacgtgaccctaagatctgttctgttctgctttctgtttcgtcaggctcttccacttcttgttactcttccaaacaaatctttagaatcggattgcttcaaacgaatattgaggttgcgtttactgtataacatgttgtacttttctattaaaaaaaagaaaatgctttgacatgtatacatgaaaacatccgcaggcatgagtgcatacaaattggactattaattagttaattcccatattccataaagt

SEQ ID NO: 53275 - DNA, 432 bp, Arabidopsis thaliana landsberg
tcctcatgctatagagagtgcgcaggccaccgaagaggtcccagtgatctcccacggccaccaccggcgggcaggcagcgccggccgcagctgcagctaccgctgcgggccccgtgtctaccgccgctgcgacgcccgcgcccgccattgcgaagccttcgctggattcaagtctgggcattgcataccgtctcacgcaggtggaatcgcacccatgaacacgaaaccacacacacacacacacacacacacacacacacacacacacacacacacacacacacacacgcacactcactcactcactcactcactcactcactcactcactcacatacacaccctctctctctctttctctctcttcgctctctctctctctccattgacctgatggcagtcgcttggccagagcgtccaagcccctcgcga

SEQ ID NO: 53276 - DNA, 603 bp, Arabidopsis thaliana landsberg
aaggaattttttccggatcaacatcgaactaaaggtttatgatttgaatctaaaccaactacatccaggttcagtcgtccgactaattttagtactgcatcaacccgagaaaaaaagtataggttatcgaattttcaactagtctcaggtaccaaactataaggatctggttcaacgtgctttacaagaattagaccactcaataataccgacagtctcagtctctctaacacgcatgtaattttattatttaatgagatttgaatccaagtaaaataatttacacatttctcaaaatccaactattactacgaccacaagtaatttggactattaggtataaaaatcacttaaaaactaagactaataattgaataagttcccataacgaatgtctcacatcgttggtatcatctcaattgttaaatttgtttgttttatgttacgtgaaactattaataactgcactttccgaaagaagacaaaacagttgatctcaaatattttgttaccgtccaagaggtagttcttccatccttcaatgacattgtaagcacttctaaaacaaaatctgatcaaaactacttcaaacacttctaatac

SEQ ID NO: 53277 - DNA, 278 bp, Arabidopsis thaliana landsberg
  unsure (1)..(278): unsure at all n locations
ggccgtatttattttcgccggtcaagnnnnnnnnnnnnnnnnnnnnnnnnnnnnnnnnnnnnnnnnngcaggccgccgaaaataagcgtattttcggcgcttctgacacagccgtcgaaaatacatgcttattttcggcggcacgccgtggccgccgaaaattaagtaatttaaaacgtctggttccttcttctctgttctgtgtttcttctctctctctcttctcgcgtccgccgccgctaggtccgccgccggcccgctgctccgtcgcgccgcac

SEQ ID NO: 53278 - DNA, 582 bp, Arabidopsis thaliana landsberg
taattatttaattactaaatttaatatatataataccttttagtaaaccatatttgtcattttcgggctttttggcgcagttaaagatccactactaaattaaaaacttatggatttgaatttaacatttttaatttcctttgaggaaaaaaaaagaaaagaaaaatgtgaatttgaagttttgaactacatatggcgaacgcacttggtcgtcgatcaatggaaacacgagtttttgcccacatctcaatattcactctataaaatattctaaacatttgcctacttgattgtcaaaaaaaaaaaaaaaaacatttgcctacttaacgtgttcgtcttcagatcatggcacgtgggaggcaagtaaacgtgtctgaagaccacttttgatacaaatagaccagcaacagtgtcgacatcaagacaaagtgacaatggagaaagaacccaagcaagagccagaggaagggagagctaagtacgagccacatcagcaccagccacctgtatatctcgcagatgcagccagtgacgcacgaagcctacggtggtggcctctacggtcagggacgacgaaaaggg

SEQ ID NO: 53279 - DNA, 1313 bp, Arabidopsis thaliana landsberg
ataggatcaatttccaacacattggatacctaagcatgtctctctccatttttcaagtcaatagtatttgtattccactaaataatattttattacgtgtaccgcaaacaacatcaatggtactagaaccgtgtgtcaattattttggatgtaaacgaagtttttgctaattattaatttgtttttattcaagaacgagacgtgtaaaaaagaaatgtaaaacttccacatgaatcgtaccaaagcgtttttggacgagaaaaaaatagaaattgtaaaactataatttttgtagtaatgtaaaacgatttgtgtacatataaatataaacggtaagtcggtaacattcgtataaagaaaacaaaagattgtaaagtttgagcaaaatgtttgaaacacctgtaggatgacaaaaatgtaaacttcttaaacggaaaagtactaaaaagcgtaacaactgaaaaaggaaagactattttgatcggaaaactatatataaaacataggtatgatctttatttctcaatctcactattaacattcacaagtgaataattaagattcctatattttagcagggatggctcaagaactcgatttggaattgggtttagctccatatgatccatgggttctaaagaagaatttaaccgagagtgatcttaataatggttttattattctacctaaacaagattttgaaaaaataattcggcagatggaacgtggtttggtcaagaatttgggaaacggtgttgaagtgaaagtccatattatagaggaaggtcctgaatctgatgattacacattaacactggtcaagtgcagaggcaactgtatgttcagaggaggatggtacaatatggttaaagctaaatgttacaaaccagacgatgaaattggacttatgtgggataagtggtctcgaagatttttatttcaccatattaactagttttctcttttcaactatcacagaagatatttatttaggggttttaaattttaattacagtattttatttcttttttaagttatagtcatcataattattcgaaacaacttgcaaaaagaacaaaaaaaacaaccaatctatagcaatctcaccgaaacaatttgcaaaatttatgatgtgaactaaatatctcaacttctctcaatagaacaatgacagaaaaaaaaaaaaatccaacatgttacaaaacaaaacaaatcgttttttgtaaggcccattaatttcaatgctctaatcaattttaaggcccattttaaacaaaaggattcatctccttttacctttcgagtttcaaat

SEQ ID NO: 53280 - DNA, 361 bp, Arabidopsis thaliana landsberg
  unsure (1)..(361): unsure at all n locations
ctnnnnnnnnnnnnnnnnnnnnnnnnnnnnnnnnnnnnnnnnnnnnnnnnnnnnnnnnnnnnnnnnnnnnnnnnnnnnnnnnnnnnnnnnnnnnnnnnnnnnnnnnnnnnnnnnnnnnnnnnnnnnnnnnnttgattattttttttttattctttttttaatttattttttttttttttctatatatttttttttttatttttttttctaatttataatatattactttatttttttttttttatttttattttaattttttttattttatcttttttattttttcttacttattcttttctttatttttattatatttctttttattatactatattatctttattttttttattatttt

SEQ ID NO: 53281 - DNA, 544 bp, Arabidopsis thaliana landsberg
  unsure (1)..(544): unsure at all n locations
nagagggaggagagctggggggaagggggagggagcgtggggggggttgaatgggtatgggggcagtattgtagttgtgaaggatgggagagaggtcnnnnnnnnnnnnnnnnnnnnnnnnnnnnnnnnnnnnnnnnnnnnnnnnnnnnnnnnnnnnnnnnnnnnnnnnnnnnnnnnnnnnnnnnnnnnnnnnnnnnnnnnnnnnnnnnnnnnnnnnnnnnnnnnnnnnnnnnnnnnnnnnnnnnnnnnnnnnnnnnnnnnnnnnnnnnnnnnnnnnnnnnnnnnnnnnnnnnnnnnnnnnnnnnnnnnnnnnnnnnnnnnnnnnnnnnnnnnnnnnnnnnnnnnnnnnnnnnnnnnnnnnnnnnnnnnnnnnnnnnnnnnnnnnnnnnnnnnnnnnnnnnnnnnnnnnnnnnnnnnnnnnnnnnnnnnnnnnnnnnnnnnnnnnnnnnnnnnnnnnnnnnnnnnnnnnnnnnnnnnnnnnnnnnnnnnnnnnnnnnnnnnnnnnnnnnnnnnnnnnnnnnnnnnnnnnnnnnnnnnnnnnnnn

SEQ ID NO: 53282 - DNA, 626 bp, Arabidopsis thaliana landsberg
ctttctcttacaatcaatggtgctcttagttctaatatatgttttgtgtgatcgcgggagtttttgctttgagttctcttagttgtgtttcctcataaaatataatctatggtcattcgaagtatcccttgcttggcttcgttctggagtattcagtgattctaggtcatggtattcatagtcttggccttatagattggatattgtattggaatccatcatctgaacttgtttggtactttaaatgtgaaaagagacaacagacagtggtatttttgaaaggagattatagctttgaggatccaaatttgcattagtcttcaaatctgttgttggtttatgtcaaagcatgtgtgaatcttattattttttgtatctgtctcttcaggaatgcatttggtcaatcctttggtacgatatgtgtatcaggacttctcatatgcattgttcgtgtggtccgggcaattgtggacaatgcaagagaagagaacacacaaggaatagtgaacatggttctcccgtgctgtgcaaacgccttacttggtgcccttgactatctcaacaagttcaccatcaactttgctgcaataacaggggaagcgtattgcacctctgcgaaaatgact

SEQ ID NO: 53283 - DNA, 551 bp, Arabidopsis thaliana landsberg
aaatttgagaaaagagaatagaaaagaaaataagaaaaagagaaaaatgtgtgtgggccggcttcagctgaaccagcccactaacgggcatcactcggcccgtcttacctcgcgtccacgcgccgacgtgtggggtcgcgctgccagcggctcctccttcctcgtgttaacacttcgtcgctgaccctgggacccactcaacagtgacgcgccgcatgctcgcgaggatcgctgagtagagggccccacctgacagccattactgtggatcttccacctctccatcgtgccgggcgtggccgagatatccgctgcgtgtgtgcgatttcagctggcgggtgcaacaaccccgacctgaccccgcgacaaccataaattcgggggccaggctttggtctcctcttcctcccttgtccgcacaccagccgccaccgccgaaaccatcgggagagggatttggcgccgtgacgattctggtcccattctgggagcactctgtgtgctttgggagggtcgctaccataagcaccgtgggtaatctgtgccggtgt

SEQ ID NO: 53284 - DNA, 591 bp, Arabidopsis thaliana landsberg
tccaacatcttttttttttttttttttttttgctccaacatcttgatacgtactaaaagataaatttagaaattgcgtaaatgactagcctctcaaataacacaaaatcaaccaacaattacaaacactcgatataaatgatacacaaaagggtcaaatttacaaaggaagatggttgctcgcacatggctttttgatacacacgatattaggtatgtgttttcttctttttaagaaccgagaaataatctgaaaaatgaaaaccagtagttagtagttacaattaaattcaaaagacaaattagtcacgatgacaatatatcattttctaatacaattaatgattaatttgtcagtttgaatacaattgcactatactttaagtgttcccatttgaattttcagaaatttggtttccttttgttggatcaccaattcgcaacgaaaacaaatttacgaaaaattgccaaaagatttttgttttttttaaaatgagagaatggaaaagaaataaataaaaaaatggttccttaaatccagacaatctgcgtctcttttatggcgcgctcaggtagggccacctttccttca

SEQ ID NO: 53285 - DNA, 1017 bp, Arabidopsis thaliana landsberg
  unsure (1)..(1017): unsure at all n locations
aatcctaatgtagtgcataagtctgtggcccaaaaccaagaccaattatagttcattgatcacaatgttaaacatatatgaggccatgaaagaataaaagaagataagctgcaatatatattaagtttactcagacacttttctagaatccatattctccatgtggtatcagccaccaaggttttcatacttagcacataatgaatngggtnaacaaagcccaagacacatgattaagcaagcaatcacacgcttaaagattaaatagtctctaacaagcacagtgttagaaaatctctaaagtactaaataatttgtatatccatttaatcaagttatacaagtagaaaatgcaaaatgtgacaaaaaaaataagagactgtaaaatacagaagaaaatgttctctttgcgagtaccgtatggtgcgaaatccaaaacttaccatgtgttaatcactttcagagtaagaataagacgagcgattagctttcagggcatgagtcttaatattgacatcagacaagccaacatcattgaaaccatcaaactctacatcggaatcagacgaatcaccatctctcaagtcatcactctcaatatctgaatcagacgaatcaccatggccatcactctcaatatcagagtcaatatcgtcaaccttatgtgcatcgttaactggatacttacgcaccacatccatcacttcatcatcactatcatcgtgcttccctgataacttcctaatcatcaatgcctcaaatacatcaggtatagcatcctcatttccatcatccaaaaagctttgcattctttatttcagctctgaaataccaattggattaagaaagtcagcaaatttataatctttacatgaaaaattatgagctgatcagctaactctgtcattgcaaaattctcttacttttcattcaaaactgtacattttcttgagaaccaaacataagaagttgagttgaagaaatgtcaccttctttagaaagaacctctcagttttg

SEQ ID NO: 53286 - DNA, 810 bp, Arabidopsis thaliana landsberg
aagtatgtagagccagggattcagttgatgtctttcaccttatatgaacctggaaattcctgctaactctctctgatatgaagcacaataagagcatctctagtatgccatatgtgtatacagtatatataggtcagtgtttgcctaaactcctccatggtatgatgcttctttgtgaatgttctctgcagcacttatctcattttttttcttgacaggttattgtgatggatcaagaagtatagtaaatggttcagggatcaatgcttctattgctgggaagtctcttggcttctctgtttacttgaaagatgcttatggttatccctcaccagtccaagtcgatagacttcaggtccgaatcgtactagagattgattcctcaattattttgccaaccatacagccaagagaggctctcaatggtataaacatattttcctgatttgcttactttcagtattggttaatttcttcactggtggcttatacaatgatttaatagggactggatcaagtcaccaagctgctactccattgtacgagaaacatggcggaagagtaagtagattatctgcatttgtgcttatgcataccagattaggcctgtagacttaaggttgtttccatcttgcaggcttcaggcaacctagtgactcaagcgagtatttttgacgtaacttatactcctaaaaggactggaatttatagaatctttatatcatctggaaacatagtcctcaatggaggccagcctttcatcaaggaagtatatgcaggtatcatctggaaacttccatgtgtaaaatg

SEQ ID NO: 53287 - DNA, 1013 bp, Arabidopsis thaliana landsberg
ccacctttttcattactttttattttttaatcttaataactttttaagaaacttccgttggaaatgacgtaatgatcaaatgacctattttaaaaccattttataaaataattaaacaagttagatagtatgttttattaatgtattattaagaaggtcccacaaaattttgtatgttttataacaaactgtttttctaattttcacccaaaaaaaaactttttgttagaataataatgttgagccggccctaagttattttttgttaaaaaaaaaaaagttttagggcccaatttctttttctctaggggctcataataatgttgaaccggccctaagttattttatcagctcactacttacgctatttggtgatacaacttgctataagttattttatacatgtagttggtcagatctttagtaaacaactttgagtaaaaaatcggaaataaaatctttctggataacaatttaaactaagaaatcattttctgtctaagttttataatttatatccactgcaattttttgaacttggttattgcagactggtttacaagagcttataacctagtattatattaaaatatcggttttagtatcaattgtcaatcaaactttagtaaattatgttaacaggttaaatcttgaatataaaaacttctgtattggtttttgccctctacattttagtgccacctaaacctagttacattatagtttcaaacattttcattagctagctctctcgttggaaagctttttttagagcgtttagcttaatggttaaaaaactttgtcctatagataatgacggaccatgtggagtattcttacaaatacattacatatggggaaaatgccaaattacaatttggtgtacacatcaaagaggaagaagacagaagtaaataatgaaaacaaaattttggaacatgaaagccacaggtcctgtgagggtccgatagaggacacatggccaacgtgaaaattactcaatacaacgtaac

SEQ ID NO: 53288 - DNA, 788 bp, Arabidopsis thaliana landsberg
attctctccgccaccttctgatcccaaatccttaggtgccgctatggccagtgtcgtgctcggaaacatgaccgatactttaggatacatccaatcgctgatcaaacatgctcacgatcctgcggcagagcgcgcgctggctcagtgcgctgagctgtaccggccggtggtcaagtttaatattcctcaggcgatggaggcaatgcagggcggcaaattcggctttgcgatatatgtgctcggagacgccgagaagcagactgattcttgtcagaaaggaatcacgaacgccggcgccgacgatgaaagctcggtggctgttacggctagaaacaagctagttaaaaatctttgtgacgtggcgatttctgtgcttaagtctctgatgaatggtctttaagaatctttgtttgttgaaaataacaattatatatatacatatatttgtaattattgacaagaacaaatttttattgtaaattcggaagagttacacatattgaagcaaaaactaataagttatcaactacaaaatgatatacttaaagacttgtagtggataacttataacgttgaaaaaacagcgcatatattgatgattatggtccaagcctttttctgcctcaattcaaattttatgaataatgaaaactagttttgtatgactttattgtaaaatattttctatcttaaaatatattttagttaaagatgtttttcttataagatttggttttactgtaatacataaccacaatttttttatctttaggtaaaaatttcagtgt

SEQ ID NO: 53289 - DNA, 597 bp, Arabidopsis thaliana landsberg
ggatctatcttaaaagccatatcccccgtccgatacccgaatggatgggtaacatgaaggtactctcactttctattctcgattgcaattcgttaaccggtccaatgcccggttcgcttcttagcaattccggtttagatgttgccaatttgagccgaaatgcgttggaaggaactatacccgacgttttcgggtcaaaaacgtatttagtttcgcttgatctgtcacacaatagtctatcgggtcggatcccggattcgttgtcgtcagctaagtttgtgggacatttggatattagccataacaagctttgtgggcgtattccaacgggttttccttttgatcaccttgaagctacgtcgtttagtgacaaccaatgtctctgcggtggccctttgacgacgtcatgttaataacaaggatatggtttctggttttactgaaccgggttattcttgttgctgttgctcttgttcgttgtatcaaacttgtgatattttgcttttcatttcttcgtctttcagattttagtttctaaagctaagatatgttactggcaacggacaggtacaccgatccaatatggtttgcggtcta

SEQ ID NO: 53290 - DNA, 1453 bp, Arabidopsis thaliana landsberg
  unsure (1)..(1453): unsure at all n locations
gattcgatttcccaggaagctgaaaacagaggtgattcagagctcaaatttctcatcaatggcggcgataaggtaaaagggaacaaaacataacacgcgctttcaaccgctaggtttatcatttttaataaaaataaaagtggaaattgactaacgatcttagccgttgatctgtactactgttcttttgtgagtgtactgaaatcatttgtccagatttcgtaataatactctgttttttcgttttttgattttactaggaagctgaaaacagaggagtttcagagcttaaacagctcaacaatggcggcgacaaggtaaaaaaagagaacaaaacttgattttcattttttttgccgccgctcacaatacatgaaacgcgcctttaactgctagggtttaatgtttatcctttttattttatagtattaaagataaaagtagaaaatgaactaacgatcctagccgttggattaagatcgtcggatccattttccgttaaaccaaacctttttgctcttttgattcctcgaatgagcgttagaggtttgcattcatcgccgctcagtcacacatgctctgtctcttcactctttagaaaattttttaattctaatattccacgtcaatagagttaatttgtacccgaggttaaattagtcaattcactctcttgcgtgtacagttatcgaaggttacttgcgttgtgatgtgaccacgtgtcataaagtttggttggttaattacgagtttatggttggtcgcgtcatttgtggtttttttgggtttcagacttgatggtgaaccacaacaacaacaacacgccgttgctgatgatccagatatggttgctgatgaagtcgctaagcttgttcaaatgtgcgtttctctctcttttcctctataattatgtgaatgcattaataagcgtttttgatttctgcgattgcattttagacgcgactaagtcccactcacgtgaaccgtaaaataaaattaattagagaacacataaacaagtactatgagagaaagaacaaaaacctttacttttttgaattattttttattaatgggtaagagaaaaacttttgcttttaatttcatcgtgaaacgacaaaactgacacaaaacccttctctctcgcataaaactgacacattgtcgtttcttcaccatgctctcgcgattgtcagagtcgtttgcttgcttgcacggacattgttttgtttgttttatggttttaagtttaaacggcgttttcttcctttactacattaattgtatttcacttttntgttctctctgtgactgaatttggggtttacacgaagaggttggtttagtaactgcttctgtcgtctttttgttgcattcaagtttcgaagtctctttcatttggatatattatggtctggtctattttaggtttttcactagcccaacattaatg

SEQ ID NO: 53291 - DNA, 507 bp, Arabidopsis thaliana landsberg
  unsure (1)..(507): unsure at all n locations
gatttacccattatgcggtgagtatgcgcgggcgcttcaatacctgtaacatcagcaagtttttttataactttgttctgtgatacgccgatcctgaaactcccggtaagtattttattgaaaacaaaacgttcctggctatccagcattgcccacgactccattagccatcgttttttctcttcctcggctttatcggccagtgcatttatttcggctatccattcggttagcgttttgctgctgctgctttcatttgnnnnnnnnnnnnnnnnnnnnnnnnnnnnnnnnnnnnnnnnnnnatggtaactttcctcaaacaaccagccgggaatattcgacgcttcaatggcccagttgcgtatgagcgtagcattgatctggcgcttgggccgccgccctgtaaacagggccagcatatgcattttatcagtatcaggtacgcttacaaaatattcctttagaaccttaactttttcattggctctgctgcttcatctaacgaga

SEQ ID NO: 53292 - DNA, 526 bp, Arabidopsis thaliana landsberg
atatatatatatatataatgtatgtagcctaaaatcttttaaaagatatggatgagatttatatttcttatcagtttttttacttactatgattaatatgcattttttgagatggagggtaaaattaaaatacaatggcggcttaaaggatttttttttttactgttgcataaacccaacaaattactatgttttcgtaaattcagttttttaaatattaatcttaattttcatattatcttgagtggtgtataaaatagtatacagaatatatatatatatatatatatatatattttccttttattactagaatcggtcacaacttgtatatatatagataaaggaaattgtcaaaaaaattacttattcatatatataatagatgaaataagaaggattacaagttattacataacatgaagtttcttgacaagagattctctaccatgccatatatagagagaaatgctatagaggaggatatgggcaaccacattttgatttacataacgatgctttttta

SEQ ID NO: 53293 - DNA, 204 bp, Arabidopsis thaliana landsberg
tctagaactagtggatcccccgggctgcagggggggggaatagctcaccttatgagatgagggatactagcttactttctaggataagagtgatactgtgatactgctaaaaacttacaccgtgcacaagcattattatcaaggaaagtataagaatatacaaactcatccctctttactattacattttattaaacccgccac

SEQ ID NO: 53294 - DNA, 1242 bp, Arabidopsis thaliana landsberg
cgatgatataatgtttaaagtttccctcaaataataatttgcgtcgaggttagcttgttttgcccattttgagattcgactcgacctcgacccaaattattacatataatataccaatggccttttgtgaaacaaactctggacatctaaaagtaataatgtgatatacctcacaagtggatctcatatatgtctttatatgataaggtacaagtggcccttgtactttgaatcaatttgattgagtcgttataaatttgcaacttgttttctgttataactaggaaccactagccaattaaatatgaaaactcatctgaaaaaatagtgaactttggaaaggtcggcattataatccgaagtgttagataggtccacatttctgcatatttgtttagatatgaaaatactttatataacagaatatgtaggagtctctcgtatttataacggaaagttcaatcttatcttaaatgaaggaatttcaattcatgatcattcaaagggagcaattccgactgataaattgatgggagtgaaaacacaaaaaatggaaaataatttttgattctcataaaattagagttataaatattcccatatgaaagtaagatattgacatatactaattggttcataatcatggtcggtttcgattagtctcggtagatctcccaacactgataatatggtaaaataccaatataagtagtgaatggaacactatctatttttccttttgatctctcaacacacgaagttagagtatagaagaaatgaagggctaatagagattaccttctccgcaagatgatgagatgagataagataacgaactcgtgccacgtggcggaatctactgtccaacagtgataggataacgcttgaggatggttaaagaatttttcacaaagctcttcaattaagtgaatcaataccatcacgtgttgttcatatttaatggtaggaagtgaaatgggtaatgtaggtggatgggaagtttgaaaagtgtgactgagacaaatgcacaaggtttaacaatttgttaatcttttgtttcaatttgaggatatattaccaaaaagaaaaaatgattaaaaatcttaagacgtaggatggattgggtagaagcaaaagttgactcacatcatcaaataatgatacaaaagatgaaggcaaaataaaattaagagctgataaagtgacagtttgaaatttgttatttatgcataaacccccaaa

SEQ ID NO: 53295 - DNA, 981 bp, Arabidopsis thaliana landsberg
ttttgaatccgacaacgactttattacaatgacccccacgttaaaataaaaccaaaaaactttctacgtaccaataaccaatttacaaaaatgaaagtaaaaaacccctagagaaagcttttgcattccaaaagggttctactaaaaagaaccgcccaaaaaaagaaaaacaaacagttaacaaaaaaaataaaaagacaaacattggttcttggtatcttatatcaccacttggctgatttacatttagcagctcttcctgtgtcgtttaagaacgaaccaaaagtcttgatgacttcttcataggttggccttttgtaatccactgcttgctctaccacttcttctggcttcgcccatttccactccgcaaactctgaatccgcttcgttgttcgctagattgatctctttctcgtcctcatcgttcctcagtctcactaaatacctgtaggaattattaagtttcagaacaatgagccacattctttgctttcacgaaattaagtagtatcgaagggcttaccatttctgagcttgaccatgccattcaccgccccaaagacggttaacttttgcttttactgctggtggaaaatcatatgtcaaccaatttgggacctgtttagacattaaagaacccacattagtaaatatatcctctgattcatatcggttcgcgtaagtgttaacttaaatgttagcgacctcagagacgatttcagctgaaacaacaccagtttcttcttgaaactctctcatggctgctgactttggatcctccccatcttcaatgccttcctgtaatatccttagtttagtgggctattcaaactcagagattaatgccaagcagagaaaacagtctctagactctttgactacttcgaaaaaggtggttacttcaccaatcttagaaaatattctctatcaaaattcttggccctgttttcattagagtggtgttaaacatcggtaattt

SEQ ID NO: 53296 - DNA, 424 bp, Arabidopsis thaliana landsberg
tgcacgtcgactctgcccggggtgcattttcatttctgtcctgcgcatgtcttcccctgtttcccccgcttccaacctgcgcgcctggctgagcgtgtgccgctggccttggcgccttcattttcaacaccagcgagtttgtgccggtcgcatgctcggcgacatcggtgccagctttggcatgccggccgagcaccgtgggcctgatgttgaccatctatgcctggatcgtggccctggctcgctgccctgcatgctgctgacgcggcacatggagcggcgcaacgtgctgatgggggtgttcgctgtgttcatcgccagccatgtagtgtcggggctggcgaacagctttgccatgctggttctcagccgcgcgggcgtggccttctcgcacgcggtgttctggtcgatcacggcggccctg

SEQ ID NO: 53297 - DNA, 627 bp, Arabidopsis thaliana landsberg
  unsure (1)..(627): unsure at all n locations
taacgtaccatacaaacatatgaagaaactaaagctgcatagaacacaaagcattatgtcattaccgcaaacccagtttaagtaagatcactctcaacagcatccctgtccatgtccctagcttcactgacctggttatcattatacaggatagatgttaagtacaacttacaagcatgtggcagaagcttgcataatccagaacaacatgatactgttaactacaaaatgaccatatcaagagacataacaagtgcaaaagcagatagctgatttaaggagcttagacttctgacataaatttaggatgtgcaatagagagtcacacagacctcaacagatgagcagtgaaattctattgtttctgtctgtaaggcatattactgacaggtttctaggtattaataaagttttttcaagaagccaataggttcatgagagcatgggtaactaccatcatatcaggcagtcgtttatatgcaagggctagaacccgagatccttggcgtgtgtatctcttatatgtttcgatatattgtgcaggcacatncacaagtctctcttggattgtctctggcgcacccttgaaaataattaaaatatagcattcacatttggattactgat

SEQ ID NO: 53298 - DNA, 616 bp, Arabidopsis thaliana landsberg
gataactttcgcaaagtcaagaaccttgcctcggaggttgctgccgcggatgcgctcttcgcgatgaggatgtgctggcatatcttctaaccgggcttccctcgaactacgactccttcgttacatctataacgaccaaggactccgtctccctcgacgacgtctacacccaacttcgtcactttttgaggcgcatcaactacgacatcatacaaatcttcagctacagatgggatcatctgccaattacgctagccgaggaagccagtccaagggccatggtggtggactctcctgtgaacatggaggtgggcggcctcatgggggtgctctgtgacgtcccaacgatcgtcgcccacctagctctacttcgcaccccatctgccagatttgcggcaaggaaggtcacacggccatacgctgctggtaccgcatggacgactcctactccgaggaacctcctttctcacacgtcgccaccgcattctcaaaggttgataccgactggtacactgacaccggcgccaaaggacacatcaccagcaatctggatcgtcttaccgtccgtgaacgctaccacgggaatgaacaagtgcacgtcgggggtccgagctcg

SEQ ID NO: 53299 - DNA, 473 bp, Arabidopsis thaliana landsberg
ttaaaaactgggggtcctcatttggattttggtaccttatcatttattgcaataatggtccaacgccacgtctcgggaagggaagagagcagagtgtgagatccagatctggaccaattagtggagattctgttctagttttgtcagactcacgaaaccaacacttattacagatcttgcagacaaattaaatgtcatcgcaaaaattagatatgcccatgttacacactgcgaccaatgtaaccatatgtgaatatattctctaccactactatatgccacacacatagttcacatattcaactgcaatatacaatatcctgtgattaatttggtcttcggttcgatcttctttaataatcagatgagaattaaagccgaaattcatatactaatctgcgttgtctaaaatccgcatatttgctattttgggcgtctatagtgacaaaaagataaccataccgatttttgtg

SEQ ID NO: 53300 - DNA, 957 bp, Arabidopsis thaliana landsberg
tgtggatccgtcttcatagtcagctctgcagagcacttggtgcacttgaagtagaatctaaatatttgaatcccgagatacgtctgcatatcgaaagaaaagttctgaacaattggattagaataaaagccacaaaaacaacaccaagaggaataactaatcagcaatatttagggttcaagagcagtctaggtaatggtactcagttacactggttcgctatcataaaagctcaaattctcgaaaccctaaaaccccaaatctggaatcgttttcgtaattagtttcaattcaaggaccgacgacaataatatcgaaaactggtaccctaataaaattagaagacactcctattaatctgcatcaacactataaactaagaggtacagagattacgcaaaagcatccgaggaaataaattacactatgaaaccaaaccaattgattcaattacctcgccaatgacgtcctctttacgggaattgaacttggttcccttgtagatatagtttccgcaggtaccgcatcggacactcattggaagcatcatacgaaccttgatctgctggttcttcggtcgccggagccgttgaagcttcgcaggatcgaagtccggcggataatacttgtttagaaccttccgttctcccatgtcgcctgtttcttcttcctcctcgagattcttcttcttctcagcaaaatcacaggaataaggaaatttctcgctatgattttacgctttggattttaacctcggcttctccctataacacatatctgtctgaagcaccgcttttataaatcggttaaatgggcttttttgggcttgagttatcatgttgtattcaattttgggttaagttaaccgggtcgtgcattcgggttaccggtagctcgggtcattatgataaatttctctaccaataatctctgtgataatgatatgacatataatga

SEQ ID NO: 53301 - DNA, 547 bp, Arabidopsis thaliana landsberg
taaaatagttaatagttaattagggttataaacaataaagtcatgcataactagtaattcaatgaacttgtatatatttaatgtttaaatattcggtggtacgtctaaagaaaattaaaatatagaaagtgttgtgttagcttacttgtcaagcaaatccaagctgagcaaagcttcagaggggccattctcggagttagtcctctcttccccgccaaaaaacggtcccataagaacgtaaccgcgtacccgaaccggtgtcaactcgattgaaccggatccgaaccggacagcgagttgatgagctatgttcccaccggatgaatcaccaacaacaaaaaccctgtcaaagtcaacgtctgttccatcttcaaaccagtggttcacaccatcggaaacagcttggtcccagagccatgtaagcaccgcctcagcatcctcaaaggcagccgggacgcttggttcgggtgctaaccggtagtcaggtgagacgacaagggcgttaagggacgatgcaagagttagacagaagttgtgaaagtgaggc

SEQ ID NO: 53302 - DNA, 932 bp, Arabidopsis thaliana landsberg
tttgtatttggattaatcagtaatggtattggtgggttcttgtggaatctgaggttgctttggatccgttgatttgctcatcggtagcgaagtcagaatctcttaaagctttcgtcttgtttttttttcgagctttctttctccttttcgtattgttttcttcatgctatttatgattacaatggtgttacccaacctctgtttatggaatttcttatttaatcatactgaggttattgaaagtttcagtatacttgtggatggtaagatttgttacaagaaatgacagagacagctttgtgtttgactgtctgatgatgttatcatcaaacaattatgaatatgttagtcagcatcatacggctccattaatgaacatttgatgatgccaagttactcctctttagtcacatattgttttcatttcatttagcaccaaaaattatagggtggttctcacacattgttcctaaaaccgactgtgtcttccagagactgtgagttatttccaaacatcttacaatttcgttcctgccaaaaataaaccaaactagcaattggaaggccgagagaatctcatcaacagcagcacaactccctaattccttttgctctccagggaaaaaaaaaatagtcaaaaagttataacaaaaaagagaagtgacgactaataatgtgggctttattaaatgaataagcccactaactatttggcaatgttgatgaccaaggttttataaggcccgttaatctatatttggcgcattttttcctaatccttgtaatttctgttgataattcattaaacccgtaataattaaatttgactaatccaacccttttcgcttcgccgttttgaaacttcagaaaacagaaaaacctctcaaaaaccctaatttgctttcttcttcttcgccgcgacgcctgactct

SEQ ID NO: 53303 - DNA, 647 bp, Arabidopsis thaliana landsberg
cggagccatcttacctgaccctgactggtgcgtctgttgaataaaggatgcacatgaatcggatgattacgcatatgcgcgctaactagaacttctgcatgtgctctatagtaaagaattacaaagcgtgcgcaggtaaacaggtacgagcgatcgcatattaaaaacaagtgtagttcagagtattcttgcgtgtaattccaccgatcaaattcacctggatggatctaagaagtggttggtcgagttccttcaagagtcgattgatttcagcatctcgagaatcacatgacttgctccgtatgactatcatacctgatatgactagaaggtatagctcagttaaagttgccatcgttcgaccgatcatagtaagattatccaaaaggggttgatattgcctgaatcgttcctagtcggattatagatgattaagttaaatactttgataaagatacatatatatatatatatatatataaaagaaaagtcatgcacaagaaatggaacacatctatgaactataattagatacttttaggtactttagtaagaaagtaaaaataaattattaatttaaagcaaatgatatccgcttaaagggtgtattattcattgatatacagttttttttttcatttcactta

SEQ ID NO: 53304 - DNA, 565 bp, Arabidopsis thaliana landsberg
aatgtttccctcctagaacagtaatgatgattgattatttgtgtcttcaaggaaagaagtttagtactaggtattgagaattatcattagaatctgtctatttttctgattaaagtatttcttgagagtctaaatgtctattctatgggtagtagcacatggttctatggtattttctcttgttaagttgctattatatgcatgcttgttcttctgctcgctatatattctaaacaaaagcaactttatcaccatgaactgatacaagtttgtaatctgtggtaactctttgatcagcaatcttgtgttcatgacattggttttgatctccttgactttgattttgatttgatggtttagttgatgacatgggaggcagaatcaatgagctggagcaaagcatcaatgatctaagagccgagatgggagtagaaggcactcctcctccagcctccaaatcaggcgatgaacccacaacaccggctagctcctcttaaaaaggaatgtggtgttcatgacatgtccgaaggacagagaggactatgaaatatgtttagagcagtat

SEQ ID NO: 53305 - DNA, 878 bp, Arabidopsis thaliana landsberg
tttcatggcaatcttcctttcctaaactctccatgggaatcggctctgttatctcatcccccattgtcaagaaggtaaagccgtctactttcgtagtccatgcacaatctctgaggttgtttcgtactttctcttgcgcgtatagtattgtgcttgtctgattttttttagcttagtgtgttcttatatgtttgagctcgttgttcagatttaggcaattgtaatttgtggtttaaagtaaaaatctaggcttcttctagtgaatctttatgaacatgaaactagaaactcttaatgtgaataaaaatgtggttttcttttttcatgatttgtgtttcttctcacggaagttcaatttgccatttaggcttgcgagtgattatcttcaaagcttatctctttatcggttgggtatttcaagattcgattttttcttctaaatagcacctaatgattcagaatacactcttgagtcttgtcttagtattccagtcaccgttaataagagttatttttgctatagaaaagttttggttgatggattgctgtaggattcttttgtgcaagctgcgtggactcgaagatcacgaggtgaagcagcgaaaagacccaacaggaagtcatggaaacagagaacggacatgtacatgaggcctttccttctgaatgtgttcttctccaggaaattcatacacgctaaagtgatgcataggccaacaagcaaagtcatttcagttgccaccacaaatgctagagatataaggactaatataccgtctcttgttgataacgaagcgtgtagactcatcggtaagctcatagctgagcgattaatggaagcagcgtctatgctgctcatatgagcaagaagggagaag

SEQ ID NO: 53306 - DNA, 1213 bp, Arabidopsis thaliana landsberg
aaaccacttagtaatatgttatcacaaaaaaacataacataattataaatgttactataaaataaaaaatggtggaataaagtattgtaattttattaaataaattattgtaaatagtaaaaattatgtaggtgttaaataatgatgtggaatagaaaaaaaaatgatgtagagtattaaaaggaaaaaaaatggatgttgtaaattggtcttcctacataataacagattttgttataaaagtcgcattactatattatcatctgcatgacccagaggacagctggtgtaagagagccgttgatatgatttatccgttcgtcgttggtcttccactgactctatatagccatgcatgggacgattttgggttttaaaattagaatgttgttatgtgattttttcttttacatttcaaaagtaatatgtgaaaccataaaactggatcaaagataataataataaaaagaattagggttgtggttttttttgtgaagaagttgtcctataaatgtaaaaccagtcgaaatggtttattttacaaacctttaaaacatttcccaatattttaactattatcatcaaattatattttaaaattcaaaaatattctatgattgaataatatagtatatactattttcatgcaaatcaatgcagaaataattgaatacacattcatgatctaaacaaacatattgatcctacttacttagagttataaactatattctgaaatatattagttcaatgaaaggacaataaataactaatataacaactcaaagatccactactaaatagattaacagcttactaattcttaaaattctctagaatcccaaaataaataaaattctctacacaatattcgaaggaagagtgttatatatacatgttacaaggcatcaatatttagaaaccgtcggctgcatggaaatagccatcctcgaatctaattgtaaattgtgcatgtgagttttttttcaaatccattaaaatttctgactaaacattttttttttttggttaaatttgatagcaaataaaaagactttgaatactcagatgtaactattctgaaaagttttgaaataattaatgagaagaattttaaaaaaataaaaagaattagcacgagagcagaaaaagaaaaatacaaatatagacaaaggctatggaagtatggatggaaatgaatttgtcgcaaaca

SEQ ID NO: 53307 - DNA, 371 bp, Arabidopsis thaliana landsberg
caaacaagaaagcaacagaaaagaaaggaacaggaacacaacccaaaaacatgagagcgaacccaaacaaaaacaccaggaaacacaaaagcgtaacagcagcagcaaacacagaacacgtaaagcacgcacagcgaacaccccaaaagtggccaagagagcacagacacgaggcaaacggaccaagaatggagaccaaaaagacaacacacacctgcccaatgcagacaacaagcacacacccagcagccgcaaaaaacaacaacacagaggcgcagagaaagaccgcacaaaaaaaaacagaacaaaatcacaaagccgaagagaaaaaaagaacccgcggcgaaaaaagggaaccacggagaaaaaca

SEQ ID NO: 53308 - DNA, 1153 bp, Arabidopsis thaliana landsberg
cttattgttacataacaaaaaaaaaactttgttttatatacaagttgaaaataaaaaaaaggggaggagactttgcttgggattttcgtaattcgttacataaattcggccatttgcagtacattaacgttatcatggacattatcttttatagatgcaaatactttccaaaatttaatcattgagtataattacactagatgactttttaaataccaagatactttgtaatgtaccacatagatctgaaaattataaattttgaagatatttgaatgtaaaattctaattgttcacaactatatattgaccattgaaaaaaaacacttcaattccttcctctaaataacaaaagttgatacactttaacaaaaaagaagagactatatatgccccatagtgtattttgaaaatctccacatcatatatgtgcaagttagaaaatggtaaatttgtgtattttctcaatctaggttaaaatgcttcctatatcgactagttttgtgataccgatttcgagacactagataacgatttttgtgtacggtattctagataattatggtaatcatgtaccagttcggagaataaatgccactttggttaggttcgtctccatgactagtagagtatttgcatgcatcactaatattaaacttaactgggcacataatttatatagtttgggggtcctctctaatttaaatcactaaacagaaaacagatagataaaccaaccaatacgaaaactaatcacgcaccgttatggattgttaggtaaaagtggtcaacatcaataattcgttttaagtatgttgcgaccttaattaatctcaaccgtacctttacttaaaaaataggtcaacccgagactctttcttctattaatatgaaattcattacagaaatgtcaaattcacttaaaacaagttatgtaacagcccaaccaacgaaagtaaaacaagtttttcttttttggccaaactaccaaattctttttcaagtgttttcaggaagtacaaacatttgctttaaagaaatgaatgatccaaaactcaaatgcgttcacagataaattaaagatctagcaaaaattgttatttctccagttaaaacttaaagtgttatagagtgataattttggcgataaaat

SEQ ID NO: 53309 - DNA, 636 bp, Arabidopsis thaliana landsberg
tttatatttatacaacattgcactagcttaaatccaacactcggaaagctaaaagaagagtgcattttctgaagagctaatgacctatcaattgattatgggttgacctacaagcgcatttacacagggagagacaacgggaagaggggcaaaaaatgtcttatcataatcagaacatcactgaaagagacatggaaaacatctggctgactcttcacaaagagagttaataatgtcatcatcagaaagcaatgagaacttttacaaaacaaaattaacttgccaaattggaaaaagaaactaagactagtcaaagtctgctaatcccaaattggttctaaagaatcatatcatttaaaccaaaatcgaaaacaggaaaaaaaaaaacatgctcaaagttatctagatgagtctaaatggctcgaaactgagcccctagagccttaagaacaacttcatctacacaataaccacttccatggatccatatagctcacttaagttagccacgacacaactagaatcgaataagaactcacaaacccccaaaactacgaatcaatagatcgaaacaatactccaatgtacagagtaagattaaaggacatctcttgtctacattactaaattcaatct

SEQ ID NO: 53310 - DNA, 624 bp, Arabidopsis thaliana landsberg
  unsure (1)..(624): unsure at all n locations
cggggagcccgcccaaacctccggggacaccggttatctggtggcgcgacttcccggtaaggcccacgcgagcctgctggtgatcaacacgggcgacggctccaccatcgccgaccatccgcttcccgggacatcggcggtgcaaacggtttcggcgcaaaaaccacggggcgcggcgatttcggtgggtccacacggagaagtcgtggtggccgaggccgatggcgcgctgacggcattccatcctgcgggctctaaccgatgagccgggcgacgaatcccgtgaccaccagccaaaaaaccgctgccaggccgtaggtcacgatgacggtgacgtcggagctggagaaggtgaacaaccccggaaagaacaacgcgagcggctcggccagccccttgatgaagcgaaaaaaaccgttggcctggttggcccccagcagcaacattacgatatagagcgcctctatcagcgcgaaaagccctcccaccccgctgatcaaccgggcggccgcctcggtgttgttacgaatcggagcgcgccacctggacatacattcaatntatccgcacagacggtactgcagaccgtacctcgaacggatcacaccgcgggcaatgaaatac

SEQ ID NO: 53311 - DNA, 691 bp, Arabidopsis thaliana landsberg
  unsure (1)..(691): unsure at all n locations
actttaaatatctaacccattcaataatgaataaaataatcatttgaattcttgttttagagttccaaattaatgtttttaattttggtattggttggcaataatttatgtatgggggaaaaagacatataaaataaatggagagaaggcaatacatttgaattcaaggccacaagcaaaagatgcaagaccttcaacaaaagccaagaatggtgcatcatgtgtgacttgtaaaagatatattcaggatcatcctaatcttttttgctctatctcctgcaaggtaatttatggtatcttttgttaaagtttatatttccctttgaattgtgttgattagtctattggtagttatctacctttcttaatcttttatttattggtagttatcaaacatataaaacaatcatttacagaataatcttgaaatgataaaaaaaagttagtcttgaggcatatagttttgacatagtatataggaaaattatgagtgatttgaattgtacacattttcaactgtacattgtcttgttcacactcaaaaatgtgtatagttttgttttcggntagaagatgcgcaaatattttttaaaagtgtttcattttaatacttttcttaaaaatcattggttttgaaaattaccaattatttaattttccgaaaaaaccgtaattcttacatttaaaacaa

SEQ ID NO: 53312 - DNA, 962 bp, Arabidopsis thaliana landsberg
agaggttgaagaagatattgttcgaagagcgagactccgtgaatcttactacggtacttacgataattgtgatgaccataatgatgttgatgatgataagttatatcatcagcccgcccggatgtcatgcgttaacagttccgatattttgaggtgcgtcatgcttatttttatatgtacttaagtaaatattctcattagggactcatgagctcttacatatagttaactttttttgacatgccacgttagtaattaagatgaatattgaataatgaatataacgtattcaagaggagaaataacgttggtttcatgattgataatatgatattcaccggtgtagatttgaatgtacgaaacaagttatatgactacattttaaagtgttttttttttttttttttttttgaattttctagatttcgtatactggtgaaatctgtagtgatatttaaggaattaccggaagaaacagaaataattttattgtgtatgatactatgatcaatactaatatcaacttctgtttgtctgccgttaaggtcagcaaggaacgcgttgaatcagtacccacgtttctcactggacggtaaggacgctatgtaccggtcatccttccggcgccatcttggcaccagtgctgacatgacgatacagggtgggcggagatcccactgcggggatcaacggacatcaaagagatcgagccagatgagcttggagacaaaacgcctgccacggacagtgcgcggagagagtgtggtatggtgcaagacgggggttgttgcaaagctgatgggtctggagatgatacctgttccggacaagggaaaatcgggaaaagataagttagggactctgctcaagagggagcgtctaaggaggagagaacggactctggacgttaatggtctgaccggtcagacgactgaagcttcttgctcgtctggagggtttac

SEQ ID NO: 53313 - DNA, 916 bp, Arabidopsis thaliana landsberg
ctcttggggtgcttttgaacgtccatattttatcctttggcccacggtctttgaggttgcttagactgtacgtacagataaattaaacatgtcatggacagtgaaaagatagatgaaacccaatctagaagtgcgttaaagaaagaaatttaccatctgtgaaaccatagttttcaccgtctttgggccatatacacgatgcttcgatggtttctgggcctttgcatagaaggaagcaacatcgggtaaagacaagcaacctctggttgctttcaccaatgtaagatctggatcagtatttgtctggttataccagtaaattagctgcccgagacaatagttctcgccataagtcttccggtactcctttatactctcacctaacttgtcagcatacttagcccccaaatctaacggactaatgtgtacaggagaagagataaaggactggtattcctgcaacatatcaagacccatctgtcagaagaagttcaacaagattcattctttcgtcactcaaaagtatacgaaacgacttacccgaactttgaaaaagcacttggtataggcatatatgtgaattaaatcagctgcagcatcattccgacacttgtatgtacatgggagatctcggatctcatctctcaaccttcatggggagacagtattcgatatgagtgtactgtttcataagagtgtttcaagcataagtaatatgataggtgcactcaccaaagtaacgatctctgaagttcctttaaaacatcagcagatccagatggatcatggccatgaatctttaatctgagttcattaagagggccttcttcacggtgcggtgacaggctctgaagaagctcataaactaaagagccatccccgttccaaacaaaagacactgtttctgaggaatcgc

SEQ ID NO: 53314 - DNA, 974 bp, Arabidopsis thaliana landsberg
acaagtacgttttcggacccacatcggaccagtagaggcacacaaccatacgggtgttgtgcccacttttgacgacattaccatcagaccaaaggaatatatgaaagatacatagagagagatatgttctcgaactaactatttctttttttaccctcttctgattataatattattttcccgttttgctgttctcttctaccaaactttcctcttatatcaaactttcaaatcgaattcctgaactttatatcacagtccttatttgttttctcttgcaacaaatgaatttttttgttattgttgaatagttatatttttaaataagtagctttgacagaatgtatatttaatgtagaatagcaaataaactacaaacaagaacacatagaagggacatactggtcatttcgaaagtcaaagccagaggagaagctactatttctccaactgtctgtaaacgaggaatttttacaaccgcaagtcaaaggatttaaaataagtagttatggttgtatctgtcgttcttctttctctatgaactaaaggccgttggaagcaacacacacacacacacagtgaaacactacagtttacagattcgttttctttagctcaatcgaattatattatttcttaatcagtcaatatttaaataatggaggatgatgataagtattaaataaataattattctaggattaatcagacatgcgcagttatataataatcagtttgattttcttttccttttcgagcccctctctctctcactcttttcttttccgagaacccaacaaaaaaaaagctactattaatccttcccctcgtgaggaaatcatttcttcttgtttctcgagatttattctctttctctctctctttctctgtgtgtttcgtgtcttcagattagttcgatgtttcgttcagacaaggcggaaaaaatggataaacgacgacggagacagagcaaa

SEQ ID NO: 53315 - DNA, 1248 bp, Arabidopsis thaliana landsberg
aaaaaatccacgatacgaataaatataaatattaggagtataaaatatggttgaatgaatgtatcttttcccattcatacaccataacgcgttggtactctacgccatactgagatactttcccattccatattcaaggcatctcattactcttcgctgtatgcctgtatacttgaaatctgaaagctctagtgtttcttttttgacgctttcaattctaaaaacccacgaggacacatctttttcgattcctagccatcattttattgtatatatgatttttatattgtcatagaatacacattttgatttgcaaaaaaaaaaaaaaacattcttagcgaaataccgacttaattgtccacaaatatgtaagataagatctaattatattgatgtattcaatcacacgtattggcatacttataaactgtggtacttcgaatctgatgtaaaacatctttgtttttttttggtcaactactaagagaatctctaaaattagtcttacacaaaactttattttattgagtactgatttcgaaagaaacaagtgtcttcggttacttgtttttgacgaaaataaaatattgccttaggcaaattaaaaacattaaacacgaatgttacgtgtttaattggctaagttaacgcaaaaaaatacatatacatatatttgatatattcagcataatttgttttatttatcgtttttagaattcgtggccattagacccataactatatgacgatgttaaagagaaaataaatcataaataaaataagagtccttatcaataaacctaattggctaatttcaacctcaaagagtagtaggaacaggtaaggtgaagccaaacagctccttttacagttggaccactagagctgatctggcatacaaagtatgcttattgggctgtcacggcccatccgcaaaatgtcgttggttacgaagcatccacgacatagacggtgccacatgtagaaaagtgtttcggcgatcaagattgtgtccacatcattagacgtctgaactgtccacgtgtctatcaaagctggcgtcaaacattacgttttcgtcgtttgcgcctcctagttcacacgtgcaacgaacgcgtgcgacgtatcaaaattgttaattttagccatgtataaagaatatctacaaaattaacctcaggaatatttttgttttttcaattgaggccataatatacgttccgattgagagatttttcatcatatcac

SEQ ID NO: 53316 - DNA, 502 bp, Arabidopsis thaliana landsberg
ccgggtcgtagagcggctggccctcgacctccggtgcgcccggcaagcgcccctcgcggccgcgaccaccgtttcccaccgagacttcgatctcgtcgaaatcacggccggccgccgcgcagtggcctcgcagcacctccagcttgtgagcgagctcgtcgggaccggcaaagctgtgccagatgttggcgtgctcggcgaccatccgcagcgtcttcttctcgccaccgccaccgatgagcatcggcatcgggccgagcggtggcgggttgagttgctggaggcgggacgtgatgcgcgggagagcggcgtcgaggtcatcgagccgcagcccggccgtcttgaagtcgaatccgtagctgttgaagtccttttcgaaccatccagagccgaggcccaggacgaaccgaccgccggaaatgtggtcgatcgtgcgcgccatgtctgccagcagatcggggttgcggtaggcggtgcagctcaccagtgcgccgagctggac

SEQ ID NO: 53317 - DNA, 1251 bp, Arabidopsis thaliana landsberg
ggtgcgttgttatacgccatcgcagcatcgttcatggcaccaggtggaatcatcattggccgatttgccatcaagctaacgccatcatcaaattgcctctgagtttgcatgtttgagaaggtcatctgtgccaattgttcctctatcctctggtcctcactgactctaacgcgaatcggtggcaaattggatgtggaaggagatgaagaagaagatcctatcgaagaaccagcggcttccatcattggagaatcaggcatcgagctcatatgcatctcctgatgcgaaatcacaccgttagcaaccaaatcccctcgcttattgttctcgccaccaacattagtttcaaggttttggatctcggtctctccgccgctagcttcgtcgagattcaccaaggtattattcacggcggcggaatctgataaaccacgaggaagcaaaccagattgattcagagcatcgacgaaccatgtgtcagatttcgtgccgtcaagcagagatcccatagtagcggcggtctcgagcttgttagcgaaaaggaacaaccggagccgttgcgtagcagtcgccgtcgctgacgaagccgcgcgatcgtattcctcgatcatgttctccagatcttcatcggtagtgatggtgacgagtgaatcgagatcttcgctagggagctggtacttgagagtaaaggaccggccgttgagaagcatactagagagacgagatcggagcgaagacagtgacgcacgtcgatcaacaaccacaatacgagtctcgccgccggagtacgtcaacgatttgtcgtgtggacgaggcatgatgtggccaccaaaactgcacataagacgaagcttagcgccgggaacagccgcaagtggctcaggaatacctccggtatcagtagcaacggcgcgtggagatccatcgatcggttgctgaacggctacgctcttgactggcgccggaatagcggaagagacggcggcggcgggagtaggatttggggttagttgcgataaaggagggagtggggtctccattggttcgataacgacgggataggttagttggacggatttatatattgataattcgaaactaatcctttattaatcgtcaacataatcactattattattattaataagaaaaataaattgtgatttgtataaaaataaaataaagatgaaacgttagattctctgcagaataaagtgagctggagaaatttacagagatgatgattcatcg

SEQ ID NO: 53318 - DNA, 1146 bp, Arabidopsis thaliana landsberg
gacaacaatatttcaacaccaaatcgaggcgataaggaaaaggctaaagcgacccatgatccctcgctcctttggtcaaattagaatttaaaactgtttcattggtgcaattaaatgatcctctaaaaagtgtttgaacataattatttttccatatacatccataattgtataaacttttgtgagaagaaacctacgaaatttctgtcttttcaacatatatattaatatcaactaatagatggtgatctaaagtttaaaaatcaggtatcaaataatttcaatttcattttgaattataagtatggactagttgacaatcataaataaaaaccttaaattaccaaaaaaataatccaattgctttcatagattaggatatataattagtgtgttcgaatccgatttacaataaaaacaaaattacagatcggagcaattcacatatatacgttaaaaaggtgggggctcacttcacgtggagacttaattggatcagaaaagtaacttaaaagatgcggaaccccgaaggtgccgatggcatggggacccattcacgtacacccaaacacaaacaccaacattgcctaaactctttctctatataaacacttctctttctttttctttctctcacacaaaaatacaacaacttagatcagtctcaaagggggaaaaaaaacttaaaagaaacattaagaggcaacacaaatcacacaaaagatcaaattgaagcctaagaagaaggcaaaaagtgagaagcaatggctaccatgttgaaggtctctcttgtattgtcattgttaggttttctggtgatcgctgtcgtgactccatcggcggcgaacccattcaggaagagcgtagttctcggagggaagtcaggcgttccaaacattcggaccaacagggaaattcaacaacttggaaggtatgcatacatgatattgatacatctactatacaggtatgatatgaattagaaatgtgatgtgattgtgcgtgatcacaggtactgcgtggagcaattcaatcaacaagcacagaacgagcaaggaaacataggatccattgcgaaaacaaacacggcaatttcgaatccattgcaattttacccgagtagtgtctgctcaaaaaacaggtcgt

SEQ ID NO: 53319 - DNA, 642 bp, Arabidopsis thaliana landsberg
tacttgtgtgtagctgatattgtggtaggcttatcggcttgtgtctgttggtttgtcgtgaatcctgtaagaactatgtttggtttctatttcttaatgaaatagggggtatcccattgtcaaaaaaaaataaaatcaagtggttttgagatcaaacaaggttattaacccaatatcacgcgcacgaccggaagagcaaagcgaccccagtttagggtccttgcactgttgtgggttctaacttcagcatggagctgtgatttataatataacttaaatagtttacaaaatatttttaatctaaatagtaaacaaaataaattatctaaatgtttctaaaacgattaaaactccagattcgtgatttttggagcatctaatatcctgctctactaagtactaactctataaattttgtgaaagagcagtcacaaacatacctttagagtatctccggcaaggtgtctcaaaacagtgccctaaaattaagattctacataatttaaagtatttaggacatcaaaaataaattaagctctaagagttaaccctaaatcgtgtattttaggaagcaaattatattattattgagaatgatatagaaataagtatagtgcactactatgggacatagtgtatttg

SEQ ID NO: 53320 - DNA, 611 bp, Arabidopsis thaliana landsberg
tctgcagatgctgattctgtcgaagctatgataataaaacttaccgaaagggtaataattttctaatgataatttttggatcatagcttcataactgtaaatagacatgtgttagtaaatcaattttctttttgtttcctatatcatttgcaggagggcacacagcttaaatccaagggaaaggccggtgctgctacacgtgttgcagtgctcacatggcgatcacttttagttatgtcaagagaatggaaatactattggctccgacttatcctctacatgattcttacacttagtattggcacattatattctggcttaggtcactctttgtcttctgttgcagtaagtcttctaaaccattctcagcatgtcacatttgagtaccaagacatgcaattatcgttcggtgtaaatatttcttacagacaagagttgctgcggtatttgtttttgtctcgtttgcttcactgttggggattgctggaataccttcacttttaaaagaaatcaaggtgactatttctcctttttgatttctcttatctttgatcacttcttcttttgagctctgaagtttactttttcttttaatagatttatagaagtga

SEQ ID NO: 53321 - DNA, 1390 bp, Arabidopsis thaliana landsberg
ttctttcttcttctttatttgttgtccccatgaaaataaaagaagagaaggaaaccaaaactaaaagatattatcatcattcatcaatgaacaacaacttgttgatcatcgatgagcatcactgagctgtgatgatgaaccatgtgccaccttccattgtggaactcgaacacattggtgattaggaatggaccaccatccacgttcaggtatgccttcatggtgacccaagccatgtctgttagtatccgagtgcgaaccgtgtggacctgaaagtcaaacccttgttcccaattgaaacaaagttgccagctttgtatcacttcattgtacctgcaattcaagaagggaaaacatagatgattcataccgatttcttttaaagaaatccacaaagatgtatttagcctatttgaagatggccaaatctagaacaaagatgcataagaataaaactgtgtggagtagactcaaacaatggaaggtgctgaaagaatccaaattctatcagagctactgtggatatactactgttaactctgttatcttattgctataacttttttgcttaaacgtttttactaaatcatacaatactcttaacatcttgtatcacgaggaactgcacaagagcattgttccgctagtatactcaaactcagataccatctcatagctaagaccatagaaacatacccaaaaccgttaaagaacatgctaggtacacattagaatgacaaaagggggtgaaatgtggagttgttacccggagaagagttcgccagaggcatggatacacttgacatagtccgagttcaaccacaaccgagccatcgcttgaagcgctctgtctctaatgatggtgaagaattccgtattcacactaataatcgctctagtagttgcatagtactctttccacccattgactggtgttataccatcttgctccagagtaaaatcctaacacatgagaaaaaagtaagagaagcattaaacaaaatagcaccattcacgaaaacacacactaatccagaaactgctaagaatacacatcttttaacctagaatcatttctgaatttccaatacacaaagctaatacaaatgagtgattagtgaatctaattaccttgtgataaagagctttccaagcattatcatcattagcagctttcctcatcaaggacttagtcctggataagcgaccgagactgggatagtccgagtaactaagcgcgtgtgtcgtaatttccggaacctactagctcatcatcgagattccaggcttatcgatcgccaccgtggaagttgtaaccgtcgttctctctccgccaaccataggaggcagtaccacgttagccagcgcgtcgaaggcataggtttgttgt

SEQ ID NO: 53322 - DNA, 374 bp, Arabidopsis thaliana landsberg
aagatctcttacacgtggtattggtctagtagcctctgcaatgttggattatccagtttttgttctttttggtcacaggatttcttaagtttttgttaaaatcataaaattatcaagatgtgcagttaggtgtcatacaatgatatttgattcggacaagggaatacgattcatatggggagaagacaaaggatatatagctgtcaagaacacgagaccttcttacatttttatattttgttttttatacagctatacttacttatacaaggaaagattgaagaaatgaataaggaaataaactaatttattagttttgattacctagtcatttttcacccgaattttgtgtgtgtgtgtgtgtgtgtgtgtgt

SEQ ID NO: 53323 - DNA, 1168 bp, Arabidopsis thaliana landsberg
ctctatatattatggattgcacgcttttatgaaaaatcaacatttgggccagcaagattgcacattacatgcaaaaaatattcttacatacatatatcttgagaaatgaacacatatacaccaataaattgtgaaaggaaccactaaacaaagagattgaggacagacaatatactaacaccaattctcgttgtcatcgaccatgacaagcaaagcaatgataaaagcataatcaacctctggatttactctcaccttaaagttatatttccctttgcagaaacttccccatgtaaacttatgtgttacctgcaatataaggatttcaatccttcaccaatgtataaaaattgcaaatttcttaataagtatgggtttttaacttttacccctaccccggcgatgagagcatccgctttgaaaactttgaatgagatattagagtatcctcctgaagcatgaaaatcacaagtgtttgtcttcttgacattgttgttctccggcaagaaaacatccacggatgttttcagtgaaaccgcttgagattgttgtaccgtgaagagcaagtcttctctctctttgctctctcctccatgcacttcccacttgttcttcaacgcaagtccctaaacaatcatacaccgtttcaagaaagagtcatttttatatgtatgtttgttgaaaaattaaaatgttttgtaaccttttgacgcattgagaggattgtgaaaccggctggatcacgcataactcttttacggttaaacccccaagcttgtccatcaatttgtaggagcagattcccacttggatcaaacacttcataataatctttagaaaaattctgaacttttctcttcaccaaaagatccattgggtatggattacagaattgatcgctcactacgcttatcgcgggatctcctacttgccattctgtttttttattcttcggcattttcgaataaagttcaagaagaagacgaagaagaagattgcaaaagactatgaaaggctctttctttatagcccttgataatcctcctgatgatgaagaattatcaaaaacacctcttcacattttcttaaaacaatatatcaactaaaaacaaatttgagattgtcagattggtttttactttttcagacttttattctcaaccaaaga

SEQ ID NO: 53324 - DNA, 1056 bp, Arabidopsis thaliana landsberg
cttttttttttggtgttttctaaaaatctaagtaacagtgttattaatggagaaaataaatgagaagaagggttatgtttagattgtttcctgtgtaaatgtaaaatcaaacatataaattaaaccggagcaggaaattaaataaatagagctgacctgtcttgtctgtgtaactgctgaaagttttgaagagactgaaggcagaagtaatgatggcaatatcaataacatatatggagtcatcattaattaaatagtaatttcattactctcttattagtcataaaaatcagccaacaccacttgtcgtgcgtttttatttatgtttgactgacagatgaaattaatgagaaagttaattatcttttggtatcacattgggaaaaaggaacaataaatgaaggagggaggcatggaatgggaatgcatgttggattcgcagacaactcaaaatccatgcagtgtttagggcttttaggttctctgtaacctatctatacgacaccgtatctctgccccctcctgattccatacccattttgagcccaccgccttattctccccacacctcacactcgcccattcgcgcgtatctatactttcacgcttacctattattccaacatcctcataatcacattttaacaataacccattgaagaataataattcatttcattcttttagaaagtttggtttgtaactaggttatataattttacccaataaaggttatagaatggtttaaaactactaagaaaaacataatttagctgatcttttctcaaaaaaaaaaaaaatagttgtcataatcgaatgccaatgatgaaacatattcaccataaagctaacttaaagaaccttttctaaccaacaagttaacaagtgatggcgaatttggagagtgggtgagatttgctctaaggatataattgcatgttaaaatgggaagtgcaattagtacgggttgatatacagtactacacaattatgcctcacgaggcctactcttaaagcgaagctgcctcgtttttgagatacacatgaccccaatgg

SEQ ID NO: 53325 - DNA, 1008 bp, Arabidopsis thaliana landsberg
cttctaagaacatatatattcagaaaagagaataaaacaaccagtaactggatcccaaggcagaaactgaaccacacaggtcttacattactatgattccactgataaacattttgggttttaacctaacaaaattggtccaaaggatatatataatgatacatagtgaaggaaagagtcattgcctagatctggcctcagcccttcgagcctcttcacgtgtagttggaaacaactccacataccttgacccaatcgacattttgtccttagccattgccctcctcgcctcctcccccgtctcaaactccacaaatgcctctcccgtggccttcccatcaggccgacacacaacctgtacccgtccttggataaccttgtacccgctgaaaaactctatgatttgaggtttgttcaccgagtaagggaggcctcgcatcttcaaaacctctgtgtactcaagcttctctttctcactaaacctctttgccctggatggcccggtgggaggtgggctagcacgtacctcatactcatacgctccctcctcagcagccaccgcattgtagtagtcctgcttagagcaccggaaaacttccacgtatctcctccccatattgtgtctgtccctttgcaaggcaatctcgacttgcatagggccggcaaacaccacaaaggcctccccagagaatttaccgtttttgctgacgagcaggacatcgacaatgttgaggcccgcaaagaactcgaagatgtcaatgtcagcgcagttgaagggaagacccctgaggcgaacgactgggaatccgccggcatagccaaaaggtggaaagctggtaggtccagtgccaactgccaagtagggatttgattgcatcattctttgtctctttgatcccacctcgtaccccccgctcccaaacatggcccttcaattaccaaacaagaaacccggaaaaagatcccccaactcaaccagttaatataaccacacccaacggagtcttc

SEQ ID NO: 53326 - DNA, 252 bp, Arabidopsis thaliana landsberg
  unsure (1)..(252): unsure at all n locations
tgagagagagacggtgcnggngtgcgagtgagttggtgtgagtgtgcgagaancgcgttaggtcgacgcgacgagagagcggtgagagacgcgtgagtgcgagtcgtgcgngngacgagtggtgtgtggagagacgcgtagtgcgagacgtgtgtgtctagagtgtgagagagcgtgcggngagcgagtcgtgagtgtgatggtgagtgcgtgtgtgcgtgcgtgagagagcgtgtgagagagtgagtgtga

SEQ ID NO: 53327 - DNA, 1102 bp, Arabidopsis thaliana landsberg
tcgaggagctgcaacagattgagcaacagctttgatgttaagtgtcaaatgtattcgagcaagaagggggggggtatatatttatctggtatatctccacattataagtattggtcgaatcatcttctgaaaccactcataattataactcaatttctcatctcttttagactcaagggtttaaaggacaaaatgggccgctcaagcaaaagggaaagtaccttttatgagtgtatataaacagatattagtatgtatgcaaattgtgtaatattccaagtaagtaagcctcttgggcttgctttttacaaattggaatctaaaacttttgcaggagaaagctttatctgcagaaaacgagaagctctctgaaaaggtataatatattcttatgggtctcaagttagggttgcacattcgtttttttattcggtaaagataagaaagttggggttctttttgggggttattaggttaggagagtccttactagtttttcttggttatcttcaatcatcaaccttctttaatttatgtattgttctatatatcttctaatttgcatctattaattttgtgtaataattctatttgaatgcagtggggatctcatgaaagcgaagtttggtcaaataagaatcaagaaagtactggaagaggtgatgaagagagtagcccaagttctgaagtagagacgcaattgttcattgggttaccttgttcttcaagaaagtgatctccactcaacaaaaaaaacaaaaaaacaaactaagtaaaaacaggtttagcagtactgagagtgtataaggacaagtaacaaaactctaaagctgcttctctcttgttgtcttatttctctctcactctctctctctcagtcacttctttaatgattctgaactgcttgtgttatgtatctatgttcttacacttgcctctctagaatgtaattttgattatgttttgttttcatgtatcaatttagctttcttccctcaaaatcataaaatcaggaatatctgtactatataacttactgggttttcaagtcgagagactagaggtctagaacttcccaaactggtgaaaaaatataaagaaa

SEQ ID NO: 53328 - DNA, 567 bp, Arabidopsis thaliana landsberg
tttccctatggcccccgcccatatataacactgaagctcgtcttcgttttttggggtcaatatttccaaatcttcgaaaaatactaaaaactttgatatcctaaataagtttatctatctatctatctatctatctatctatctatatatatatatatatatatatatatatatatattattctataagtttataattacttttgataaaacagttctaacataacgttttaaaccctatacatataattttgtagaagaaaaagtcgtaatacatatatttcaatttccaaagtcgtcatattttaccaaaatttcgataaaataataattaagtactttaatttatatgtcattactaaactgaaatccatcagcatgcaatgatacaatcacacaagccgatgtgggacacgctaacattctgggaaattgttaaacaatgcgtaagatttttctgttgaaactaaaacatcactagtgggcggtttcatattattagcactattaattatcactttatacaaatttttgttttttaatgctttatttcggcccacgaaaattg

SEQ ID NO: 53329 - DNA, 888 bp, Arabidopsis thaliana landsberg
atctttgtatccaatgatgtcgtcaagtacaagatgttagatggaatgtcgttgtctttcgttttctatatacaaaaaacgtgtaaggtggtcttgtcctatgccttgagtattgtacatttgtgtgtacatacacaaatttctcttgaaattgaccccaatatacccaaccactcaccgacgcatttttcatgctacattttaatttaatgtgatattaacaattcaatgctatgatttctctaattatatcattcttcacatacatttctcatcgtaatttgtgcggtcctttttatgagttgcgagaaataaatttataagacaacaacgagtaggtgagcagagttatttttcggaaataccgatgtattgtttaatgtggggaattaactcattgaattctaaatcaagaagtagaaaaaaaaaatctgaaattaacatgggtaactaggtttttatatgtcataccgtcatcggctaataatatgtatatcatgttacattaggttgtttgataaatttactacccctagtgatataaactcgatgagtagtccgattatagaattcagccaacctttataattttgtatagggctaaaaccattcattgaagatcacaaacaatcgctagctatagctatatcgtggcagagggagatgaggatggggaaacaaacactccatgttggtcactaatttgtaatacaatctgtgtacaataacaaatgatcattacaataaacgcaaaaatgtactcgaacacgagttctcataaataaacacaataaaaattatgcatccaaactttatattatttttcgtttttttgtgatttttaaacattttttctatgtataaaattacatgctaatttattggtgt

SEQ ID NO: 53330 - DNA, 459 bp, Arabidopsis thaliana landsberg
  unsure (1)..(459): unsure at all n locations
agaggatcccccatgtattcacaaattatacaacgtatggaatttaaaacttatacgcatgaactacacccatcttgatccaattaattacgtatacnnnnnnnnnnnnnnnnnnnnnnnnnnnnnnnngccaatatgtggatgatagatgtatgctcgtcatttacagaatattagataatctaaatagatcgtagtaatgcatgtcacatgaagtacgagccgaagattctagtcacattagacagataaaccagcatgcagttcaagtcagaggcaccagaagttcgtttttagctataacaaaagagttcaattttagctacttaactaggacttatgtgagtaaatttcacacagattcttattgataatgacataagtatatgtgcgcacacatacaaaatggcatatcgatcatgtacatgaggaccaaatgtctatctatatatatatatc

SEQ ID NO: 53331 - DNA, 447 bp, Arabidopsis thaliana landsberg
atttagaattagtattgctaaattgtaacaacatgccatcatatttccatcattgagttttgttatggatttggcaaacaacccaatctaagtcaaattcattgcatgcaagatcatactaaatgttgtactggagaaagcacgatattctatagcatttttttttgtttaaatgttaattccattgtagtaagtacaataatatatagtttagaatctgttattacaattcaataatcactacaatataagtagaattcaaatgaaagtgcatgaatatttgtatacgtcatgtatataaaaaacatataaggcctagatatcttcataaaagtgtttcttgaaggcctccatgtgagccacctgtagacacgtcgcgagaatcaccgagccatcttcgttttgatccggcaagatcagcgagtcgccgtcaaagtcatgcgtgcc

SEQ ID NO: 53332 - DNA, 268 bp, Arabidopsis thaliana landsberg
tactctatcccaatcatcacgtattcgtttgttacattctttatggctttactgattaaactcgccgcgaaacccaattcattcgatatcagttcacctatatgcataacaaaattatcgaaacagactttgcattgtagaatcagtacgtactaacctacatttacgtggatgaaaagcaaccaagaaaagtttcatatatccaagttcttcagataattttaattgttcagcaatagtagaaattaatgataatccatcagtttca

SEQ ID NO: 53333 - DNA, 1297 bp, Arabidopsis thaliana landsberg
tcattatcggattcagaagagaagtcaaacctagagaagttgtttgggacacaagaaaactatgagcttggaaatgaggatgaagaaaagaacgagagatcatcgtcagattcagaagagaagtcaaacctagagaatttgcttgcgacacaagaaaactacgagctttactgtcctagctgtagcacatgtatcaccagaaatgtggttctcaagaaaagaaaacgagggaagcacgttaattcatctctggatctgaaacccgatataccggttgttgaaccggacgaaccaagcgacattgaggagatggaatcaccagttaaggtttatgtccctgagactcggattgaggatgatcaagaagataaagagggaactatctttacttgcttggtttgtgatctaaagtacttcatccggttaggtaaatcaaaccttaattaaaccggttctgagtcaattctttccaggttttcttggttttgtaaacttgatggatcaaccctggttttatattttaaatttcaggaaaaaagttcttacaacttgattatatcaggggaaaaccggttgagaaatcaggtatgttatcgtgaattgaaacaaaaatattactcctctcacctaaaccggactagacaaattgatttcaatttgggaaaaaatcaacaacggtttctttgatcataaaaaatgtttataggcttatctttggtatttgaatattcgatagaactacatatattttgtacccaaagaaaatttgcaaactatatgcagttgaagaatatatagatgtgaggaagagtataaacaccacacaatcaccaccacaaattcaaccggacggagaaagattcgccattgagttgttaaagagcaccgtctacggcggtctcactgagaccatcaccagcctcggcgttgtatcatctgcttctgcctctggttcctccaccagtaagtctctagactccattttccttttagttagcaaacaaatgcgagattagtttatcggctatctaatcatcagattggtccttgttataaatagtaacactatataataatttcgtctattattttttgttgttgtttcagtgaatatattggctcttgctgtcgcaaatttggccggtgggctcatcgtcctcgctcaaaacgtaatttacttgaaccaaaaaacgttttctcgtgccacagattgcctatggggtttcttatgttagccggaaaaatttattttttattgcagtttcacgatctaagaatcagctcagatcgacagaaa

SEQ ID NO: 53334 - DNA, 735 bp, Arabidopsis thaliana landsberg
taaaactcggaaaattattgcacccacaaatccgcaaccatgatttaaagttttttttaaaaagttatattaatttatatgtgaatagataattaattcaggcaagaagccagaaatctttgtgacgtttagttgtaagagtgtatccaccaagcttcttgcctctcttacgaaccgcaatagccatgcaaggagagttgttgatgcaatactcgacgaagtcgtgtttggtcacgggtcgggcctgcgacgcccataccattagtagccgccatgtgggatgttgtttcttctggcctagaactagtaatgatgcttctcgttctcttgcctctttcactatggtcggacccttctcgtcaccttttacaaacaccacttctgtttttacctaatccaacaaattattgagtgatttctttctagatactagagtaggataaaatgttttaaatatatgtatggtggacattgatatctagttaaaggggtatactatggttaaatgaaatattcatcaacatttttacgaaaatctaatgatctgtgtagtgcaaattgaaatgaacatttcgctaattctacttaaaaaaaataaaaaaaaattcaaatgataatattcataaaaaataatgtgcaagattattagttttacctatataaattaagatttcaaaagaaaattgtttaaagatttattcgtagataaacaaaaaagtatggtaaagagacata

SEQ ID NO: 53335 - DNA, 154 bp, Arabidopsis thaliana landsberg
caaacattgagagaaatgagtaagaaaaggtcctagaatgtctatgagaacctggcagaagaccactatcgacggattactctgttggatcgaatcgatagatcatgcagctcccgctcgactggatgatcttgctgagaattatccccttaat

SEQ ID NO: 53336 - DNA, 649 bp, Arabidopsis thaliana landsberg
  unsure (1)..(649): unsure at all n locations
gcaggtcgactctagaggatccccggttatcgattttagggagccgccaaattcaacagctacaaagaatatttctaagttagagcagcttcgtttaacttagaatcgaatcgaacatcctcaacgttggaatagaacggctccattctaatacactatgaaactaaacattatcttaaaaacttggacacaacagaatagacagaaaaaatagagaccttaaaaataagcagcgctctgatttaagggattctactagagttgctccgacacagcgctataggccccctttggcagggctctctcggtggctcttttttctcgctcttcgtgaagccgtaccaaacggtcttaaaaaaatggctcctcaccgagagtcatcaaagagccagagccgttttgctattgggagccgaagcacgagaaaacaaacttctaacggctccttctatccgacacacaataatatttcatgaaattatagtgtctgccaccgtcgcctcgtgagaagctgttttgccaaatgaattacaaaacagctctgactcctctaaagaagccaagaagccagagaagctagagccgaagtcgttaggagcatgctaaagagggccatagtttaacttttgagacacnacaaagaccaaga

SEQ ID NO: 53337 - DNA, 280 bp, Arabidopsis thaliana landsberg
catcaccaagtgctgggctggcatcatcgtgctccaatctatgcttgccagtgggagcccatcggcgagcacccagtactgggcgcggtagagagaccaaatcagcaccaggtatgctggcagaggacctccacgggacatggcaaccaagaagctgagctctgcatcgcgcgctgcgcaacgaccttcaccgacaggcgtggccgtggcggcggcaggtgaggtcctccccggaatggactaggttccctccggtattccacgactagggttttttttg

SEQ ID NO: 53338 - DNA, 449 bp, Arabidopsis thaliana landsberg
tgcagtgagcccgaacttaggctttgcgcgacctggtgcaccggacctttccggtggtgcacaaccgttcgtacgaactctacaataggaattatttttataattcacaaaatcatctataggaaccggtccggtggtgcaccggaccctatccaacaactttcttcggcgggcgcgcgctggccaacgactagctgatgtgacacccggtccgaatactgtaaatatttcttggtgcttcccactgcaaatttcgtggtgcttcacactgacaattgaccgaaatattgattatgtttatgtccatttactacaaatgtcattacagccttttcatcaagtttcttggtgcttcgcattgattctgatgtcaactaccgttggattggttcttcctgatgacaccgtcaagcatttgcgtgttaccgttgagtggttgcatgaagcgc

SEQ ID NO: 53339 - DNA, 581 bp, Arabidopsis thaliana landsberg
ccatatgaaagttctacattaaaaaaaaaacgtagaaaaactttgttattttttctcaaattcaaacttacactaatttagctgtcgcatcaattaagtatgatttttttttctgtttaaagcttataatgtgtctgcaatttgataaataataaaaaaaaattacataagtttcttataataagtctacgcttttcaattttcattgaatatagattcttaatcacgactgaacggaacatacaattattgtagtcttataataatattgttggtttctcaaagtgaaaatgaataaagcttaatgatatatgatctgtcacgtacttaaacatatagaaacagtagcaaattcaccaacttgcctttaatttactataaccttcaaattaagcttcttttattttatgaaaaataaataaagaaaactccatttccctttatttaaggaggctgcattgcttgctcactgactcaactcaagagtggtgtagtgagagaagaaagatagagaaaaaaaatgggaggcaaaggtgtgatgatggtggcgatacttttcctttgggcactctctgcaacat

SEQ ID NO: 53340 - DNA, 244 bp, Arabidopsis thaliana landsberg
tgaatatctgaagttatagcagggctattgacgtaacttgtcgtttctgagccttaggaaaattcaccattccataggatcgtgtatccttaatgcttcatgctgcttagaatcatactatgtcgaagctattgctattggagctggcacagttgtctgtaatccatgacattgtcaggaggagcctagagatatcaggattattatatatgtttgcaatgtatgttttgatgtatctctgcac

SEQ ID NO: 53341 - DNA, 1567 bp, Arabidopsis thaliana landsberg
taaactgtcataacatttaccatttaattgtatactgttaactaaacaacatcacaataaaccttttgatgaaatacaaaagactgcaaacacttgccttgaaagagcaaggaacaaataaccactctttcgtgatactcttcttgctaccaccactcaacatactagtaggaatattcttaagctgcttcctctgcttcttagacatagaaattttcttcaaagtcttgggatttgtaatcttctgcaacttagtaccagttctcaaaacattctccttcttcctcttctctctctcttccttcttcttcctcttctcaaccttattactcctaatctcttccttcagctcattcaccctctccttatacgctttcttaatctccctttgcctcttcatctcctccagatctggtttcctgttcttcacaaacctccctgaagatctatgagttcgcggctgtttccagttccgtccggagactttcccggcgattacaccgtcgtaggttggtctctcgacagctagagcaataggtttgtctggattttcagaggaagcgacggcggtacgtttcgcggcaggaggagcaccatcgatgtccatggaagtcttatcggcgattgcttcggcggcggcttgttcttgagattcgcgtttgcgtttgtaggttttgccgccgaatccttcgtcaaggcaccggaaatctacggtgcaagccatttcttcttcttctttgtgtggctgtgaggttttggcagaaatttagggtttctcgactatttatatgagtgaggatggagacagggttaaaattccggtttttagccgagcacataattataaccgaaccgaaccggaaattatgtgattcatcaattactctgttttagtgcaaacaccttctcttttaaattgtaaaaaaccaaatcaaatcttttaggttgtgaatttggatagaattgggaataaatccatgttcgtgataaaatattgattcaagctattaacacaagttagtaccgcaacaataaatccaaagtaatcttttagaataaaattgttaataaatctacattattaccaagcatatttaaaataaataaataaattcataaaaataaggtcattggacaaacatccaacctctctagttgactcaagggagaaaatatccaatctctctacaaaataaaatcaataaaccattaaaaataattaaaaacaaattcctaaagttacttgggtctcaagcaacattgtgacattatgaggaatgaccagagctgcttctaccacaacgggttggagaagagagagcaaagcaaagttttccacttccatctcgaaaggaccagatttcaatcacgtcattgactttgaagatttttttatcaatcacattgttccaaccatgacttaacacatatttccaaactgtattaccattccacttctttaaataaacgacatgcttatccgattcaggatccaccaaaaacactttcaaaccatcccttttagcctttaaaaagtcttcatctaagaatctggtttcgtcctctg

SEQ ID NO: 53342 - DNA, 1250 bp, Arabidopsis thaliana landsberg
  unsure (1)..(1250): unsure at all n locations
gttgtgagtgctcagtgatactttagtgctcggtatttctccaggtgagagatctagacattccccttcaaaggttctcagagaacagtgattctggaagtcccaacccattgtcaatgatcaagttgatagtcctggaattcacgtgtcacatactaatgaaaagaccagtgcagctgatgattctgagatggcttccgtagcaaaaagtgatagtgctaaccaggggccatttggtgcagaggcggtcactaataattgatgcaaagtggagcaaggttctggagtagctacactatcaatggacatggtagaaatctatgtaaaaactgatgagaataggagctccaattgccaatgaaaaatccatgtgtagctgatggtttcgtgtaggctttcagatgcaaagaatgatagcaccaactccacagccatgtttggggcagacgatatacctagtgatggggacaaagtggaccaaggtgttgtactagctcaacaacaaagaaaggatgaaactagtaaaagtgatgagaatgcaaaacagtctgccacagatcaaaacaaggtgacatctaccgacaatgaaggagatgctggaaaatcttctgcttcacagcctgtagagaaagatgaaagtaatgatcagagcaaagaaaccaaagttatgcagcctgtatcagaccaaactaagccagcaattcaggaaccaaatcagcccaattttaatgtgtcccaagcatttgaggcattgacagggatggatgattcaacccaggtagctgtcaatagtgttttcggtgtgctcgaaaacatgatttctcagctggatgaagaaaaaaaagaaggaaatgaggtaagtgatgagaagaatctcaaggatgagaagaatctcaaggatgcgaagaatgtcacgaatgaggtagtgtctccatctgaagaggaaattccctacaagagagaaaccaaaagccttatgccctctgcaaaatcacgtgatcctgcatgcagtgtgagtgaaactgaaaaatgttctgacaatgataaggtaacaggggtagtgattgaaaaacaattgggcagagatgaatttgtgattggtaagcattcaccgaagattctgccagaaagaaaaacagattctatcgaaaattcttctcatgatggataccttgnggaggaactttcaaaggaaaagattgcaaacagttagatttagatacaaccactgctctcatgcttgactatta

SEQ ID NO: 53343 - DNA, 580 bp, Arabidopsis thaliana landsberg
  unsure (1)..(580): unsure at all n locations
atttaggcaatattttgaaaaccacattaaaactaacatcacacatgcctttttccacttcgactacataaatgttataaaaatttatttttgaaatgttagaaagtagagttattataataatttcataatactgacatcatatgtttggtaaacagtatgcaattgcatacatgattaccggacaaatgtgtacggaacaagggcaacgtttaatgtctggacaccaaaggtagaatcggcttacgattttagcctcgctcagatttggctggcatctgggtcatacgagactgcggatctcaatactgttgaagccggttggcaggtatgatttagacataaaaacttttgtattatttttactattatttttccatacatttatataattagtctgcaaatatgataaaccnnnnnnnnnnnnnnnnnnnnnnnnnnnnnnnnnnnnnnnnnnnnnnnnnnnnnnngtttacatattggacggtaaattctccacctatccatttgctctttagaagtattaatctgaaaacttattattatcatgaaattccgaagtgataatcttagattgata

SEQ ID NO: 53344 - DNA, 744 bp, Arabidopsis thaliana landsberg
tcatttttctaaaattaatgtgtaccaaagcttcgagtcacaaagagtccctcctttcaaggccagcgtgatcgccctctttattccttgaccgaccttaaaaaagagtaaaacttgtttacctctaaactcaaaactttcagacaaaacaagtagtagtagtagtaagtaacaaagagagatagagaaagaaacctctctctgatcaccatactcccaagctgtatctatgtgcctatagccaccctgcaaattcaatgggagagtaattactggtcaataacaagtaaagctctgtgttaatgaaagctgaaaacaaaattgagccaaaaagtgaaccaaaactatggtttgaaggaatcaggaaaaagaaatactgattcttgtaaagacgaatcacctcgacgattgcagtgacaacggcgtgggcggcttgagacccagatcgccacgtgccgagtccaacggctgggattttgtggccactcaagagtcgaaacgactccatattctgcccttccgacgtaaacgtggcatgtgccattggctttctcctccttgcctctttgactctccggtgaatcgcgtctcgtctcgtctcttatacactgctaaagccctagtcaggcagattatacaaacgcaacgtggcagattacgtatgggaaggacatacacgcggcggctgtcggcggaagacaaccatcgaggagccgcgtgtctgtgaaactgtgacccgtgtgt

SEQ ID NO: 53345 - DNA, 614 bp, Arabidopsis thaliana landsberg
  unsure (1)..(614): unsure at all n locations
tgagaaaaccccaatcggtgttgtcgtgctcgtcctccaaaaaagatggtatgtcccatctaatctggacttacatgctcaaagataggggatggacaaggtgcattttcatcgaatgtaacctcacaattttccatgttgtgattagtctccaagttaagaacactgtaagcacgagaatataatgcgtaacccaagaaaactccatcaaaaggccgagactcaaatttgtccaaatttccttgtttcaacacaaatcatttacatccaaacaccctaaaatggctaaccttgggtgaccatccaaatcacaactcatatgaagtcttgttcaagaaagctcgaggaaagatgcagtttgacacatggcaagcagtgttgattgctttggcccaaaaacgcataggagtccaatgctcattgaacgtcgtcttggccatctcaacaagagttcgattcnnnnnnnnnnnnnnnnnnnnnnnnnnnnnnnnnnnnnnnnnnnnnnnnnnnnnnnnnnntccaaagacatgcaaaaaggtttcaaaatgagtattcttgaattttgtcccattgcactgtgaatagctccatggcatttttgggactcattttga

SEQ ID NO: 53346 - DNA, 814 bp, Arabidopsis thaliana landsberg
ggtcgttatctataagacgtcaaggatcgagaatgctatcaatgaggaggcagagaagtggaacatcttcgatgaagcacgccgataaagcggaagagttttcgttctccgagcttgcttcggctaccggaaacttctctctagagaacaaaatcggttcggggagctttggtgttgtttacagaggtaaactcaatgacgggagagaagtagcgatcaaacgcggggaagtaaacgcgaagatgaagaagtttcaagagaaagaaaccgcgtttgattcggaaatcgcgtttttatcgaggcttcatcataagcatttggtgagactagttggttactgcgaagaaagagaagagaagcttctcgtttacgattacatgaagaatggtgcgctttacgatcatctacacgacaagaacaacgtcgaaaaacatagtagcttgatcaattcttggaaaatgcggatcaaaatcgcgttagatgcggctagaggaatcgagtatctacataactacgcagtgccaccgattattcatagagatattaagtcgtctaacatcttgcttgactctaattgggtcgctagagtttcggatttcgggttatcattaatgggtccggtgctagggaaagatcataatccttatcaacgtccaacgaaagctgcggggacggtcggatatattgatccagagtattatagtcttaatgttttaacggataagagcgatgtgtatggactaggagtggtgttgttagaattgttgaccgggaaaagagcgatatttaggaacaatggtgatgtggaggagga

SEQ ID NO: 53347 - DNA, 954 bp, Arabidopsis thaliana landsberg
ttgtgagtaaaagtgattgaaatttcaacagagttatgcatacgataaaaggatgtcagcagacctcttggttaagagacgtgatcagatatgctgcaaagtgacaaaatggcgaaaggttctcaaaatgatcctgcttgttaagatacatatgcaatgtaggagcgagcaattgtgaacatgcaaaattatcgtaatccagcatgtaatatttaacaacaagtgtaggtacagaagtaggggcaaaattatttttgagatagagaaggaaaatgcatgctgcaaaattgattaagtacagctttacctatgtggaaagctcttgggcagctatcgcagagcaaaagatttccaccatcagcacaaataacacacaagtcgttattatcattagcagaatatttccgaccatgtgagaaagtagttgcccattcgtgaagagatacaccattagatgtatatatgtaaaaataactgcaacaaatagagaataatcagtaactaagggaatgtaccaaaaccaatatacaagagacaaaagagcaaattcgcacggttttctacgagatgcccagcctgcatgagcttcgaacagagaggggctcacctacacgcaaaatgccaaattaagaactaactgatagggtatgatgtggtttgtaaaatatccaaaaatacctcgcacttgcaacagtaacaatatattccagcgcccattttgtagcctccgagcaatttctgtccacagtgatatatgtcttaaaagagaaggccaggtgaagagggatacaaccatataaccacacagaggataaggtagttagtcacctgtccacgagcatagtagcctagttcagttccctctggtaatccccctctatcaaacactaacttgtgcaatccttgatccctgtgaaaaaggagaaataggtaaaacttaataaatggaaacca

SEQ ID NO: 53348 - DNA, 676 bp, Arabidopsis thaliana landsberg
  unsure (1)..(676): unsure at all n locations
tccaccacctccctgccatcctccgccatgtcctcctccacctccctgccatcctccgccatgtccacctccgcctccttgccatcctccaccatgtccacctccgcctccttgccattgaatctcttctgaggcaccatttatttcttcgttttctaactcagcaccacctccaccgccacctcctcggccaccgcctcctttccatcctccgccttggccacctcctcctttccatcctccgccttggccaccgcctcccttccatcctccgccttggccaccgcctcccttccatcctccaccttggccaccgcctcctttccatcctccaccttggccaccgcctcctttccatcctccaccttggccaccgcctcccttccatcctccgccatggccacctctataattttgtacatcctcatctgacgcactatctatttctacggtctctaactcagcaccgcctccaccaccatgttgatcaatttcataattgttttcttcctctttctcaacggtagcctcaacaccaacgtctcctttattgagactatccttagcgtcgttttttccttctacggttggtactctacttgcttttcacctgtttcaaacccccactcacataagaatctataagcttatanacatatcagacaaaaagatagta

SEQ ID NO: 53349 - DNA, 1023 bp, Arabidopsis thaliana landsberg
caacacgtcaatattgtgaatgtcgacaaacgaaacacaaatggccatttatgatttcgttttatttgtttgcaaaaagccgttaattttgaaggaaaaagcgtgttttgtggatttttaaaaattatcccataaatcaagtatatatacgtatatatgtatatgacattgactatacagacataaaaaaaaaaaatcgcatacgtgctcggctgggtgcgtagccggcagacatgcaattcattaatgtgcttttacagttatacttatatgaatttctcaataataataaaaaagtagtttcgtattccaagataaccaaacaatgaagctgaactatatgatttaccagaagtaacgaaaagatatacaaccaataaatatataacaacaatgacacaatgtagtttaagcatcatgcaattttttttaaaaaaatatcaaatgtgaagaggagagaaaaatgatgagttccaagaaaggtaaaagtgtgagcgcccataagagccatagtattaagacctctttccatctttatgtaactacaaattctgccctcaattatacactttcagtttttttttttttaattaaaataatgtagcattgtgattatttgaaaaaaaaaaaaaacttatgtttttattgtggacgaatatgattggatctcatatgattggaattgtggaattgaatgataccgatattacccacattggcaccaattgaatgttttattctttgggggctcaaatgcttagttgagattgcaattgcaaagcagtttgacgttactcaatcgaaaatttattttacattcatcacatcaagtgggactggtgacccaatccgaagtagtataacgtagtacagactaaatttgtaaatcgcggatgcaagctaaatgagttcacatttccgcatgcgatctacgtatgtctcaatgattcttttttgtaaactatgtcaactcaacacacgaaaaactctggccagtctttaggatatttcttcgcgatgatt

SEQ ID NO: 53350 - DNA, 536 bp, Arabidopsis thaliana landsberg
gcaggtcgactctagaggatcccccaacaatttccatcttctttgtagcaggcactgcagcagtcctctataaagactgcagcttcggcctacgagccaaaactttagctctttttgcatcgacgtggtggaagatgtcgaagttgcgattttcctctttgctctttatttccgagcgagaaagcagtaatcagaataaataaatccaatcacatcaaaaactctgttcagtatccttttgcctcgagcgccgaacgagtgttcatgtctttgtcctctgccttcgtataagcccccagcagctcatcactggtcgcctcaacgacttcaagccattcatcattcggctcgtcaaactgacttctatagcgataggtgtattttaggtaaaccaagccaccttcgctggagccagcatcgatctccttcggcatttcccaatcattaacaagaggtcatacgttaaaagcaatgtgctcctgaatcaagtgacaatgtaggtgcacaatgtgttgaaggccacaaacatgcttgtg

SEQ ID NO: 53351 - DNA, 1134 bp, Arabidopsis thaliana landsberg
cgggaacagctcgggcacttgaagttgaggtccaatagttatccattcccatggttgttttggtcatgggagttttaaatccccgcacgttggctcttgattggacgtaacttacctttgaacattccattaagcatacctccgatggatctgactgggtggcttattctatctttcaacatgaaaatcatggagtactcagagagctgccaaaccaatgtcaggatgatcgtagccgagagaagtacatgggttattttgttctgcttcttcaccttcttgatgtctttagctatttcttctatactttcttccaattgtctctggccctcgctttttcctttggatggtgaagaatctgcagattcttcttctttttcttcttcttctccggttatgacatcttctttccccttggggtttggtgattccaactaagttattggcaaaaaaattagcacaagcctgaaatggacacatcccaatacaaataatgttgtggacatgaaacagcaactaaacacaatcatgaagataagcttgtatttgttggatctcatcaaaatcgaagcagacacatcacagcgaaacaattacacagactcactcaaatactcatgattcaatcatatacccagaaagttgattggctgcaacatcagataaatcaacaaaggagaaaacagagcgatggtaaagtacctgagagataaggctagagaggaaaagctgatcatcagcgtcttcaatgaaggcgtcaccagaagcttctctcttcctcttctcatgaagaagcttctcaatagctctactcagattctccacatcctcactggactccatttcacaaacccttcttctctaatctcaccgccgctccaaagatgcgtttgttgtttattgtgtttttttaggtagagagtatttttgtttgtattgagaaggcaagtcaggacacgtgacatctattgacggcacggcacctctaccatttttgagcaatttgacattgagatgtgcaaatagcgtatagtcctccactaaataaatatacttaaacaataataaaacatgtaataacacacacaactctgcacgactaaacctcgattcacactagattccgtgtgaact

SEQ ID NO: 53352 - DNA, 735 bp, Arabidopsis thaliana landsberg
gcatttcggagcggttttaactctactgaccaagttagatttgttttggtttattttcatttttcaacacaaggctagtcaaagacgagtgtcataaattgaatggtattttagcgttattccttccccgaaaaagaaatttgtgtccgagtgtttttgacggcaaagtgtgtgtttcattaattgtactaactagtcaaaaaagtataaagaaactcacaaaatatttatttttcatttataagctaaatggtttattactaattttgttatccttctaccataattagttgccactgtttaaaatcggatgaattatttttgttctatgtgattgttgatgatacagtgcactaaaaaaagttcttcatcttagtgttgtgattatatcaaacagatttccattactgtctcctcaggtttcataagtttataagcataatgtttgctttcgatgtgaaatgaccaatagactcttgactctttaggcccattatataacccgatcatgggccagtaacatgtggaaggcttgtcttcattaacacatgtaaagacaaggatcaaactctttttttacaaatctgtttagtttagttatgaggttgcaacaggtagcataataaataaaaaaattaccaaatgtttcatttgtattaacaatcttttaataatatgtaaaatgggaaaacatggaaaaattggaaatagactttacaaatggataacactgga

SEQ ID NO: 53353 - DNA, 1424 bp, Arabidopsis thaliana landsberg
caaaaacaacaaggtagtttcactaccatattttccttttatcctcacatggaattgagaattgtttctctcataccttcccgggtaaactgttggaaattctttgtacagcatgattccctagagaactcctttgacatgatggtacagccggcaaacgtttgtaagtgggcaaaaatgatccatagtcaaagatatccggacctgaccaaccatatcattcaacaacgacatttcatttcaaaacaaatatctcactaacaccaatttaatattacttaccaaaccggtcccgggcttcctctccgaaacctttttgcaagtggccaagtacattctgtaccttcttgtccttagatacacaaagcaacaaaacttgagcacatatataataaaaccaccaggcaaagaaaaagacttcgacacacaaagatacaaaaacagagaaaaaatgagtatccacactatatattcttcattgagatacataaaattgagatttcatatgctacaaaagacagacacatagttctctgtttaaaactcaaaactcagtatgaaacaagcaagattcatagcaattgaaatatcttattaaaggtatatctcctccaactaaactaagatgcacaaaacttaatcatcattggcattataaacacagagtactgtactattcatatgatcttaacacttccaaaacataatcagaaattaagcatcacacaaagatcaacaacggcttcacataacaccacacaaaaaagaccatttaataatgagaaaaaaaatcacaaacaagagagactcacaatgtaagagagatcaacgtcaagatcaacaacagcttcatcagaagaacaattcatctctccttcttcaagctcataatcctctcccatcttctaaactagtaaaaccctaaacataacccaattccaaaccctaataactactactacttcctaaaccccaacactcactaactctgccgccaccaaaccgtctcgaaaatccaacattgcccaaaacaatctcaaaacacacaaagtttcaaatcataaacacttagattatccccaaaaaccctaaatttgttcaatctccaaaggacaatctagattgttgttaaaacgcgaaattaatcgcttaatcacgtttatcaaaaactcaaccaaactcgtttgatcaaaggacgagaaagttgaaaaggaagattcgatcactgtgatcgtctcaacggcggcgaagagcagcgttgagggtttaaggaagattcggcggcaagttgctttagcgtctccgattttttttgcagacaagacgctatgtgttgaagagtgtttagttttggagggttcctttcgtttatggtttaatcattaattaattaattataaacaactttaatttttctataattc

SEQ ID NO: 53354 - DNA, 1427 bp, Arabidopsis thaliana landsberg
ttcatttcttctcaaacttaacatttttttatcacttttaattacgaaccaacaaaaaacagaagctaagatggcattcgggttttcgattcgacccactagtttataaataacttgaaaattcatatttaggcataattactgattaaaataaagagcgcgatatttggataagaaatatagtaagagatttgcttattgcataaacttagctaatcaattttatagatagaaaaacattgaaaagcaaaccgaggggatgcgataacatcatgaagcatcacaaagcaaaatagaaaacttacaccaaaaccctaaagaagttcgaccaacgtgccaaaaccctaacttccttcccagccataattattattaattttattaataagtactagccatacttcattaaacaagtccccgacacgataatccatcaagcgaaaccaacattccttggaacagccttgcacttcaacggattcttcatctccatagacagcttcagaacctcagcgagctcaacatcacaagaacccttcacccattcaaaattctgaattagttgaccaatccagagatgaacagtagctagacccattgctttaccgggacaaacccgacgaccggatccgaatggagccaatctaagatccgagcccatgatgctcacatcctcactaatgaacctttcaggcataaacgcttcagggtcggtccagattttagcgttgtgtgtgatggaccacatgttgaccatagctatggttccagcagggacaaggttaggacctacgtggacgtcatggatagcgagacgagcccaagagagaagtggaccaggggggtggagccttagggtttctttgacaatagcttgaaggtacggcagttttgggatgtcggaatcagacaaggatctaatattgttacttgtagcagaagctatctctctgtagagtttatcttggatgtcttgatgcaaaaccattcttgcaagcacccattccactagaatcgcaactgtatctgtccctctaaatatcatttcctaaaaagaaaaagaaaaatcaaaagaatacaactttagttaccaaatattaaaaaaaatcatattcaaaatcctctcatcacaagaaaatagtaaaagtagcttacccaaagaacagcaatcatgtcagaatcagacaacttttcatccttttgcaagccaagcaagacatcaacgaagtcattttcctctccattgagattattaccttcttcatcttgtgtttctcaattaatccgccgacaaaagtgttgacttcagagaccaaagctctacacctcttcctcactccttggaagtcaaccaacgaaataccaaaagtgatactccagttaaaatccaagcaactcgtagctcactcacagctctcaaaaaacct

SEQ ID NO: 53355 - DNA, 1135 bp, Arabidopsis thaliana landsberg
gaatggatgattatgatcatgataatgatcatggaatgggctttgatttgacaagacgagagtcacgggttgaggacgatgatatatctatattattacttcagtactcaggagacatcgctccatgtctttctcttttatcatccgtagcgaaagacaagtcgaaatatatgtatattacattattactatacatagtatttatgttaggaacttctaggacaatcattattctgaaaagtattttctatgatcgatgatctttacattgttagcgtctttaagtgatgataatatgacataaacgcatgatattccaaaatatgacacgaggtaaaaaatcgataaatgcttcatttaggactattgtacacttagattataggataaagcaaaacgttataaaatatttagagactactgctattgcactactaacaattaaaattttatataatccgttaatgatgtgagctgaatcaaacgttaagaagacaaataacattttggggtacaataataatatgagttgtgtggaatatgaaaacgagggaagctccgagttagagccaagaggcaccgaaacaagaaaccggcctgcaactgcaagcagaagtcccatcttgttcctttgactattttcttcttctctctcgaataagataaaaccttaacaaattaaaagtccaattcacacttttatttatgcacagtgtcttatgcgatattcttacgaatatatatattctctgttctattttcttattttcagcataaatatttatttgaaagaataactagaatttagaaaagaaactttagatttacgtttaatttggagaatatccagatatatatttacaaatttacatttaatttgcatacactcaatctttcgaaatgcaaattattttttcttcgagttaacatattgacaactggaccaagggatcagaccaatttgatagacaaacttaattatgttttccaaataaaagaaaattgagtagataatcactagacactagtagtagatattttggtgtatatatggaaaaaaagtgatagaaatctatgattttcttatatatatatagcagatctctgattgttcctgccacaaacatcgtgattc

SEQ ID NO: 53356 - DNA, 477 bp, Arabidopsis thaliana landsberg
ggtcagactctagaggatcccgaaactatgaggagcaaaaaaaacttaccatataacgagacgataacatattggaacaaaaaacatgaggacaacaagcaaaaaccagacaatcatcttcaaaccccacccaccatggtgccacgagtcacgcctgtcattctggtccttgacaccaatcatgatcaaagcatatattgcaaagaagaggaaattcccaaagctcacacgaagaactgcttgttgctgataccattctttggtatatgaatcagaagtattgatccctgtttgtcaaacaacatccacaaccggagatttgtatcaataggcgatgaagtttccttttgcaacactcaagattctctcttagatcaagcaggttaacacaaagcataaacaaacgcaattgaaagttgaaaaacatccaaatcgaacacagattgagatttctaaagttctagtacacaattatca

SEQ ID NO: 53357 - DNA, 1038 bp, Arabidopsis thaliana landsberg
atgatccgatgcagagttcatagttaagttctcaaagattagtgcatttctcagcacatatatttgctgtcccacaaaccataactccgaatgagtcgatgaatcacatttagactcgttctatcacgggctcgcctactctactaaagtcgttccatcactggtgtcttgcttattacgtaactccccaagtgtgaatatagataaggacttgcttagttttttcttcctccatcaaagcagagaaaatggattcagagacaaaaataaaatcaatcgataacgcttatttcgttttaggtcctcaccaattattctaaataaagatgatctcgtcacctgcaccagcacctactcggatgaggttttgaggaagaagcaaacgtatataaagaataagatagatctgttggagcagttacgtacgttaaaagagtgatacgtgtgttttgtttctcgcatatgttgtcatttgaaaagttaatgtaaacatcttcttgatacagaagatttatcaccgaccaaatcagaacatgttcatgaacaaaagcacactctccatattttcctcactttgtctcaataattaagttcatgaagaacattaaaaacaaacgaagaataaggagtagtaaacgttggattagtcgataaacgaatgataaatcgtcgagcaagtatccgtaccgagtcgggtcgaatctggctggcactgaaactgacttaatgaaaccgtctcaatgtcacattctgaccgccattaaagtcgtacgttgatactattatttatattcatcaacatccattagatttgttagttgttacattatctctcgttatcaaccaatccaacggttaagacgatattgttgacttgaaacagccactagttctccgtcacgtgcacacatgttcccacgtggaattgggggaccagtccaaaagacacgtcaattcgcgggtaattaaataaaacaaaacaggtttaatacaaaatattaatattctgaaaatatctttctctcgatgaaacttgtc

SEQ ID NO: 53358 - DNA, 935 bp, Arabidopsis thaliana landsberg
ttatggtaatttggtattgaaaggcgaattgatccgtgagtgagacctggttttaatgctgtttcagcgcatgtcatctgcaacctgtgagccacgaactgcccaaaaagacgatggcttcaacttcttgtttgtcgctgtgaaatgccaaccaagctgggtttcgcacgtcgcacagtttgcaattgtccaagcatacctgcagatttaagacatcaatcagacttgaaagatcacagatttgtctgcttaataaagtacatgaaccaatgctctaaacaagttagcatatgtctatgaacacttggtctaaacgattttcttacaacaaactgcgccagctgctttatatgctaatgctctaaacaattagcttgttttgaaccaaagctagttttcaaatcatacaacttggaaacccttgggatctataatagctactgagctatatttcttaactactgaggtatcaaatgagtgataagtacagtgaaggaaataggtcaactgtttcaaatgtaaaactggttaaggacaaatattaattgaaaactcttacccaggaaaccagctgtcctttttaacaggtctacctctaagcgctatgtcatttgctttgtaaaaggtcattatctcgtggacatagccatgtgggtttacgtaggcaccaagaggaccttcattagacataaccaacatgtcttttcttcttgctatgacagtctgcattattaatatgcaaacgtatcagtaagccaaatattcaatgaagaggaagtggaaatggtatttaccatgctcacacaaaatacctgacagtgtatacatcgaacacgatcaaaactttcaagcaattcaatttctcgctgcaatctataggagactccataaagctccaagagctcttgtctaattgactcagacacgggggtttt

SEQ ID NO: 53359 - DNA, 702 bp, Arabidopsis thaliana landsberg
gtacttttggacgtatctaattagcttcttgagtttacttgtgaaattaatacatttcatttttactgatttttgtgtttttacaaattcaggcaatatgttctagtagaacgggaggtataacaaaggagatgcagagtaatctaaaacgggaggtgcaacagcgccacgtgtcaacagaacacacggcctttgagataaccggaatcaatagaccgggtctactatccgaaatatctgccgtactttccgacattggatgtcacgtgacggctgctgttgcatggacccaccacgagcgagcggctatggtgatttatctagaagacgggtttaacggtgggcccattatcgacccaataagaaaggcccaagtaaaggatcatctggatacagtcatggaggcccatcacagagttggcgatgtgtctcatgtcgtcgtgagggtcgtcgaggctaaaggagctccggtcgggtgggctcacactgagcgacgacttcacgagctaatgtacggagaaggagattacgagaattgcttcgactgcgattgtttcggagacaggtgcgtttgaatttatacgaattaatcatcaatggcaaaataaaaatgttgtttagcttcgttcgatacatgtgacaggtgcgatgctttgtggagaggaagatgcgagaggatcacgtgacaatcgagcatgtaat

SEQ ID NO: 53360 - DNA, 1452 bp, Arabidopsis thaliana landsberg
atacccagaaaaggcaatacttctgagctcctcagtatctgtaataggagggacccatatctcagtaaaacgattacgaagcgcaggtgacaattccttctttccataatcaccacccgggttcatggtggctagaacaaaaaagtcttcatgagctacaacttcctccaagacgggaccacctttctcagctaaggactacaaagataaagtggaaacaataacatacgagaggacaattaaacagaaataaaaactctacgaagaaaatggaaaccaacatggagaaatgatgaaaatgataaggaatggctaaatgatgaacatgaaggcagggtagctttactcaccaatttcctgtctgtctccaacacactattcattctttctaatacactgtcatcagccaaagatatctcatccacaagaacgatatttccagctctcatagcttccacaaggggcccatcttgccaaacaaatattgcacgccatttttgatacagcatcaccatattgttccttattttctcaagaaaatcaacatcctgtggcgtggcggccactcctataactgaaccatttttgtacttctccaaagctacctctactgatttgatcgacacttcagctctactaatatctccacaaataacctgcacatgacatgttcaaggaaatatagcatccacattgaacgaaagacgggtgaaataccaacatcaatggggtattggatactaacaatatcttggccaaaaggcgtcaatgcctgagggagctccaactgtttgacttgattctcgcattctgtgattaattttgatctgtctctcacaggaaagaatccctaaaaaagaggcggacattagaaattgtaagatgaaagaagtaacagtttagcattggagttcggaatatgtaagatgaaagaagataagcctacaccaaggaaatcagatgtttcggtgtattgatgacagttaaggatgtgcaatcttttcttcttaacatcgcttagtatttggcagattgttgttttgcctcctccagtgtcaccaacaagaagaacaggctcacgcagtttataagaacggtcgatgagaaaaaatagtctccgcatactttgagtccaggtgaattttctgttttgtctatatagaaattgaaaatagcaccataaaatttagccaagactgttcaagataaaacaaacaagctcgaagaaaataattcaataaaagagaattagaagaggaaaggcatttacatggaatccaaccttggaagctcctggggtaagaaaacaaaagcaaaaaaaagaacagaaaaccattatttatatcagaatagtgtaagaaacagcacctttgtaatgatgcagtaatagttaaacttaataataatgcagtaagaccaacagtgaaaaacaacagagcaacaacgagcaac

SEQ ID NO: 53361 - DNA, 625 bp, Arabidopsis thaliana landsberg
gcatgtctcaggtcgactctagaggatccccccggctgaagggatatgaggtcactggggcagttagatcaaaatttgatgactcatattaagttggcttcacgcgaaccagtatgctacctcccctccatcggatccaagatctatggtttagaatccataacaacgcgatcgaatcttctccatccgatccagttacaacagctcatattatatcaatcgcagaggtatcacgaactaatcgtgaccatccattagtgatccaatggcctgaggcccttcccaatcctgccccattcccagcatcccgagcggcggcgctggcgcacacacgacggtagctcgccggcgtgcacgaaattcgttgcccaaacgacgcaaacctaaaattggccggtgctaaacccagaggggaagatgtcgaacatgcggagaggagtctcacaggacaatggcgattagggcggggtaaccatggtgtcgtgcggatccaccgtgcccgcccatcaccggtgagcaattgaggctaccgagatggtcgctctcctcgtcacgggcactggcgcatcctcggtggtgaagtgaagcccctcgggtcgacaccgaggccacatcgacgacgagg

SEQ ID NO: 53362 - DNA, 1090 bp, Arabidopsis thaliana landsberg
tattacatatttatgcagaatatagaataatcacacatactgatttaataaatgctctatcaactctgatttataaggagattttgaaaagaaaaaaacaaagaggagacttttgttgtgcgacagtgattttagtaattttggcaaagttaagtttgcctttctttgtttggtaaagtcgttagggaaagaaacaaaaactttttattagtgaaaaccttgttagactgatttttaagtttcttcgtgaagtgtgttgttacccatttatcaagttttttttaaccgtagttgagcaaataaggacgagtgtcatgattgtggttccgtcacaaacttatcgactgggtttggccatgtaggtgaataggtaggaagacatgggccttagtcttatcatattatgcattaacataggcccatgttttgtttgtaaaggcccaaataaactatgaactgtccttgcatattacctcaaaaacctttaatctctcttttggtcttgttttctatttccatttctataccattcaaaactataacttaatttcagcatcattaaagcttggaatgggagtaattttcaatgagctggtttttgttatttcaaaaaaactcactaaacatccaatcaaaattaaggaaattagttttcataaaagtgtgttttttaaaagccagatttttatcatacgaaaatccaaaaaaaaaaaaaattaaaaaaattaaaaaaactcttccaatcattattttagtttgtaaagagtccaaagacaaagatccagtgagagcaaaaaaaaaagcggcgcgctgcataaggattaaggaaggagccggtgaggtggagaagaggataagaataaaaccggaagagccaagtcagcagtcatagcggttaggcgttgagaaaatataattgacggacccgcttcccgtttaaagccgaatatgctttcttctttgtctctcatttattcctttttcctttccttcttttctaacctttcgtataattacattctttgcctttctccttcttcttctttagatcctaagtatcttactttcctttttcatcatcttcttcgat

SEQ ID NO: 53363 - DNA, 661 bp, Arabidopsis thaliana landsberg
gtctgcaggtcgactctagaggatccccacaggtgtgggtagactcactaccggactcacattttttgccgagtgtcctcgacaaattaagaatcacaaaaaatccaaaaaatagcaaaatattttttaaattacggaaacaactcaactgcccgctacagttttctctatgatgcctactatttggtcgcaagcttctctctcccagctgagggggacactacgacgtcgcgctagtttcatgcttcgtcttccacttgttcgcgcgtgctttgtgaagaatctcgttgcgcgtacaggtgtgggatgattcactactggactcacattttttgccgagtgtcctcgacaaattaagaatcacaaaaaatccaaaaaactgcaaaatattttttttaattatggaaacaactcaactgcccgctacggttttctctacgatgcctactatttggtcgcaagcttctctctcccagctgagggggacactatgacgtcgcgctagtttcttgcttcgtcttcacttgttcgcgcgtgcttcgtgaagaatctcgttccacgtacaggtgtggggtgatcactaccggctcacattttttgcggagtgtcctcgcaaattaagaaccccaaaaaaattagaaaaccagcaaaatattttttt

SEQ ID NO: 53364 - DNA, 1583 bp, Arabidopsis thaliana landsberg
  unsure (1)..(1583): unsure at all n locations
tacagtgaataaaattaatttggtctcgttacaataaatgttttaacggaaaatttattaagttggttcatttgtttagcagtatatggttccaataagcccttcttcttccaggtattttttttttatgtgtagagaaaacacatggatttttgctatataaaacattaaaatggccaactacaattcgaaatcatcacacgcattattttgtttttggttgaaatcttagcgctaaatctaaagatgtataagctttttttatcatttgattcaactcaaacactaacctaaaataggaatactttaatttcttttctttttttactttcagttaccatgtgcgataaaaaagcagacatatcaattaagtgaaacaccaaatttatttgtcttaattttggaaaggataaaggatctagcatatatgcagcaaaaaggcaaatattatgaccaaaaaaaacaagacaaatataaaaaggaaaaaagagtttaataaaaaaaagttaaaagaaaacagaagggacaaaaagagttgcttctgcatcaagttattctgcgtaaataacatttatatatcagttacaaggcttccatgctaagtatcatccttatcggatgtcaaaatatccgaaggctttgtttgatttctctacattatttttgtgatatatatagttcgtcaccacattttttgtcgctacggacctgatttggtttcttgtgacaatgtgcatatatagtcattactaatacagtaatatatatcttctagactgttcgttctagtcggtcgacacaagtttttaaaaaatcgttgttgtgcgaaattgtgaatccggttaatcaaaatatatctgttttgttttgttttgtagaaacatgtctttcgcatgttctttaaaacatatctatgtaaataaatgtgcgtaacatatataacgcaaacaaaattcacgtgtttcttcagatatctgaagatagtaacataacaccttagaacaaagatttcgatgtcgttaaagggttactatatacttgagtgcgctatcaagtagtttctctcctgcaactctcgctacaagcttttattcgtgtgtttacatttaaattgtccacacacctcgtcacgcacttttagccttcttcattttgatttttaggtccataatattttatatataagtagttcaagcagttaaagaaatgttattttagcagtaactatcagaattatgtacaaattctatattagaaaaaaaaaatccctcatcgtnnnnnnnnnnnnnnnnnnnnnnnnngagtgaagatccaaatttatttatttttttaaaaaaatcccaaaacacatggttgactcttgcaattttgtttaaattgaccctttaatgctacgataaaaagtatatataccgttttaatttgcggagtaccgatctcaataacaaatagcaataccgaaaacgttaataacgtttatctcttaagattttaaactattttatactattcgtttactgttttttttactctgactagtttttattgtgctggtttcaccaatcgatatcgattactagatg

SEQ ID NO: 53365 - DNA, 371 bp, Arabidopsis thaliana landsberg
  unsure (1)..(371): unsure at all n locations
gtattgaacaacttgagaatacagatatcaaatagaaacaaagtaaaaacttggaacaagaaactataacaacctttgaatctgaattggaatttgtttcaagcaagagnnnnnnnnnnnnnnnnnnnnnnnnnnnnnnnnnnnnnnnnnnnnnnnnnnnnnnnnnnnnnnnnnnnnnnnnnnnnnnnnnnnnnnnnnnnnnnnnnnnnnnnnnnnnnnnnnnnnnnnnnnnnnnnnnnttttgaatcgccgggttggtttcatggaagtcaagaaaccctcctggcaatgaatcatgacaccaagcactatcgttgttgcttggtgtctgcacagcattattactgctgcttcctgtgtagtgttgtggt

SEQ ID NO: 53366 - DNA, 1299 bp, Arabidopsis thaliana landsberg
  unsure (1)..(1299): unsure at all n locations
caagactttgtaactttttctattcaataatgacgttaagataaaaagaatttattttcagttcctcttctcttactagtttctttttatagaaaccaaaataaagttactgatctaatttttaaaaagggacaattgcatgggaatgtcaatatgattacgcaaacaacttctgcagataaaaatggtttgcagaaaatggaaagcacctatccatcatagctatcttggaagtctcgttatttcaaaaatatttctctcctttttattttcagctacttattaattccataatatttttctattaatatatttcaaaaaaatccagattttatttctatttttagaactataaatcaagaaattatctatgtaatgttaaattcctatttttttttagttattatagaaactgaaaatggtctaattcatacgaagtcgatttttctcacggcatattatgtaaaccatgaatgtattttattagtgattcgtaaaccctaagtttcatatacaataaaaacaaaaatggaacctaaattacgaataacctttatcactatacgataaagtataaaacactaataaatggaccctattacgaccaatcgtaccaatatttggtcgtatctttcatttttatttatttacagatttgtaaattttaaaatagacacttttgtgttggtcaataaaaaaatagactaaaataaaaaatgtatttacaagtgaaaccaaactaaaaccattatgagaaagaatctcacaaaattgaccagagtaaagagagagacaaaaatgggtcgagcaacgaggtggttcaagggtttgttcggaatcaaaccttcctcttgttccggcaccgactccggcactatttctaaccgccttgaccgctctttatgcgacactacgagactataccacctaacatctccgagaaagaagctgcgtggctaaggtccttctacgcagcgggagaggaggaaaaagagcgtagaacgcatgcaattgcggttgctgccgcgacagcnnnnnnnnnnnnnnnnnnggttgcggcggctaaagcggctgctgcggttgttaggctccaaggtcaaggcaagagtggtccgttaggaggtggcaaaagctgtgagcatcgtgctgctatgcagatccaatgtgcctttagaggctacttggtactaacacaatttttcaatttttctaatcatttcaatatttttaatctttatgtatttgagccgttacatttttgtaacgtaaaaggcgagaaaagcgttgagagcgttgaga

SEQ ID NO: 53367 - DNA, 568 bp, Arabidopsis thaliana landsberg
actctagaggatccctattctcgcaacccatgttactgttttccaccatgtatttagtgtgatcatgtgtgcatgtatcattctacatacgatgattgaggatgagcgtggaagatcatgtggtctggatgactatgagacagttgagtccttcattcagcaccaatggtcacccccgaagcaaagatgggacttgcagccatccttcagtgtgtagccgcactccatacatgtctggtggatgattagctagaatatgatttaatagagcataattgagatctacaccacaagaattagattgcatctttagtagttatgtaaacaaaatcaaataatgcaagttttatgatttgtgcattgtgtaatttatattgtaatatgacctatgaattgtgtagtgtttctaagtaatgtatctttgagtctcttgatgaactacataattgtaatccgtttgtttatatgtttgacaatgggttctatgcatgtatgctgacattcgagaatgtgcccaagaagttacgaaagttgtggtagataaggctgagtgactgatgctagtaga

SEQ ID NO: 53368 - DNA, 781 bp, Arabidopsis thaliana landsberg
tctaaagaatggtgtaacgacattgctctgattattgttaacgttaagtcccatacccaagtcaagctgctgcgatgtaacatcttcttgctgcttattatgatcactacctagctcatgaatcatctgattatgattatggttttggttttgattttgaccgttttgtggttgagagcgatatagttgtaattgagaattgacagctttgagttcttcttcagcaaaccagatcatgtattgaagttgttgcgtgacgccgaggcaaccgtggacaggagaacggtcacggacataagactggaagatgattgatttcattgcttctggtttctgagtttcgtctagtttttcgaggattttgacgatacttcttacgccgaatagcctgtgaacgttttggaaaagtttcggttgttcggctgggaagtaaggcgcgagggggcagtccgcggcgcagcgtctacgttggtacttgcacgcggcacaagccccactcgtgccgcctttaagagtcatgtaaactataagagcgatcaagagaagatctaaaagcctctcttgtaaccctttgtggatgtgttttgtattgctcattcgatgggaacagaacaagagactctggagaattgagaaatgaaaatgaggattttgaaaatgagagatgtgtgcgttagtgtgtctgtgtgttaatggtttttgggaaatgagagaagggaagaaggagaagtagtctggtatataagccggatatttctctagtaaagaagactaagtaaaa

SEQ ID NO: 53369 - DNA, 514 bp, Arabidopsis thaliana landsberg
tagaggatcccaaataaaatataaaaaggggcggttgaaccggccagggcaggggcaggggcgggggcggccaagcggcgggggcggccgagctggcggggggggggcggtcgagctagggcagggggcggccgagctgggcgcgcaggggcgtctgggcaggggctgtcgaaccagcgggggggctgggccggccgaggcggcggccgagccggcagccgaaccggcggccgagccggggcgggctgggcggccggaccgggggcgcgggggcggccgagcggcggtgtgcgagccgtggtagaggtagagtaggggagatgggagaggcaggagaggggaagggggacctcaccggggacggggacggggcgaccgaaccggcgatgagcaggggcggcggctagggcaggggcggcggctggggtgggggagaggtagaatgggagggagagagagggatttggggaaaaagggaggggcggctgggccagctgggccggccaagggctgc

SEQ ID NO: 53370 - DNA, 1535 bp, Arabidopsis thaliana landsberg
tggaaggatacttatttcatcttgttgtttggtatgggattatttgatgtttttttcttgtatcatatggtttggggtgtaacatatatataaacctattaatttctttaagaaaacatataagcctatttttatttccaattaaacataaactaaaaatcaaaatatatatactcatagttatcatacatacgtttagggaacgagatattggtgtaactaacactactcctatactctcatacaatgaaaattctaattaaataatgatatgaaaacaaatactatttgacacttcgattagaaaaatatatgtatcattaaaattcgaagactaagaactgaaagtggattaacattcagcaattcaaatgtgatggccaatttcactgtatatatatgtatcactcataaacttatgagtttcctctagtgtgatacttacactgtttacatattattggcattttagaatttaagaattaaactgtttctaattttaaaattcaatcatttttttgacattttctgtaaaactaatagttttgagtttttgtttttgatttttgcatgctaaaaaagatagttgcttgagaattttcattttcttttcaacttggaaaatatttatatgcaacagatagtttcattacattgtccctaagtaaaagaaaaagagaaaaaattaactcaggaaaatgtaattcccgatttaattaatcctcgaatacgcatacttcgataaactttgaaaatcactacaacgaaactagtacacgtggacaatggtgattgataggtatatcaagaagggtacaaagtcaaaatagtcaacaaataggtttcttattagggtttcttgggcaaactcaagtagctgcagcactgtttctaactccctgaccattttcaatctcagcatttcgatcgttacagttacatgtgttcaccgatcggacgacggtgatcgctactggttcaggagatgtgagtgtacctaacttcaccatatcgatgctcacttctggcaatttcgcagcctcaagttctttctcaaccaaatccgacggcgttttgcagtatttgtaaaccacatagagtatcatttgaagtgcacctagaacaaacccaatcacgtttgggaactgcataaattgacagacatataaaaaggtgaaattaaagataatttattagtgctcaaaggccaaagcaatatacctacttttaatttttatatatgaactttatcctttacaaatggttgcaaaaaaaataatgtgtacaattataaattttgaggtttccaattaaaaaaaatcagtgttattgtagtgactaaaatatattataaaacctgtttgtttttttaaattcagattttccccctatgtattatttgtatatatatgcttatggggaggttacgtgcaatacatgtacaagtctatgtaacatatttgtagatagaactcttttgttaagatataatcttagtgttagtgggatattaaaatgtaaacgacacataccga

SEQ ID NO: 53371 - DNA, 709 bp, Arabidopsis thaliana landsberg
aataatgttatgtttttgttatttatttaagaaaactgtcacaagtgtaatatattatacattgccaaattttcttcatttatatattgccacaagtgtaagaattccttgaatcatttttattttgatatagtgtatcatctaagtttttctgtctcttgactcacatatggttttaagtctaagtggatgcatatgaatccctactgggccaaaaataaagagaagtccatggagattataaaaaagttttatggcccactggacaagaagacaagttcatacatggttccactaatatatgaaaaaacacaaagttggtccgatatggttaacaattttgatcaaattgtcagaattttcttttatccaaagagttccagatcgaagcatgggtcgaaagaccatttgaagattataaatgttgtactatccgagtcaagaacaaaaaaatctgattttcaaaggaaacacatgtgagaatcatagacataaacatgcaatgcaacattgcaacaaatgaccaatcatgagtcatgacattcacgagagaggtcacattgacgtgtaaaattttgccaaataccatgttaaagatttgatcctaggacccttaggcatttagtttgagtatattatctcccatatttgaaactgaaacgtaaggattttggaaagaaataaacggctggaaagagttagcaaaagc

SEQ ID NO: 53372 - DNA, 717 bp, Arabidopsis thaliana landsberg
ggcgatccgaccaaccaaacccactaaaagctcccaccattcaaagaatcaatgtctttaaactatcaaatatacactaaaccatgttcatacatacaaaaatatgtgtgtgcctatgtatatgcaaaagttctaaattatattttcgagttgatatcgattgacgaccatcataacgttgtataattgttgttgtcaatgtgaaaatcatcatcaccatcattttttgcagctgctatatgtaattctagtttacaagccaaactatattttaggataaactcacagcttaataaataaactagttctttcttcttttcttatgcaagatttttttttcttggatctaattttatgtaagttaattaacgtaaccgacgacctaaagtggcatcatatatgcttaatgctgcgacaagattaataactcaccaaaaatcgtttgatatgataaagacgttttctcacaaggaatctataaaaagcgacttgttaacaaattattcgttattacttattccaaattatcctctcggtttcgatcagaattaatataactttatcttaggtgcatgaacaataccataaaagatataaacagtccaaatttcaagaatcaatactgtacacacaaattatcaatttgaaataatgtcacgttcaaaagtgatatgtaattatgtaaagataaattcccaaaagtatacacacaaagct

SEQ ID NO: 53373 - DNA, 1132 bp, Arabidopsis thaliana landsberg
ccccttttaaaagaaaacacgagacttatgaatgtatgatgggactacttttggtccatacaagatctatggaatctaataattaggggccttataaagaaaacaaaaaaaaaagagcaatctcactcaatacaaaattccattttttcttcttcttctgatgaattctttttggctcattggaatggccatgaaaaatcataacctacctcactaccaaagggatatcctccagttttatttcttgatgcattatttagatggctctctttttaatctgatgatttagctattagtttcacttatttcatttaccataggttattatatagtagagatgtaaatcgtgtgtattgatggcatatggataaagcaaaatgaagaagctttgtaagctgtgacaagatgactagagagtcaataaagatgaccggcctatagttgttaatagcgacaatatagcttgaattaattgctaatctagaaactcaataatcattagtcgtcaatatacaaatctattgaaacaaaaattattgacagtcctaatattatcacataggaatttaggaaatagtctcaacggattaaggagaatgcagcaaaggttccttcaattacataacataattagaaagagaagtatcatttctaggattgaaatatgttagcaatgttctattaagcttttctgatacaaaaatgtatctattaatgataaaaagactcagtatttatgagagagtggaggagcgagatcggacacgacgatgatgatgatgaagggtttagtatttattttaggttatttggcgcgaatccgacttgtgatggtgccacgtggactcccgccgaattccgtccgttaatacttcgcgcgattttctttgtgaaagcccagtaggcccaaatgatgctctcagaaacacacctctctctcttttttcattctgtctttttctcttgtgcaaataaaccaatatatttttaagctgtgaaattgaatattattgaacattgggttcacaatataccagaaattttcttctaattcacggaacagaagtcgaaatggccaatgacctttggaactcggtagaggactaagaggagtatacagtgcttgagaatt

SEQ ID NO: 53374 - DNA, 515 bp, Arabidopsis thaliana landsberg
ggctaaaatgccaaaaccagaatttgtggattgtttaatacacgttaaaattaataacttaattaatttacattcacgattttgcagaaacgtgtattctacgacaaaaatcaaaaactcaaaacaaaaatccaaaaaccaaaaactaaaaccaataaaaagtgcaaatcattcaggaccttactgtaccatcgtacgttaggaaaaatattagaaaatcaacaaacactaaacaaaccaaaaaccctacgatcattgctttcttgtccttgaatttttttctgagtagatgccacaacaaaacaattgattataatctaaactgagcaaaatcatcatatcaaaatgcatcaaaaaaaaacatcaactgttttctttgaacaaacgtgcaacatttatataatatatataaaatatttgacaaagaatgaaaacttttgatttattgaccaataagaaacatagagatttggaacatttttaatattgattatgttttaaccaatcctgatatt

SEQ ID NO: 53375 - DNA, 1389 bp, Arabidopsis thaliana landsberg
ctccaatgaataacctcctattcatggaagactaacattcaaaaactcgtcgaaataatatgttaattttggtttgtgttaaatatgtcaaacctaaattcttgaataacaaaatgaatcgtttttttctcggttactaaatcagttattatgagttttgtaatacagtcaaaagtactcattctttgggataacacaaagcattcaaaacatatgggtttataaactcttgtcgttggatttgggcttagagctctgtgttcttattgttaccacttatttccttctccttgaaaatttgtctttgtgggctttaccgcttcaggattctaattgaagttgggcttcatgacatttttcgttctacatatcggtgataacaaaaaacaatatcaacaaaaaatgtttatttattatttaataaaacatgattcattattttattttatatttgataaagatttcattaatattagtgagagaatgattgcactaaaaaatatggagaaaaatgagaggatgattttctttgcaaataattattaaaaaccattactaaaaattaaaatatgatgctgtttaattacgaattatgaaattaaacgttttgagttcctgcaaattgatatattgtaattgatgagaaaaatatcatttgtcggcgagttgtataaataatattatttttttaattataaaccctaaactaaaacccttttagttagaggggacagaggaaagcttcactagtcgattagggtttctttcttctcgccccaattcccaaattcaaaatcgaagcttttttaatgggtagtaagaagagaagcaacgacgactcgacggagttggtggagaacgacaacctccccgattcttcaattgtgaagaagaagaaatctaaaattgagaagatgaataccgttgctaattctgattctgatacggcggcggcggcggcggaagttcctggtgttgcgagctccggtaaggatatggagaagaagaagatgagaaaagcttctgataaacagaggagactagaagctgctctgaagaaaaacaatggtgtaggatcttcgcggcctaagcctatacctgtggctgtaaattcaaactccgatgaagccgacgacgagtctcttccctccgcagccgcttcttcttcctcgttgcctctgaactattttacagatttggcttcttctgatgcctccgttagagaagcagctgctgagtcgttggtattgaggttgcaagagattcagaagcaatacgaaatgttacctgataaagaatctgttgatggtggtttgatgcttgaagctgagaaaaacgatggtttggataactgtgctcctcatctgagatatgctctacgcaggctta

SEQ ID NO: 53376 - DNA, 1249 bp, Arabidopsis thaliana landsberg
tcaagcccatatctttataaaatggcctttacactcttaccctttattaactttttcgaaaaaggaaacacaaaattcaaaaagctttccccacgcgcctcacactccgcgtgaatcttttcttcaaatcattattctaacgtgacaagcacgcgctatgtctagcgtgttctttattttaacgacactcactgctcgtgtgttttttttcactttaactcgttttccagctctctcactcctcacttctgtcgtctctgcaaaaactctctatttctctttcgccggagataatgggagaagggaaggcctccactctggttttcatcctcgtcgtcgctcttagtttagtagccttcggcttctccatcgccgccgagcgccgccgcagcatcgtaaattcactcttctctctctgtcccacttttttttttctcatttagggtttttgttctttaatgaactctagttcgaattcttaggttataatagtcaatagtatgattctgttgaatctttctatttctggatttgtttcgtaattacttgcaattttcagcgaacatgttatttggtgcctctaatttgaattcaagattcttcaagagtcagtaaattgggggaaatcttgaaactaaagaacaaatttttcagagctatgttcatgtttttgtagctgaggactagagaaacatttaagtgacttagcttagttatagattgagacattgagttataatctgttgtgacacttctttaaggtcattatttctctgtttttgtggcaggggaaatctattcaagacccaataacaaacacaacgttctgcgtttatgactctgatgtagccactggttatggagttggagctttccttttcctcctctctagtgaatcattgcttatgagtgttaccaaatgcatgtgttttggaagacccttagcccctggaagtgaccgtgcttggtctattatctatttcatctcttcgtggtgagtccctttatcttaaacctctctaaagcaatgtatatatcttcaagtttagcttcatcttgagagtgatatatattgaaagagctttagattgatttctgtttttgaagctttgaacatatcaatggattagtagtttgatttctaaaccaatattttgatattcaaatttgacaatttcaggatgacatttctggtagcagaagcttgtgtaatagcaggagcgaccaagaacgcataccacacaaagta

SEQ ID NO: 53377 - DNA, 827 bp, Arabidopsis thaliana landsberg
ctttagagcatctttttaacttttgagtgctatctcacataattgacatgcttgatcagttcattatggatatgatctctggctaaacacacaaactattacaaaaatgcgacaacatgtacgaaacagactcaaagcagatcaacatcaagaaaaaaaacttctccggcaaagataagttcattttgaatttttgagtttacaaccgatcaagaagaaaagaaaaggatctataaaccataaacaaacttagtttggtttattgagttttatttttaaaccggaaacccccaaaatttatactaaaccaagaaaaagaaagcaaaacaaaaaaaaagccacagccaaattgatttttttatagaagaaaaaatcctcacttaagggatacttttcgaagaaaaaaaatcatgatctataatggctaaaacttaaaatgaaaccataccaaatcaaaacaagttattttgattgcaatacggtttatacaaaaaaaccgaaatatcctattaaccgaaccgatagaaaaacgttaaaaatctccccaacttcagttttgtcttatgttatcctgagtggaagtgttcaaattccaaagatcatcgtcccacacaacatcattatacaaaactccatagtttttctcaacgaactccacgtcccaacatgaaggcaaccaaacggtgttccacgtcatcagctcgtcgaccacaccatctcccgccttaagcctcatcccccacaattgcttcttcttctccatcggcgcagccgcagacaccggtgctgctgctgtcaacgcatccaccacaacaaccttcaccttc

SEQ ID NO: 53378 - DNA, 835 bp, Arabidopsis thaliana landsberg
acaaattttgttggtagatgtgtattgaatattatgtgggatttatagcttattttcattatctataatcttttcccttaacatttaaccaattacacgtgaatattttagcatacctagctaatacactataatcatgattttatttttttacactaatcatgaatacccaagtgcaatgccattcaactagatagacagatgtttttagtgctatcattttcgaattcgaactctagatttatgattgtggattcatcatagtattattaaaaattggtcacgagtttgtaaagtataaatcaatttcaaaaacattctggttatcaaagaaaagagagatactaaaatagtttgtaatgagccaacagtcaaccaatataaatcctatccactttgaattttgggcatgtgattatgtataataatgtatactgggatatgtgactgttatatgacaaacactttatacatatagtatataaagttgtaggggcaataagtttcctaaaaataaaagttacatgaccaatgaaaaaaggagagtgacgtagtttttttcttttcttaaaagggcgaaggtgacgtggtggtgactagaagagccatgtctggtgtggcgcctagttagcgtcgtgtcggtacatcgtcagctccacatgtcaactaatcgctggtcaaacataatcaatgtgcataatttgttattttgttataacttttttcttattgaatttcatccttgtgttttattcaatatgcacctttttgtcgcaattcaattcgcttttttttttgtttttatgtttatgaataatagaatgtatatgaaagg

SEQ ID NO: 53379 - DNA, 525 bp, Arabidopsis thaliana landsberg
ccccggtactgcggggagctcgcggtagcgccggctgctgctgctgctgcaggtggtggtggtggttctccatgtccagctggtcgtcgctcgagcactcgatctcaatgcgcggtaatgaaggtgcaagtgcagtgcggattcgcgggtgatcacggcgctcttataagagacgccagcgccacagggtagtgactagtgagcgatggatcgagtgggctgctcctcgtgcatggaaatgccaggataagctgccgccatgcgaaactgtttcgtggccattactgatctgtcatggtggaatgctgtgctagtaattgacagcttgagagaacaggacgcagctagctagtagccagtggggtgatcactgacgattcattcatcatcacacgtgtacattgatgctccagtcatacagcaagttatagatacattttggcccaggctgatatataagattcatagatagataggtagatgtattttcttgatagccggcggcaaagatgagcgactatgggg

SEQ ID NO: 53380 - DNA, 657 bp, Arabidopsis thaliana landsberg
  unsure (1)..(657): unsure at all n locations
cttttttccatatttcttatatgtggttcatgttttgagggacttcattgagatatattagactaatttggatagcttaaacttctgggttctgttttagtctcgtatccatcatctttcgagtccttaaatctgcatcaaacaatacttgtaacttattttatgtcaacttgatacctgaatcttcaagtaaaggtggcttgatgtcttatattgttcccacttatcaaatcaggttgatccggcagtacctgcatctttgacatggcaaagaaagatagatagtgacgtaaaagctccacgggaattcaatctgagtgttaaagagattttccagctggtacacctatggaaaacaaaacgtttttgatataactgttattaaaattctgtaggatgtttgataggattgtcaaaactatgtttttgagacttgcttttgttccggtaggctcctgttggcattcggttatggtttctttgcagagaagaagctgctaaaggaagggtaaacacattttcctagttcagttttaccaaagagtctttgaaatatgctttttctttttggtacacagttatattgtaataatctattgattacagntggccttcatagatccattctncaagcactctngtacgtcttcccatgct

SEQ ID NO: 53381 - DNA, 666 bp, Arabidopsis thaliana landsberg
ctgcaggtcgactctagaggatccccccaagatctgtttgcgctgttcgtgcaaagcctgcctacaccattttagtcccgctggtttgtttcttttacgaatcgtgcatgcagttatgtatttacctgatggttcatggcaaacgctgcgtcatcataatatagctacagtactttgtaagttgttcttcaactgttctatattatgattgtaagatgcaaaatatgtgcacgcttcattggtttcgcgattttaaaatgttgttttttctagtgtgagcgtcgtgaccaaggaccggcagaatggcaggtgcgcagtgcgtccgatgtatgagcagcaacagcatcaataagggatgcgattggtatgtgggcacgggagggcgcaccatgaggcatgagctgccagcagcctgatgatgcgtcgcggccagtcctccggtttcgtgttctttgttcctggtggatgacttcccgagtggtgaggttgcctgggccctgggcatagggaaaatattaacgctgcgttcggtttgaatgtccctgaactaggtaatatagtgatgcatggtatgcccacaaatagtctactaatcaacacactaagcaaagaaaagcgatggtaaacttttgctaccttcagttcagtagtaatgttgtcgtgtgc

SEQ ID NO: 53382 - DNA, 442 bp, Arabidopsis thaliana landsberg
atctcttctcttaaaccaaactaatctccatgaacaaaagatcggtttcggttcaagagagtgtgaaattagaaattggaaactaaaaagaagggaattcgatctcagctccacattttccatgagggaaaaccggacattcgattaaaccggaaccagaccggtcaacacaaagatagacttggtacaattggctattaccagaaccatctctataacactcaacccaaggagtgaaaccaattgaatctataaacgaatctcttatgctctccaaagagtaagaattcccatccggattaatccctattacataataaaccaatagttagaccaatgagatccaaaccgggaaaagtaaaaggtaatttgaaattaaaacgtaccggctttggttagagcaccaaggagattcgtttcctgtttcaggtttagagcggtt

SEQ ID NO: 53383 - DNA, 779 bp, Arabidopsis thaliana landsberg
ctctattactacaatatttattatcaaaaagattaatgaataaaactatatataatgaaatactaattgcttggttaagaatcttgccaacaataataattaaaaaggaactcacgttgattcctttttactcaacgttgttgcgctgccggatccgccgctttccccggtaaatgtctccgacgaaacgatgcttgtcggagatgagatctcttcctcgattaatccattggtacctccttcatctatgtcaaagaacatcaaatttgagaaatcgttgttatccataaacggattaataaagttttcatcggagaagtacgtaaaattagggctagggttttgagagatattcattttttttgtttttgaaatagaaaaaaaaataattgagagagagagagagagaggtttaaagcatccaagaactagagcaagtgaagaagagaagagaaagagttataatggtcagttatttatataaaaatgaaaattattgtaacaagtttttgttaagaaaagaggataattaagagataaagattattaaacaactactacttatgtcaagcaatttcagggtagatactaggaaggtgcttcaatgccacgtgtgaaaaaaggaatatgatgatgacgtcatctgttatgacgtatggacagacgttaataagggtggcgaaaagtgagcttccacttaaagtaattgtttttttgcttgggctttacgggcccattttaagagattttatcgctacattaggtacggtgatattgga

SEQ ID NO: 53384 - DNA, 793 bp, Arabidopsis thaliana landsberg
  unsure (1)..(793): unsure at all n locations
tttcttgttgaacttaatgttacctcttgatcacatctcttttgttgttacagccaatcatctgtgtggatgtgtgggaggcccaccatctcctctcttctgtcattcttccaagaaacactttgaaacattttctaatatctttcgttttcttatcttactttgcagcactcttattatctggactacaaggtaaaaacctagcttaaattccgaccattctgtgttctttttgttcgttcaaaaggctaaatcagtgtttgtttctttctttctccggttgctagaacgacagggctaagtatataaacacatttctgaaccacttggtgtcgtggaacgctgccatgagtcggatggcccgtgcagaagcgtttgtgaatcttggtgaacccaacatcccaatcgcttaagctaaacacaactccttggaaacttgggcagtctcatttttgcaaacagaggtctcaagtcccaagtcccaaccaacaaaacaagagttgctttctgaatgtgacccatctttttgttctgtgtaatttagcgacagttttctcttcttttgccttttgagagactctctagctttaagatcatcagtgagccctgtatggtgacagtaatgttagtgacgcaattaacccttattaagttataataaaacgaaggctggctcacgtgacccgcacgtgactgagagtatccgnttcctcttctttcttttcttcttcttcttcttcgnctcctgacaatagggattgacaccatcgttcacttcaacgtaaaggtataa

SEQ ID NO: 53385 - DNA, 489 bp, Arabidopsis thaliana landsberg
tgcgcatcgacatgttctcttttcctttttttttttgttcttcttctgaagagtggacctgaaggtgatcctcgtctgtttatttcgtcctataacatagatggaaagaattataaaacaaaaccgtaaccatatacagcagacacctctccccaacactgaaccgcgtcagtagctcgtgcatcactactgatcgataccaaccaactacgcgcgccgctggactgtgcaacctatagcatagctagtactagtagtgcttgtgtggctttgggcggaagatgctgatgtccctgtcgttgacgtcctgaaccggcctcgcgttcttctccatgccctgaagcaggtaaacacacgcgagacaaaaaatagataaaaatcaggctgagaaatcacaaacaaactaaaaccagctttcctggcgcctgccattccatccagaatgctggtcaacacatttgggactaagaagcaagcgacgtcatgaac

SEQ ID NO: 53386 - DNA, 856 bp, Arabidopsis thaliana landsberg
acaaataaaatagtacacacgtcctggtatagtgtttaaatttacactatgtaaatatatgacatcttcgcctctggttggatcacgttttgtgaatttataaccaccaccttctagcttttttactttattcgtttcctcgatttaaatatcttataatctttggcataagcaagtggttatccactattggatgcttttcacaataatacgttacaaaacatttgtttattcttacatatcttggaacaggtgtcgcacgctaggagaggaccacatccctttcactaattgaacgtactaaaatgctttgttaatatgcatttccatacaaaaataaataaagaacgaaaaaacctacgtgagaatcaatgtaatgatatactataacatcttcccatagttgacgaaaaagcaagtgtaggttagcctaaaaggagtagttatttacatccaattatctaatatccaaaatctatcaatgtcgtcttcatatatatatgaatatttctacctatatatatgtaatttgaaaattcaaaccaaaatattctcttacgtaagctggttcctttatgctatttgtgaagtcactacccaatacaaataaattctgcgtgaaacatctgaactaaaattttaaaataattccatcgatcttttcttatagataaaacttcaaacgatcttgctatactgctttttcgatgttatatgatctttagcataacgttttaactaatttactattaccgtttatatatgtcataaaagtttattctattataatattatggtacatgagctccgctgattaatatttgattggtctttaaaatccatgattagagttttt

SEQ ID NO: 53387 - DNA, 1225 bp, Arabidopsis thaliana landsberg
cactttcggaaaacgggattaatgatattttaactacttatgtttccacataccaccaaaatcattgacggtgccatgattatgaaaaaataacggtaaatactaatcccaataaacaaaagaaaaaagctagtgtctactacatttcaactaattaatcagcgtcactttaccacttttttgtctttttctttaccacatttttcttcacattctgaattaatattattcatcaagaaacttatagcttaccatataccattatatgcgtattctatcgtaatctccggaaaataagacgatgtcgtgctaaactttttttcttaattattagtttagtgtttttaatttttagtcttctaaatggaggttcatttgttgccaaaattgtaaaataataagaagtaaattaatgaatttaaatctattcaacgtatagtactgatgaattaagttattaacatatatcaaaaaaaatcttgaccacaaaaaaaaaagactttaagcatgcagtacttctatgtcaataaattaaaaagcttgatttttgaaacttttggaaagtaataaatttaggtgacgcaagaaagttcaaagacgtaaaaacgttctacatgagactcacaaagccatttagtaaatggtttttcgtcgttaatattttaatatacgcactcaccattttgacgtttatgttgatgaatatgatttcatcattttctactttcgcagttaagacaaacttgaaaacacaaaaaaacaatgctaaaagaaaaatttagctaatcaaagtttagcatttcttgctgatctttgtaaaacatagactcaccacctaaaacctaattacttttaaccccaaaaaagtaataaaaacacccatatgctttattcaagaattaaaacaaattcaacatttcatcgatgcaattgttttaatcgtgtaattcatacatgtctaaaatcgttagttgatcaaataagatgtatatgggcagatattagtatggttttttttttaccgttcgagaaaaaatgcgaccggaaaagtggcgatagtggcaaatatctgacgataagcgaccaggatgagtggcttcataccggcctccatagccatcttcgacgtaatgttcatgcctgcgtagccgatttgcaccaacaccatcgccaagaacggcaacatatctgatttagccatctctcactctcttttattgtattc

SEQ ID NO: 53388 - DNA, 510 bp, Arabidopsis thaliana landsberg
tagaggatggctataatatgatagcctcatgaaaactaataacaccgtcaccgttagaatcagcttccgtcatcatttccgttaattcacagtaagtcaacggatgtcccattagtagccattgacccagcaagtatccgccgtcgttagagaaacgcatgtggcacgattacacgaacggaaaagctccatcaactgttcatgatctatcaaaaccttttcgtatatatccggcaatattgccaccacgagctctgacgcactctaaggatccgttaccggtacgggcgatttggtttagcagatgagagatcagctcgccgcgaggtttgagaccgcgagaacgcatcagagcggctagttctagctgcgttaagtctccgtccttgtccatgtcgacacgagctctgatatcatctgagacgctggaattgactcaaacggccttggcgacgccagtgatggtgcctctagaaggccagacgatgaagggagtgcctacgcgtagct

SEQ ID NO: 53389 - DNA, 937 bp, Arabidopsis thaliana landsberg
gctacataatttacccaaaaaggaaaggaaaaattcggtatatataagatatgctttgtttccgtttcttaaatgtaaagttttcaaattccaaaaccataacttcctaattaatgatgcactctgtatgagatatgttttgtttccaaatgaaaagctatgagcttccttattatttgtaggacataaaatttagtatacattttttttataacggctatgaattactgccaaaaaaaaacctgccgaaatattttacccaattaacagcctcaagttaacataatgttaagtagatgtccattgacgtgttaatcttaacaaaattaacatctaaatttttctttctctaaaagattttatttaacgttgcaaccttgacataaagccagcagggatccacattcttcccaaaacaacaccaaacgagttgaaagacgacatccctcgaaaccaaaagccggaggaacaaatatattttcgtgaaaactaaaacaaactaaaccaaaacatcaaaatagatcataaattaaccttaacatcaaaacaccactacaagtggaggtgctaagttcgacttccgtgatgggttcgacgttcgttggaagaaatcttttcccaaactatgttaaattaatctttattggagaaaagatttcttccaacggatttcgaaaaaaaatttatggtaaaaaatataagtctgaaagccctacatctcctagaaatggaacccatatcattccaaccttatcattaattgatttggtcattttatgtagtaatagaggtcagatgatcaagtggcaattagattaacagacctaaagagatgtataagtctcgatccagaacctcctaattatcagtgtactgtatatctagaattgatttaattggtatagcatattaatagccgcataacatcataactaaa

SEQ ID NO: 53390 - DNA, 577 bp, Arabidopsis thaliana landsberg
ccgcctccggaaacctcctcgagcaactctccgcgctcgcgcaatccccgctccgcccagatcccgctccagcacctcgtctccgcaatccacgcgcgcattcctctccgcaatcgatccgccctagatcctgccccggctcctcgccagcccaatccatgcactctctgctaaccaagtgcgtctcggagcggcccctagatcccgcgcgtgcttctcgccagcacaatcctcgcgacgccctggctctctccatggaaggccgcgcgtgtggattctggtcaccggctgcgggtgtttgggaactaggtggcagagctgcctctggtgggcactggcttcgtgcaccggcggcaggggatgtgcctgctcctcgtgacggagctggagaagatgctccgtcaggtgggctgtccgcaggctgagtgttgcccgccgtgccggaactgctgcccatgtggaccgccttcctggacttccacgccatgatccgctctgacgtgatggagatggtcgtagacacggcatcgtaagcttaaaggggtacgagctcgaattggaatcatggtcaatactg

SEQ ID NO: 53391 - DNA, 558 bp, Arabidopsis thaliana landsberg
ttgtgtatttcattcttattagcttgggtttgcacatgggaatgatatatactcagtcatcatcagtttatgagctaagctcagctgatttatatgacttgctaatatagttagtgcttaaaacgaactatcaaaaattactgtcgaataccaaacttaattcaaaagctcacaattcgatattaaaattttgaaaacgttcacaataaatgaacctaaaaagacatgtgcattgaactcattttgatacccggaccctttacattttagttcagtccgtacgatgtcattttcgagagctgttgcgcattacttacttgcctttgtgtgggtgttagtgaatctgtgacccaccttaagaacagttaagactattcccggtttacgcgtaccggacccataacagtataagtgaatttggataagaaaggagccgcctagagagaagaaggcgatccatggcggaatctgtcttctcttgtataccagaagacgtagcttcaaaatcttcttcaagctccaagacgatcaagaaactgggctcgctcgcttgcgtct

SEQ ID NO: 53392 - DNA, 956 bp, Arabidopsis thaliana landsberg
  unsure (1)..(956): unsure at all n locations
ttggcgacggcgacgtaacgagagtcttggggagaaacaacaaggacctgtttgcttgtaagcctccgtgaattccatatttgagtatgtgcaacgagattctcagaagagaagaatcaatgcctatgatctatgataatctaagctcctggattcactgtgatacgagactgcgagaagccatggatatcgactttttcgagagaaaattttcaaaattgaaatgaaagagagattgtgagtcggatcgggtttgtattgggtgggccagttacggggatggatttcagattgataatgggcctgaggcctattattcattaactcgtttgttgcgggaatgacaataatagccttatttaacaaacaccttcacatagacgaaatcatgatcacctaaaaatcgaccatattttgatgttcacgtacgtaaatgcacattcatcttaatcacgtgaaagatgtttttccaactgatacaatagtgttgttgtatttttagatcagacagacttccactataagcagattcaacattacatataaacataagacgtttaattgtaatttttttactaaaaaaatttgatcatagaattttgaattactcataaacatgaaacgttgaattttgaagctgctacatgttggaacagctcgaccaatgtcgttcacctcgggggggttttaagggtgtacaaccggcgcaaatgaatgcagaggctccaattttttttatttaattctctgctaatttgagggtccaaatctttcaaaaatttctagacacagaacgatggctgggattgaatattaggttttatctgggaaaaaaaaagatgactatgtgaaactgtcacgttagctacggcactgcacggatcgatacgcacaaaacatgacttanagaagaaaaagaatttgggccaattttccattttaaaaaaagcttatta

SEQ ID NO: 53393 - DNA, 511 bp, Arabidopsis thaliana landsberg
  unsure (1)..(511): unsure at all n locations
cannnnnnnnnnnnnnnnnnnnnnnnnnnnnnnnnnnnnnnnnnnnnnnnnnnnnnnnnnnnnnnnnnnnnnnnnnnnnnnnnnnnnnnnnnnnnnnnnnnnnnnnnnnnnnnnnnnnnnnnnnnnnnnnnnnnnnnnnnnnnnnnnnnnnnnnnnnnnnnnnnnnnnnnnnnnnnnnnnnnnnnnnnnnnnnnnnnnnnnnnnnnnnnnnnnnnnnnnnnnnnnnnnnnnnnnnnnnnnnnnnnnnnnnnnnnnnnnnnnnnnnnnnnnnnnnnnnnnnnnnnnnnnnnnnnnnnnnnnnnnnnnnnnnnaaagagtggcatcctatgtccactatctcgatcgaggtatggaggtcagaataaatagaataataatgaatggaaaaaagagaaaatcctttagctggatannnnnnnnnnnnnnnnnnnnnnnnnnnnnnnnnnnnnnnnnnnnnnnnnnnnnnnnnnnnnnnnnnnnnnnnnnnnnnnnnnnnnnnnnnnattcaaaa

SEQ ID NO: 53394 - DNA, 465 bp, Arabidopsis thaliana landsberg
tcccgactgtctttggacactttgactaccttgacagcccagcgaccttaagaatggttttttatgttgccatcacttcgtgattagggactgtgggtcccacgtgtcgccggctcatctgcgcagatggcacgtgcgttctagcatctccacgactaccccctcaaaaaatcaagtggctatcggcctctgcctctccgcgcggaaatttcacggtctcgcagccgtaactgattggcgatgacatcatgtgcagtgtgcacatgacagatcttgccggatttatcaccgtgtgtgattgcctggtttgcggcagggtgcgtgcgggtccactggtgcatggaccgggtcaccggtgtacggggtccggctgccttggccgcaaagttcctctcttcacagccacgtggtggtcccgagctatccacgccgcttccacagacgagcgcgaggcagtgtgtggca

SEQ ID NO: 53395 - DNA, 382 bp, Arabidopsis thaliana landsberg
cttttaagctgcacaaccgtgctcgctctctggccactgacaggctgggcccgttcatcagcgggttgtgccaacgcaccgatgcgcgtccttggttacactggcgtgtgggccttatttgtcagctacgcatccctttgcccgtgttttctctgtctcgcttacacatgggccccacccgtcagctcggtcatcttccccgtaacgaacgccgccgccatcgcgatcttcaccgctgctgatgccaccttttgcgcgcgggtagttgcagacccggtctcctggggataaataggaattactgtgactcgttccgccctcacgcccagctgagagattccatcgagttccacagaagggggaaaaagccggaaaaaaaaaa

SEQ ID NO: 53396 - DNA, 786 bp, Arabidopsis thaliana landsberg
ctctcacctcttgaatcaagatagaacttgagcgttcttgctttgctttgtttccatacatcagagccacagcggttaaaatcacaccaaccttaggatgattgtctcctgatcaaatgaaggatgatataaaaggcagattccgttagtctggagatttagtcattgagaatcgatgaccaaaaaaccgcaccacacagtaccgtaatgttcctcagtctttgtcaatgcgtctgtcagtgtcttctccgcaacaccaaagtttctaacaaaagcaaacacaaacagggactagtgatatagccagaaaattcacactaggacctgtatgcacaagctcaaaagtctacccaatgtgtgactcgagctgacccagagcaaatgtggcagccagtgagactgccttcaagttcatgttacatgaacacatagattctttggtctctgtcactccttgaattgccttctgatacatctcctttgccagttcaaaatttccggtggcgtgcaagtattcaccataagaaagtgcaatgttacctattatcatgtagttataaagaggtcccaataatcaggtttcttcaaggctagctccagactaacagaaaaaggctagtgtgtacctttgcagctttcatgattctcaagtcctcgaaataaagattcggctgcacccaaaatccttaccattaaactataccaaacttactttggaattaaaaaaaaacagagagaagagaggttgaggcttgtgtctctaccggattcgatatttcctttcac

SEQ ID NO: 53397 - DNA, 1323 bp, Arabidopsis thaliana landsberg
ctcacatcgtagccgtgacccacacctgagtaattcgattccatcatccaaaaaaagaaactcttttttatttttttgtaaaaccctaaattccctgaatttggcttctcgacatacaaagaacagagttttacaaaagattcagcaacgaaatctgaatcagaggaggactctagacaacattgcttacatctgaagaggaagtgggatgattaagtggaaaaagtaggaggaggcataaaggtgagaactttatcgatcaattcattaaaaagagataatttaaggacatgttggcgaagagtaatattcaaatgggattgggtataattgctaagcgtgagagaagaagcaagaaattgagaactgtagagagattagaggaaggaggaagtttcccgggaaactcgaaagggggacaagaccagtcttgcgattcgtccgaggagtcaaaactcaaaactatctctcttttgacttgtcattaagagtattcttgggcttgatgggcccagtttttattgtagtgattgtcatgttatccacaaaaagtaatgactagtggttctttttaagtagtgatttgtctcctaattcccccatatgttgaccgcttatcgaagcttaaatgatccatatgtttgttgatactagcttataattttgtttgcttcaagaaagtagttgccaaaattgaatatgtcgacgagttacttaggatcattattttcttaataacaacaagtgtacttactgatttttaaaatttgtatagtattttataaatagctcgagatgcttctcatttgggatatgttagacatttttttatatatataatagatgcggtcaaaccgtacaaattattaatttataattatgtgaaccatagaagtgatgtttttgatttacatatgtacgatcttggattctaaacatactaacaaaatttctaaattacatattccggccgcttttagatggtgtctatatcaaaattatgtatatgttacttgatcaactcttgttttatgattattattattttgatgtaaagtcaaatgtgtttgcatataaaataaatatgtgattccaacagtttcaagttgacaaaaaatcatatgtaaaacttggagagcaagattattaaaggttcctgataggtggagttgattatttgaccagtacgaattatttaaaaaatagttgatgttagctgatgaatactatatcaacaaacaaaccagaaatgataacataaagtgacttcatcggaataattatatagaacagcggcaataaataaacacaagaaagtgaaaa

SEQ ID NO: 53398 - DNA, 1181 bp, Arabidopsis thaliana landsberg
taatctacaacaagaagagaaacaccaaaccttaaatcttgagctttttgcggtataaatcacatacaaagaacaaaaagaaaaactaacctcgacccattcattaacttgaaaatcactagaagaaagacataaaattgctaagatttggaggagcagcaaaagtatggggcccgagttgattggttgttggagaagttgctgtagaagacaccagcaaagtatgtacgcagagccaatcaaatacaagcaatcacctacttcagctagaaaggacttgtctttgtttagcgcagaccatggcaaaaccaaagaagctccaatggaagatatagatagaagataataaataacttttactgtgacagtggctccaaaaccggttgacagttcatcctgatatctccctacatgcagcaagactaggaacccacaagttgagaaaccaaatgctaggatgcgaacaccttttctattcgatcctgttcgaaagagagtatatagtcctagaccaataactaggattattgagattagctgaatccatttcacataaccactgccaccttgcactagccacttagaaatatcaggaaggtaagtccagttcacgcccccttgatgccaacctctcagtagtctaccagaaataagaagcgagaagatagaaccgaatttaaagtctctgagaatgttcatccccttggaaattttgaatgacttcgctgtcttgaagagtaacagaagatggaatgttgataccatgaaatgccatatataatgctcttcttccaccattgaactagatcccatgcttataacaagtatcaaaagaagagcaaaaatgaacacctcttctaaattcaacaaattactcaaactgcagaccctatccttgggctcatggtaaacctctttgaataaggacagaaagacagtaccacagatgaagcatgacagaagcatggcactcactccaagaccgagtaagagaacaggtttctgcaaacatagaagagtttgttaggaatactataaattttttactagatttggaaactagtgacgactgacaattgttattttccgaaaagaacttcatagaactctaagaaaagatgtcaaaacatacctccgtggttttgcttgctaaccactcacttgcagttgtcaagaaggtg

SEQ ID NO: 53399 - DNA, 671 bp, Arabidopsis thaliana landsberg
  unsure (1)..(671): unsure at all n locations
ttgatattttggctttgagggaagggaccaaattcagtgtctctaactggtgctgtgaaccagactaggtgcagtgactgcagtatggatcaggttggggaataaagaaaaatatctttacctctcggctgctgtaggaaatatcaggttttgggatatttgaagcctgccctcgatggagttctcatctgctgcttctctagttattctcaagtgatattttggtgtagagcttgatcagagttcaactggtactgggagttgctacaaaaatctgaagaaagatcttcacatccctgctgtcatccacttatgtgcacaaattgagatagacttggggtgggtaatatggggctcgaggttcagtccccctctgcagaaaaatatcagttttgcacctgtttgagcctaccacagtagagtttgtctgtctctactttggtctgtattcagtagattggttggatatttgtgaacagtgagcccttatctgctctactctctatttgaataactggacaaagcagatatttgagctaagttgtggctggtgtggacttgagcatgaaaccacgtgtgttagtcgtgttgtgctgcaccttggactcttcacactaggtttgctgactgaagacgctgcatcctgccnttattaagtgtggtcgatgaga

SEQ ID NO: 53400 - DNA, 940 bp, Arabidopsis thaliana landsberg
ttttctgcagtagctgtctcttatgattatcaaatttgttgtttatttagggcttttatgttgtcaaaaaaaaaaatttagggcttttgaatactcaagtttttccagacattaagctaaaacaaatactgaatattatttaatttttgttaaaaaacaaatttatgttatcgcattgcactgtgtgagatttatccggacaaaacacaatgatagaagcagcataaatcatatcaggatatgccttttattgtttatctttaataccttagaaatggtatcttatcataataacttaaaggatcattattatggtagtggtaaaacatcattattattcataagtaaagatttaaagaatgttcaattttttgagatttgtttttgaatttttgaattttggaaatgcagtaatatactatatagtcccaaaagtccgtatgtatcttcagttcaattgatggatcatatagaactatttagaatgatgatggtggcaagacaatgacctaattaaggacccttcctaaaaatttcaaactctatagcaactttttccccaccaatatatatataaatacaaaaatcaagtatttaacatctaaaataataataataataaaaataatctacactctctaccctctcatttcacgtatatataatccatcttttaggacagaacccaccgaaagctccacaaaccccattaattaacaaaaaaaccaaaagaaggcggcgcaaacaaaagataatgcaaccagagacctcagatcagatgttgtactcgtttcttgccggaaacgaagtcggcggtggagggtactgcgtctccggcgactacatgacgactatgcagagcttatgtgggtcttcgtcgtcgacgtcatcgtattacccactggcgatctccggcatcggagaaacgatggctcaagac

SEQ ID NO: 53401 - DNA, 673 bp, Arabidopsis thaliana landsberg
cttatctccacaatcatgaacatagagaacattcctagatgcgactgggatctctctctttccgccgttgtttcctccgcatccaccggatcagacgctatcggagcaatcgagttcgaccctaccggagagatcatagctacgggaggaatcgcaagaaagatcagatcgtatcgtttaagctctttgttagagtcacgtgacgatcacgtaacagcttcagagagctgtatttgcacgccggcgaagcttagtagtctcaaatggagacccgatttttccggtcgggttatcgggtcaggagattacgacggagttgtcaccgagtacgacgtggagaaacaagtgcctgtttccgagagagacgagcatggaggtagaaggatttggagcgtggactacacgctttacaatggctctcttataggcgcgtcaggctccgacgacggaacggttcaaatgtgggatccacgtaacggagggacgttagaagaaatggttaggcccggtggtggagcggcgatttgttcggtagagttcgatccgttcggtggatcttccatagccgttggatgtgctgaccggaatgcctacgtgtatgacatcagaagactagtggaccctttgatcgtattagacggccataccaaaacggtgacgtatgctcgattca

SEQ ID NO: 53402 - DNA, 506 bp, Arabidopsis thaliana landsberg
  unsure (1)..(506): unsure at all n locations
nnnnnnnnnnnnnnnnnnnnnnnnnnnnnnnnnnnnnaccacgacctcaacacctgatggtcacacgtgcacgggatggcatccacatgcctaatcccaagtatgcacatgtggctactactacggcgccatcatcaccgccatcttcagtccgtgctaccctgcgcgacccggcctggaagcgctgatgcaagatgagttcgacgcgctcacgaacaacgacacctggacactggtgcctcagccggcacacgctaatatcatcaccggcaaatggattnnnnnnnnnnnnnnnnnnnnnnnnnnnnnccttgaacgccgcaaagcccgatgggttgtacgcgggttctcgcaacgactagnggtcgattttcatcagaccttctcgccggtgatcaagccggccaccatccggacagttcttcatcttgcagctacccggtgatgggtcgtccatcaactcgatgtcaagaacgcgttcctgcacgggtgaccttgccgaacga

SEQ ID NO: 53403 - DNA, 801 bp, Arabidopsis thaliana landsberg
gtgcatgattttatttattcaaagcatgattttagtagtcgaggacgtagaattttttggtaaataattttaatttagaaatcacagtgttttaagaaaagaaatgaatagaatgcaagaaaaagttgacgcggacacgttaacctttttaaccaaaggtcttgtaataaagcaccggaaatacgcggatgtcgggggcaaagacgtcacgtaatctcttgaaatgtagaaattacgatgatacctctagtcccgtggcgacctcgtggcggctgcgtcgacgagccaagtagggttggggaaataaaagagaatcttcaacaaaagtcattatagtggggcttgactcttttgcaagctttcacacgtggacgtaattcattggttttttgttttatgacgtggtagctttagaagagtagacgtgaagatgacggaagtcccctacttaagcgattagtgtgaagtagcgttttttctcatcaacaacttctttcgtttcgaaaataaaaacatatgagaaatttcgttgagtagcaaacaaaagcaaaaacattcctccatatataagacaaaacgagaaaagttcaaagctctactaattagcgttgtgacttcaaatgtataacatcaagtttaaattagctctaggtttaaccatggtatgatcagttttatccagtctagacaatatgcaagtagaatatcaagttatgtggtattttttccaaacaaatttcattattaacattaaaaagtatttatttaaaaaaaaaaaagaacattaaaaagtaggcaatt

SEQ ID NO: 53404 - DNA, 908 bp, Arabidopsis thaliana landsberg
tttattcatttcatggctactctgatttcattgtttggtagttgaactgcattaacaaggtatttttttttcccttgtctttacagagagcaccatcaacaaagtttaattaatcagaaaagtatgaaaacgcagcagcgaaaggctaacacgcagcaaacacaacatagtttatttaacaacattttagctataatgagtgatgttctggaggaagaggcaaattcgtcttttgtcgttgttattctggaaaatcttgtgaaggaaggagaggtatggatatacaacgattatctctgtagattatggttttcaaaatgattaggtgatgttttcaatctcgtgtgcttacaggatacaacttctggagctgataagctcgcagttctctcattgaaaggtgtgccgacaggctcgagccgttaatttgcagctttttaacatcatgttttatggaaaaagattccatccagaccaatctcaaagattcttatcacgaaatcatatttaagatctccttaattgctccccagatgctgctagcagttatcccaaaattgacccaggaactactggtatctcttacacacttttatatttataaacatatgatctagcttttctatgagattggttaaattgtactatttaagcaggtatagactgttttgttttaagttagcgtttatattcctgtttttttttttttttgctactcaccagggtcgttatttctatgtctgcagactgatcaggtcgatgtgcgaataaaagcccttaacttagctggaaggatttttgcgcagcctaagcactgtttaagttcttacgtagagacatatcaagatctttatgcagagttcttgagaagattctcagataaatctgcagaagtcagaatggctgca

SEQ ID NO: 53405 - DNA, 879 bp, Arabidopsis thaliana landsberg
tttttaatgttagtgttcactctcttagaatcaattaggtcgtcaggcattatctcacatctttgcatactggcttctccaatatgtatctattggcataataagagaaggtaaagttagattcaacactatagaaacaatccaatagtttggcaagtcaaacttaagagggacaaaatggagcttgccttgagaagttcaacagtgcgtatctcagtgtcgatgtcataatcagtcttgttgagaagcttttccgcaagcataacacgatattcgtttactagttgctctttagatccaattatatcaacaagcattccaagtatgtctaccttcctctgactgaggctaccttttaaaggatcagcctcgacagggtccggttcccaactgaggagaaagcacattaaaaggtgtcagacaaatccaatgtgaagcaagatgataatcaagaaaatatacaacaggaaggataccgggaagcattgatccaggcttgcttatcatcggtgtgaaaatcatcgtcaaaaccgacattctcttgactttcttcatccctcattaattcttcaagaagactatccccagggtttccggaaccatttgcattccctccacttccatctgtaagcatagtgacgatacatttaatggtatctttccgcccccgtaaatagtctctaattggttcacccactgcttccagaaatacaccagctggatctattgcccgaagagctttaatagtcgacacatactgatgtaatatatcattggttgaggcaccagcagtgagcaaacggtatttcagcgaagaaataaaagattcaactagcttagaatgttgtccagtatattcaagacactgctttaaggctt

SEQ ID NO: 53406 - DNA, 895 bp, Arabidopsis thaliana landsberg
attgaaggtcttctgagtccgttagctataggatttgcagctgttggatatttcattttttcctgtaaaaaagaatggtgttgagctattttttataagaacaatgttccttttgtcatccctaattccctacaaaactatgtatggtacgcaggctttaactttaactaagctcaaagtaatcggaagcttttaacaattagtacaattatgtttagttgtttacaccttttgtgatgtacattatgcttagacaaattatatggaacttttctatggcatggctaatgcttaataaaggtgacaaagtcaacactatatttccaatgtttcattgcattctattcaacagccagagattggaaatatcataatgttacattcattagaagaaaataagtaaccggagacataaacacaagataaaacttgatctctcacgttcttcacatgattcatcaaacgaaaaacattagagcaattatcctaagaaattaaaacttgataacacagcaatcagaaatcgaaaccacccatgtcacccatgtcacccatatcagcgatgtcagaaaccgcttcaccaaccaacaacccacccaataaaccagctccaagcccaagtcctagtcccattccagctccagccttaccatgcttcttcggtttatgcggtttaccatgagcttgctgttgcgggtaaccgaatggaccctgcggaggataaccttgatgcgggtaaccatatggaccctgtggcggataacccaggtatccaccctgttgctgaggcggatatccagggtaacctccctgctgtgggtatgcaccacgtggcggataaccaccgcttccagctggatatccagcctgctgctggtatacataaacaccaccg

SEQ ID NO: 53407 - DNA, 513 bp, Arabidopsis thaliana landsberg
ggaagccaaaactaacaggcaaaaccaatgggccctttagctttactttatttggtgagtagtccaatttgctatctaatcaacctaccaaatctatatgttaatttagagcttcgaccaaaattttcacggaatccctttttgggcataggaccctctttctcgtctagtgtctttcattagggctgagaagagagcatttgaggaaataagtcgtgtattattccaagttagtccaaagtttagcagtcgcctctctttttagctctaatcttcaagttatcaagtgtttgttcgtaagtctcttagaaagtcttatcttctttccccgcttggtcctggatccttgagtttgggttgattcctctccgaggacttcttactctctttaaagggttcgttttagtcggcttaagtcttcaacaatggcttcggctctggataaagctatgctagctatgtctttaccagaagaaagaggaagatcagccgtttgatatgccggatctaccg

SEQ ID NO: 53408 - DNA, 647 bp, Arabidopsis thaliana landsberg
atcctatcgtaaggagtaaggacccacacttgcactattattcactcattttgttttatgtttcattttatgtcattgaccacaaattaatttatatgtataaaagacatttatttttaaatgtaaagaaatgcgtaacgacagcctttctaaagagtttgattgaattttaagattatgaagatcttaaaatagatatcgaagacgaaaatagatttcctcagctaaatctcaaaaatatctagacatcttaatgcctcaatatagtattcaagatgccattaatataacgctttaacttgtctcttctagataaaacaactatttaggtcggggttttaaagatttaacccttctttttttggcagcaagctttatttatgtgacaaaactcattctgatatatgagtactacaagtttgctctactcatctcattttcaatatcagtactttagatatattctacaattcaatattaatgacatttttctaaataaatctgaatactaatgtatacttttacaagccaatgaatcgtttttgataggaataattttacttctaaatcagatttattggtcatatcaacacgaaattaccccaattttaaaccatatatatatatatatatatatatatatatat

SEQ ID NO: 53409 - DNA, 481 bp, Arabidopsis thaliana landsberg
  unsure (1)..(481): unsure at all n locations
ttattttatatatcaaaaaaaaaaaaaattcagattatttccttttaaaaaattcgaaatttgggagggagaacaaaaaaggaatctttctcacgaagctctttctgaaatatcaatcggacggtggatatggttttaaacagcttgatgtgagctggctatgctgacgtggtggaattttagtggttggtagcaccaaatttaagtaacgcgtgacccaaccgcaccgtttctcacgctccactatcattattggtaaatctttattatattaatatatatttcgtccacttttatcatatttaataatatttttatctgtaatttatccgtttgtgacggcgcgaacttgcgcagaagtcnnnnnnnnnnnnnnnnnnnnnnnnnnnnnnnnnnnnnnnnnnnnnnnnnnnnnnnnnnnnnnnnnnnnnnnnnnnnnnnnnnnnnnnnnnnnnnnnnnnnnnnnnnnnnnnnnnnnnac

SEQ ID NO: 53410 - DNA, 526 bp, Arabidopsis thaliana landsberg
ctggagaaacagaggtcaaacggcgcgagaacagcgtttgaacggtgaattgtgccatagagtttgaaattcgaaatgaggcatgaaatgactgggaattgagtcgatacttcacggataggtatatatgtatgaaaatgagtgaagtgagtgcttggtttgaagtttggcaaaagaaaaatatttttggcacttggctcgaaacagatcactagaaaggtaaacaagttgtgaaacatgtgtctggaatatcggataagcgttaaatttggcatgagagatacaggtagtagctggagtgtgctggaaaaagttggggtcgatttgagctattttgactggtttaggcatttcaccaaacacttggtgcgcggggttttgaataggtagagaaatggttattttagtgttgaaaacttccaaaggagcacaacacctgcaagggaaggcttgatagtgtactagggacactcaaggacacaagaatcactgattctcaagattttgatttgagtgcaaaggtggg

SEQ ID NO: 53411 - DNA, 194 bp, Arabidopsis thaliana landsberg
cgagaggaccccgatcacggagccgtggtcagcctgggccgcgtcgacgccagcggggccagggtccgcgtccggcggcgccaccgccatcgcaagggtaacgcgatggcagcatggagtggctggcacggcgtgcgtgatgactgggatagataaattgcacttgcgtagggatgtatgagcgttatgcgtag

SEQ ID NO: 53412 - DNA, 332 bp, Arabidopsis thaliana landsberg
ttttccatgtaagtcaggacattcgctcagagaagtctctcacactgcggctcacgtgtatacgacagtatatgaggtgtcgctgtatgtacactagtgaagtaggatggtataccgactggttagacatgatagttagcttaaagttattcaggagaagataggaagactgtgcatgaagcacgtttaagaatgatgatgtgcgatgtgtaatatagtgaaaggtatgggatataattggaaagttgtgtgatgatctattggagtaagtaaagtatgatggtgtttagtttgaagaggagttcgagtgataaaaagtatcggaggaatga

SEQ ID NO: 53413 - DNA, 486 bp, Arabidopsis thaliana landsberg
  unsure (1)..(486): unsure at all n locations
tctagaggaacccgaaaannnnnnnnnnnnnnnnnnnnnnnnnnnnnnnnnnnnnnnnnnnnnnnnnnnnnnnnnnnnnnnnnnnnnnnnnnnnnnnnnnnnnnnnnnnnnnnnnnnnnnnnnnnnnnnnnnnnnnnnnnnnnnnnnnnnnnnnnnnnnnnnnnnnnnnnnnnnnnnnnnnnnnnnnnnnnnnnnnnnnnnnnnnnnnnnnnnnnnnnnnnnnnnnnnnnnnnnnnnnnnnnnnnnnnnnnnnnnnnnnnnnnnnnnnnnnnnnnnnnnnnnnnnnnnnnnnnnnnnnnnnnnnnnnnnnnnnnnntcccccaattttgacctttatgtgctttttcgggccttttcgtggtttgggctgtcttacgggcccgatgttacttgttcccgcgttgatttcgagtttcttcgtgcatctcgggtcgttcagcctcgatggggtgtccctcgtagcgggtgggccctcggcgcatggtt

SEQ ID NO: 53414 - DNA, 631 bp, Arabidopsis thaliana landsberg
tgcacttgttgatcacccagtaggtaaaaatctatccgttaagtattataggtgtgagtgtgacttatgttggatatcaacatgagtgggtgtttgctccatcctcattacaaccccccattgtatccctactatttttgcagtagcatggttaccgttatttttttgtgtttaaatattaagatattttggttttaatatattgtttgtattatatgtgtatacatagtgtatttttaaatatataaaaagtaacatacttaaaatagccaaaatatcttggaacccagggagtaactaacaagacttttatctcgctatggttgatctcttccttctcaacgagttgtgatgcaataattgcccactttattgccataccgcttatggaccattcatggtggcggtggtggtgggcggggatgattttttggaacattgagatgatcatatgagttataatataatcttatagattgtgttacgttaggatcctaagaagagagaaggggtcgacgacggcgcgacggcgcgaggggaggggttggtggcggggacgtggagaatgatgatgaatgattcaaataatattgtctattagaattgagtgagtagaaagagtgtgttatgt

SEQ ID NO: 53415 - DNA, 585 bp, Arabidopsis thaliana landsberg
atgcccagatctcgactctagcctgttaaagtcaagacatgaggtagcgttctcaccggtagttacgcagcgctgaaccccaaccacggtgctatccgaatttgcggcggcaccaactccggcgaggaatttcacccgcgccgaacgcccacagacgcaacgcctttgctcaccacgcccgctacagcttccgcgaccacccggagcttccacgaggcgaatggggccgaggaacgccgatttcgagcagtggctggatcttgcgccgcgctatggctgagacggttgacggcgaaggcttgtgggggcgaaaggctcaaaggaggcgcgcgagatagaggcaggggaagagcggatcctaggaagagcctttatgggcggccggtcgtgaacggagaggattctggaacgcgaccgccatccacggagtcagttgacggggttggagacgtagtccgcgcgcgtgggaggagccctggccagtgggccaacagctcagtgaaacatcgaagtcaggtgcccgagcgtatgacggcgggtccgcgaaagtgatacagcgcggtggagtgacgggctccgctgtga

SEQ ID NO: 53416 - DNA, 968 bp, Arabidopsis thaliana landsberg
  unsure (1)..(968): unsure at all n locations
accttaatataatgtttcagacgacaattttatagttaattaaaaaggaattaaggatgatggggtgggggtgtttactaatccgacttggctagaataaaagatcatagataaatgattgaaaaacaaaaaagaaaccaaaaaagacaaatgatggacttggcctatttacaagctcattataggcccatttttggtagaactgttccatagttaacaaatgatacacgtcctgttcttctaagcattttgtctttgtttgcaacagaatctgttagaatatcttgccttgcataagcgaatagagaaagagagactgttgacaaaaatataataaaagagacagactgaaagagactgtgacagagatgttttgtgtccacgggaatggattgtgagtggagatggtaataatatgtagtcagttctttaattatttttgtcatgacatcgtcgacattttcaatcttagcttggtttttacttctatgtgtcactctcaatctgtgtatcccctagtaatgtacgacttccataaagtattatttatcaaataaaaagtaattaattatttacccatttaaagttttgaatatgtactaaatgaccaaaattttcagaagtaatttgcaaaacaacaagagtaattaaccgaaaaagaacaaaaagaaaactggagtactgtggctgcaagttgcagagtttggacataatcacataactatatatttaacaatcatagtttaaacccgtacaacgtatattgtaaaagaaaaagaaaaaaagaagcaagtaaccatgtatttaacgaatagagcgtatataaatattaatcagcagaatattatccatgatatactttttaacatnttctccacatanttttcttttactgtaacaganaatcagatatatacattataaaatgatattcaatcttatgtacttcaaatatctaataattaata

SEQ ID NO: 53417 - DNA, 593 bp, Arabidopsis thaliana landsberg
  unsure (1)..(593): unsure at all n locations
ccccccccccccccccaacaaccccccccccccccccccccccccccccacccctccccccccccccccccccccccccccccccccccccccccgcccccccnncnncnccccncccctcccccccccccaccccccccccccccccaaactcccccacccacccccccccccccccccccccccccctttccnagaccccccccccaccccccccaaccccccccccacaaaccccccccccccnancaccacccccccccccccccctccccccncccgcccggcccaaaaacccccccaaccaccccaaaaccccccctttncccnccccccccccccccccccccctccccccccccccccccccccccctcccccccccccccccccccccttccccctcccccccctcccccccccccccccccccccccccccccccctcccccccccccctcccccccccccccccccccctcctccccccccccccccccccccaccccccccccccccccctcctcccccccggccgggggtggcccacccccccccccccccccccggcgcccccccccccaaaaaaaaaa

SEQ ID NO: 53418 - DNA, 1029 bp, Arabidopsis thaliana landsberg
gtctaaaacagaaaaccatggattttagtgaattgaacataatacacaatattcgatttaagcaatgtctgggttatcaaacttggaaaagcctgaagatttaccaattttttgaatgtcattacaagaacgagaaaaaataaacaacatttacaaaacgacaatgtcggaaatacatatccatgcatgtcatggtggtatatattatgtgaattgcgataatcataaacatagtaaaaaagtacataacattcaatgtaaattgatatgatgatgtcttgtcaacctttgtccccacattccgaccgcttcacaagggggtacggttcttaattagacttgtctcgtcaaaggaacttccaatcctaattaaacccaaaatcttgtcccccccacacagtacctaattaaacacataatcaacccaatggagcaaaccttgcgagttcttgaggcaaaaacggacgacgacccgtttggtgagggtgatgctcgttgctcactccaagaaaatcccgggttagacccatctgttgagccgggtttagacccgatcggttcgattgaaagggattattatccacactactagtggagacaccactaagaggaggaggagcacgattatgattctctcttaagacattggtgttgaagttgtttagttgttgttggatcatcattggagaagacgatctaggaggaggagaagcggtggccgaggaggatgtcattgttgggccggcgaagaatgacggagcggtggaggaattgcttctagtagagcccatttgtgcagctttttgtaagagagctgtggcagacattggagagagaggcttgttttgtttgttttcggaggaagaggagaagagtggtgagaaagatgagtcttttagggtttggtgttgtagtgaagctgaggtttgttgtgatgttgaggatgatgataaggtgagactagggtttgtggaagtcattggaatttggaattggtggtggccggagaaatcagggagggatgatgat

SEQ ID NO: 53419 - DNA, 700 bp, Arabidopsis thaliana landsberg
tactttatgcttcctgatcttcattgtcgggttgaagcttcttgtttatgtaacaggagttggtaggggcgccggtccgtctttggtggtgtggtttcgtcactgatgtagtcgctgctctggtggtaagcatgtggaggctctaaggcgtggttcgcggttgaggacttcgtggagtgcttcggggttccacagggctaaaccgtttctcttgttgtggttgttatggcggaagttggtggcgttttggtgggtttcgcagtgttgattcagtggttaacaacggttcctatgaatctgtgtggccgtcgtggagttcgtcttcagagggttgggtgagtcaccgcccttttgggatccactaaaaatcttatggcttatctactagaaaaaaacgaaataaaaatccgttggaggttgtccagaagatcaagaatggccatgaagctaagtttgtccaaaagatcaagaatgaccaatattattatttagagtctttaagttcagcccaaacttaatatacactcaaatgtttcctttagctttgacatacccaatttttttgccagattcgatcgtgtatgcattagctttttttttttggggtttgagcaaagaataataagtacacagcttgatgagtttcatagcatgtcaactttggtggagaatactgcacttagataaacgttctttaact

SEQ ID NO: 53420 - DNA, 1598 bp, Arabidopsis thaliana landsberg
catacgaatacatgtggtaatctgtcatgcactgcacgccatgtaatcaaagcaaattttggtgtagcttcgacaaacctttagcccagctgcatgtaggttgttgtgctctcaaaagtttccaagtttcatttgaggagaatttccttttaaaacttgtcttccatcgccaatggttcacatcttcctcccatgtttttcatctcaatcgcatttctttgatttcagcttcaactttatttaagttctccactcgatgacgtctttctctgtgagtatcatccattatatcagcttttggtatcttaaggtctatacatcccctatcaccaaagatgtccaataatttccccacggaggaccatttttcatgccaaaaggatgttcctcaaccacttttaactttaacctgatgaaaactcttggccagtgccctgatctttagaattttcttctccatccaagacccttgaggtgagttgctttcacagcccaaaaaaactttttatggattagaaaactttttttggattagataggtatgaacacacttattctacaatgatgtcgaaacaaagagtagatattagcttcagctcgcaaaccttatttgttttcttgagtggtcttatacccaaccctccttaacttcgttgtaaatggttttctccacgcttgcttcacaaatcatgatcatccttacttacaatcattctcaatttcaccaccttcttctatatatatcacacacgaactaacataaatatattaaaacttaacaaattgactagaaaaaactttaataaaaatactttatttaccattttcatatgcttcaaatcctaataaccaactgtgactgtagattaatgtttagcatttttgggaacaagacaacgtctcaaaactcgagctccaaccataatatgaatgctaaatcaccaaaaacttcaaaattatctaaattttaaagtgagtttttgtttttgtccggctcacccacataaccatatatatatataataaccattaaccaatatatatggttatgtgggtaagattaagaataaccattaaccaatatatcagaaacaggattggaagccaaattggatcatggtttactatcattaactcggttggttcgaccgaattctataattattattaaaataaaataaataaacaaataaataaataattcatctggacaagtggaagttcggttagtgggacccacttttctccgtttacgtttttcatctctctcagatctgagaaatgtcttcttcttctcaaatcactcttcaatggcgatttcttcttcttcctcctctatatgtttcaaccccactcgatttcacacagctcgacatatttcatctccgtcgcgtctcttcccagtcaccagcttctcccctcgctctctccgtttctccgacagacgatctctcctatcttcctccgcctctcgcctccgtctttctcctctatgcgttcgtgattctcgaggtacatatactgatttactttcattgattgcctatctttagttctggtttaagaatgataatacttgtgtggcaaatttgggaatg

SEQ ID NO: 53421 - DNA, 914 bp, Arabidopsis thaliana landsberg
aaaaaataggaaaaacgaatacatggtaaataaaagtgtttttgttaaataagcactacgtttaagatacgcaaaatgactttattaaaatgcaaatatactcactttaacttcacattatgataataagaaaatcatgatttataaaccgtactatttaatacgtaaattgtatacgtatgcgtttcattagaaaaaaacttgtagaaatagaatactcatgaatgtataagaaatagttaaaataaattaaaaaggggacgatagcagacaattattcagaactgacgtatatatcggacatatgcaagtataatcttcaatacttgtgtttatttagattaaaattctatgtaggggatatagtaatttgagtgtaccaaacatgtcataacttattagcatatacccatgagcaccaacagatgactttgaaataaagtatttataatttcaagtattctctgttttgcaattggctaagaccttcatagttcgtacgcctatttaaagcctcacaaagacccaaacataaatcacaacctataaacggaaaaacaaaatcacaaacaaaaaaagaagaagaagaacatttatcctatccataatgttctctttgaacatgagaaccgaaatagaaagtttgtgggtatttgctcttgcatcaaaattcaatatttacatgcaacaacattttgcttcccttctcgtcgccattgctatcacttggtttaccataaccatcgtattttggtctactccgggtggaccggcttggggaaaatacttcttcactcgccggtttatttctctcgattacaaccgaaaatacaagaatctcattcccggtcctagaggggtttccacttgtgggaagcatgagccttaggtcaagccacgtggctcatagcgca

SEQ ID NO: 53422 - DNA, 549 bp, Arabidopsis thaliana landsberg
caggtcgactctagaggatccccagaccaaaataaaaattggaaaagaaaaaagacatagctgagaaaaacaaaggacagagattccctttcctgctctattattaggaacagacaaaaagttccctgggttcatagtacaatattaggaaacaggaaagcaaagaaacaacacaagaaattacaaggattctagccattggttcttgagagggagatagccattggttcttgagagggagataactacccttcgttctatggacagccaaggaaaattcttgcttgaatttaactctattttatgtcttagtcggatctattgcattgaaagtccagtaattttgtactctctactcaaaattttgaactacgagatattattgtaccttagtatattatatatcacgttctacgtttccttcagttgattgaaacatgattattttagttaattttcacgttgtcatgaatctcattgaaaagttttacatcttataccaggtttctgaaacatttgttgaatctcactattgtacaacaacatttg

SEQ ID NO: 53423 - DNA, 650 bp, Arabidopsis thaliana landsberg
tgcaggtcgactctagaggatcccctcggtggcaaaagcttcagcagttcagctcctcgttccagaatacaaatgcgcaactatataaaataccccgaacggaggttcaaacatcaagcgtttagcccgggtcacatcaagcgtttgactttcaagtaggagtatgaaatatagacccaaccaactgtactagattcgtctcactttttaatcttcggctgagaaattagttttataatccgactacatttagggtgtgtttggcatggctctgctccaccccagagcagctctactctaaaactctgggtggagcagctctgctccagagtttagattgtttctcataaccagtggcaatggcgggtaaataactcaaaactccatgactagattgcttttttggagttttcagagcagcaaaagaggtactccaaaaaattgtactacagctctaaaaactccatagagtttacaactctggagttagggtgtttggcatgctctggtcagctccccttggagttttgctctggagccatccaaacaggccttaatccccgaacggaggtcaaacattcgatgtgataggggctaattttacaggggaaacaaacacctctaaatgggataggaatatatgcgcgaat

SEQ ID NO: 53424 - DNA, 454 bp, Arabidopsis thaliana landsberg
ggatcccctgagcttctgtgagaccaaaccggatcgatctaaagcaaccagctaggaacgaaacatacatactctccaccatactctttgaaagcaacccctgttgatttacattgtctgaaaattagacttatatgaacaaagtttcaataactagcaaatatgatcattaaccttagtgatgagaaacttcagtgcccaaagaccaactatatctgcctttgcttcttccattgcagaatggacttcttgtagttcctagatcaaaggaaataccgagaaaacaaaggtaaattactagtcacagcgcaaacaatccttaattagatgtctgcattcttccaataagcagtataacctttctcactgttgaggtttgaccaccaggaagggttatggtatggggacaatgccatggcacattcatggcatatggtgtgagtgaagaagaatc

SEQ ID NO: 53425 - DNA, 510 bp, Arabidopsis thaliana landsberg
ccggcatgtcacgttctcgaaacgcagagccggtctcttcaagaaagctagtgagctttgcactttgtgtggtgcagagattgggatcatcgtgttttctcccgcgaaaaagcctttctcattcggacatccaagtgtcgaatctgtattggatcgctacgtgtctcgaaacaatatgtccttagctcagtcgcagcaactgcaaggaagccctgcagcgagctgcgaactgaatatgcagttaacgcatattttgagcgaggtagaggaagagaagaagaagggtcaagcgatggaagagatgagaaaggagagtgtgaggcggtcgatgatcaattggtgggaaaagccagtagaggagatgaatatggttcagttacaggaaatgaagtatgcattggaggagttgaggaagacggttgtgacaaatatggcgtcgtttaatgaggccaaagacgatgtgtttggtttcttggacaacaaagtgacagtccctccttacgtgaacat

SEQ ID NO: 53426 - DNA, 733 bp, Arabidopsis thaliana landsberg
tttggatcacactttaccatgtgtaaacgttttgatttgcaacctcttttgtaacatactctatcatttatcaggacaatcatccatttatacacaaagactattataaaagaaaggaaaaaaattcattgcattaccaaattaaaatatttataactaacacaaatctttgtattttattatctatccacaaaattaaagacaaaaccagtaattacaagtggatgttacaaatgtaaaaataaattactaactttgccatttgatctcataataatgccacacagactcactcattaaaacaacctttttgtaacataaagaaattactcattaggaaaatcatccatttatacacaagacaattataaaaagtaaagaaagataaatcattgcattaccaaattaagatttttataacttacacatatctttgtattttattatctatccacaaaattaaagacaagccgagtaattacaaatgtatgttacaaaatataaaaataaattaccaactttgcaagttgatctcacaataatgccacaccagactcaagcatgtatataaacaagcttttctctccaccaaatattccaacaaagaaaagcaactaaaaccctccatacaaaaaaaaaactatgatgtcgaagaagaaagaaagcatcggacgacaaaaaattccaatggtgaaaataaaaaaagagagcccaccggcaagtcacgttctcg

SEQ ID NO: 53427 - DNA, 612 bp, Arabidopsis thaliana landsberg
catgtatgcattcgactctagaggatccctaatcacaattttgattacatgattgttttattgacaaatcatatgttataacgtatatatatgtcggacgtaccatttcattggcgccttacgtttcaccttctccacctacatgatttgagatatgacaacaacacacacaccatacaaccacaatgcattgatagaaaacaaattttaaaaatgattcttaatctttcaagtaatcatttgctctgcctaattcattatatcaagttttattagttttttatgtcaataactcaatatccaatagctagcatgcattacataaagtttaaatagagatggtatacaacggcaaatcggcaatactaaaagacatagctagattacatgttttagtttttaaatattattttattaaacaaatatttttaataaaagaagaaatcattcttaaagttgtgttatatagctatacttttattttggacatgtatcgataaatgttatctatttgcactacagaacttgcttcgacttaaaaaccttcttcgacgatgcatgcttttaggctcgaggacaaggatacatgctcgcagccctttacacaatatt

SEQ ID NO: 53428 - DNA, 717 bp, Arabidopsis thaliana landsberg
tgaatgtttcaagatttgtatatcttatgacatgctcgctttatggttatctgcaaatggggtagttttatatcatcaaataaataagaaagttagaaacaattcatgaaagaaagatgcagcctatagtttatgtagagctttcttgggaccacttctcaactatcttatgttcttgctctaatcaactaagattgaacaagtaacatatataagagattagttcaaagagacaaaagctgaaatcacaaacatcaagatctttatttatcaataactataccaagatagtaagtaacatcccatagtacattttaaactattagtataccaatgtagtaacacgcaatgttttgctatgtactaatattaaccttaacaatgttatatctgacatctatgtacttaatgattctagggataaatgtttgtttccattggctcaaaccatggaatcgcggcattgagctcctgcacaggcaggcagcgatgcctcgggaaccatgagcgcgaatattttaaggtaacaaccagtacaacccacatctgatgtacccattgcgaaggacaaagagaaagatgaagaggacaggtccatgtgaaatataatagcttattatgttgattttacttacaaccattaaggttgcagcatggaccaagaaatataatagctttatgatgattttaggcaagttgctgaacttgattcctatg

SEQ ID NO: 53429 - DNA, 501 bp, Arabidopsis thaliana landsberg
tctgaggtcgactctagaggatcccccaaagagaataggggagagagtgagaattaatcaaagctcaaatgatcacaagaccctgcaagtttcaaatgcgctagcgctatgtctctcaaaacacgaatcggtcaaatgcggcacgggaatggctttgaatgcatggagatgttgcacttaatgtgtagtaggttgggaagggtattatgtattcaatgtgttggttggggtatttatagccaccaacaaccaaaagagctattagatttttttgcaaaaagtgctctgtgcagtggtgcacagaccgtgaatagtagtctgacaagttaccattccgactatagcaggtagcagttggtcccttgtgagacggcctggtgcgcgccatcggacagttcggtgccccagctccaatttccctgaggctggcttattcactataattcacatcggaccaagcctgtgcacaccgaaccagtctggtgcgccattcggtgttga

SEQ ID NO: 53430 - DNA, 632 bp, Arabidopsis thaliana landsberg
gcaggtcgactctagaggatcccccctggcccgccacggcgacatgcatgcgaatagcagcggccgttttttacgtcgcaactctcgtcagtttctccgtgccgagggccgcccgcccgccctgcaatggcatccctatctcgttttccgagatatgtttgaagagcaagcaggattattatgagctgcaaacgtggtgggatccgcctaaagcaaccatcaagcatgagtaggaagactcatgaggcagctctacatatacgtcattatttgtcgttccatgtaatatccatctatatcgttgggttaatattagaatgtggtagttttctagaaaaagttttaagtacgtatgtgtttcttgaaacgctagtagtagtttagttttaaaattcttagctgggtgacggttgtgtttgaaaaaaagaagaacaaacacaataggaatcctcaagatccccgtcggctaaattaattctcgtcggtttattccacaacagcggtgattaaattaggaataaaattctatgcaccgctgacgcacgacgtcaatctgcggcaccgtttcgatgcacgacacgcgtccaaaatcaacaactaatgatgcaggttaacaagcagctgatgacatg

SEQ ID NO: 53431 - DNA, 687 bp, Arabidopsis thaliana landsberg
  unsure (1)..(687): unsure at all n locations
tgcggcttagatgttggttttgccatcgattttgctaccggctttgatactggttttgccttcggtttggcttttggttttgatgttggcttcgctgccggttttacagtcgtttttgatgttggctttgcttctgacttttttgtcggtttagatgtcggttttctaactggctttgctaccgactttgatattggttttgttgttgactttgatattggttttgccactggttttgttgtcggttttgatgatggctcaattgttggccttgttgttggtttacctgcttctttggatgatggtttagctattgattttgttgttgggttagatatcggttttgttacaggtttattcgttggtttagttgatggtttaactaccgatttagatgttggtttagttgatggtttagatgacggtttagatgatggtttagatgtcgatttagttgttgttggctttgttgttggttaacctgcttctttcgatgatggtttagctatggtttttgttcttggtttggatgttggtttagttatcggtttggttattggtttagtagatgggttggctgttgatttanatgtcggtttaggtgttggtttaacaatttaaattgttgatggtttagatgttggtttcgatgatggtttagatgctgatacagttgatgtttagatg

SEQ ID NO: 53432 - DNA, 1087 bp, Arabidopsis thaliana landsberg
ccttacagcgcatacacagcagaaagtttatcgttgcttataatatattttcttcctttttaaatggttgaaattcatcataaatctcaaaagtgtaacaaataaatggtgaatctctctaaatttcaattattatttctatgatttggttacctttgagcactcataaacgttgtttagtccaagttttgagatccttatatgatagtgtttttcatgattcatatttttttaaaaacgaaaccctaagtttgagtattttcatagggtgtgatatttttgtaaaaactttcttgtaaccctaccattgaataaacaaatacaacttttgagctggtatttacgaaaaattatctatgtttggggtttgcttggaaactaccactacaagtagtgttttgtatgatctcgcgaggaataagaattaaatcggggcccaatacatttctgtgattatattccaatgtcggatttggtagggaactaagcattgaaaacctttgtttttctcttccacttttgcctaaactcaacataaaatgtatgcgacttaaaagacaagtgctccaaaacatttcttaacaggattgatgttttaaacttaatatataactaaatatcccaccgtgacatataagaaacaaaaaacctcagtctataaatatattatagttagaattatggagttatggatatgaacttcaatttatcgtgtgattttgtaaccacatttgttaaacgatgttgggggctaatccaaaggatatgtcgaagatgtgatcgccagtagccggacataagactttagctatgattgataattgatagattctgggtataggaaaattcatggtaagctataaatagttttgaataaataaaacaagagaatacacaatattgacaaagagtgcaagcataattttacgtacggggttgccgccagtatttactaaatttaagaatgtgcagatcttttaactcggcctggttttttttttttaactctattttttaaacgaaaccccatgcattcctgaaaataggccacaggttttttttttttaaaccaaagaatttttttttt

SEQ ID NO: 53433 - DNA, 165 bp, Arabidopsis thaliana landsberg
gcttctgtgtccgtcgccaccgctgcggttgcagtttagggggtccctgtggcgcacctgctttgccccagctttcgctacgggtaccgctatttcatgattggttcgctttcacgtctctatatagaacatgtatagtaatgatgaagggtttgtgtctgtttt

SEQ ID NO: 53434 - DNA, 1230 bp, Arabidopsis thaliana landsberg
ttttgtatgctctgaaggaactcctgcggattgcactggtttgggcttatcggaagcactctttccttctcgtcctgacctggtaaaccatattatttgtgtgtccctgtaaaagccttctgatgtaatgttagttttaaatgatgtgccgatagatctttcgatttgtttttaataacttaaacttctgcttaattttataggaaacatctaagatttgttggtctttgtagtgttttttttccttctattgtcttttctggagattgtgaatttgtgatgtatgattgttttctccatgcaggttctgagtggtataaacgtgggtagcaactgcggttataacatgtcggtgaacatttcctcctctgtttctctttgttttggtttcctatttccttactatgttatgtttttgtacagattattagggtgcaactgttatttgtccgttttaaaaattgcattttaaactttataaaactaccaaaattgctgaaactttgtttaggattagaacaagattttgagagtatagtaagagaaactctagttagattgtttcactggaaaccagatttcttctatggccaattcaaattgttatagaccatgttatgcttctatggttcctgcctgagtttatcaaactagcacttacctggctgttaattccatcccagcgtctattctggaactgttgctggcgctcgtgaagccttcctttatgatgtgccttctgcctccatatcatatgattttgattggtaagagcttaatgtcttacttgcagagattttgcgtcttacttttaaaaagtttcataacatgtttgttatttcttctatgtttgtgttacactcctaaattttcttaagcctccatacggttttattgataccatcttctctttttgccactaaatgtcttctattttattcacccttaatgctataggaaacgtggagagatgaatgctaatgattttgccctttctgcccaagcttgcttgcccattattaacggcatactcagtgcaatcaagaacaaaactcaccctatgcaatgctttctgaatatcgatttgccgactgatattgctaaccacaaggtaagtctcgtggcagctttcaacagacattaaataaagcctacccctaacaatacctgtgagttttatatgtatgaaaattctttccaaaataaaagggatacaaactaactagccaa

SEQ ID NO: 53435 - DNA, 1089 bp, Arabidopsis thaliana landsberg
  unsure (1)..(1089): unsure at all n locations
gtcgagtagatcgactctagaggatccccatcaaaaataaaatgaagtatttgactgccaaacatgatatgtcctccacttcctgataatcaaatttatcctaccataaatttatattaagtttgattaatggtatttttttatcaataacattgtactctgttatgcagatttgagtacagataatgatattaatattaagagtttaattaggatacgtatggtttaaacgaagccaagattgtttgtggcggttggaagcgtcagcagcaaagaaaaaacgaaggggtaatttggtgcgtggcggctgaagcagcagcggctcgtcaccgttcaatttggttttgtgattatgactgtggtccccacatgcgtcttttatggttcccgcacgattcccctcgggaaggtcttctacaaatctacgacagcgtaattttttgcgatttttgttttaaatttttcaaaaatatacgacgtcgtttcttggtttttttttggctatcgctgtccttagtaggaaacctaaaaagggtccacgtacgataaaagagtggttcacgtttgcaaatgcagcaatttcgttagattttgtttttactttttctaggtcaattgtattatttagattctctaattccttttttagatttctatttacttcaaaactactaatagtattcaatttcgtaaaagtacgttaaataccatttatatgtcaggtaaataatcgctttgcgtaattcaacatgcaggtgaaatttcccccaactttaaaatcaaatcactaaatattgagttaaaggtgtatattgtagaacaaattaatatttttgaagataactgctgaagtttatgtcactgatannnnnnnnnnnnnnnnnnnnnnnnnnnnnntccaatattatataggtgtagtcattgtgtagaaaaggtattattaaaagcaagatatttcggtcaattaattttaaaaattttgtgtcttcagaaactttgaaatatgccttttcaaaaccaatgattgttacagttatttttacaatatatccaaactactatttatgtaggtgcatcagtgcatgctta

SEQ ID NO: 53436 - DNA, 971 bp, Arabidopsis thaliana landsberg
tattttttagaaattttgttagtaacgactgaatgtagtgcatcacattaattgaaaatgaatttatttgactatcaatataataataaatgtgttagtatctttgatttcgataaaatccacaatatatacatgagtgatcagtgtgtattgtgttgttggagactgaaccatcaacgctttttcgacacttcttcttcttcctcctttctctcttcatgcaaaatcacagttacaagaaataaacaaaagattataaatcaaaacataaagagacaaaaatgagtgatggtcgagttaacgcagatcctcaacaagaagagaacatggttaaaccaccggttaagagatctctcactctcctcatcgtgacttacttttttctcttcttcggctctatcgcttcgagccttctcgcgaagtactatttcgtctacggtggctcgagccggtgggtctccacgtgggttcaatctgctggcttccctctcctcctcatcctaatctacttccctcactacgttctcaaaaccaccactcgccgtcctttcacgcgcttcacgctccgccatctcatcttctccgtgttgatcgggcttgttctcggtttcaacaacttcctcttctcatggggaacctcgtaccttccggtgtccacgtcatcgcttctcctctcgacacaactcgtcttcactctcattttgtctaggatcattgtgaaacagaagatcactttctcaaacctcaactgcgttgtcctcttgacgttaagctctgttttgttggctcttgattcgagtaaagataaaccgtccggtttaaccaaaaccaagtatttcatcgggtatgtatccacgatcggagccggtttactcttcgctctttacctccccgtgacggagaagctataccgtaccgtttattgttacgcgatggtcatggaggtgcaactggtgatggaattcgcagcg

SEQ ID NO: 53437 - DNA, 254 bp, Arabidopsis thaliana landsberg
ttttttttttcagtgtaatgtatgttgatagcaatatatttattggagacaaacgagggcatgcagaatctgctataaattacagatgattaacgacaataccgatttaaaaatcattcactcccaccagcggttcaatattgggaaatcatttaaggatattataggttatccgcatgaagagtggacgatccttcaggtgctcagatacgatcgtgcaacgattgcgctttggtgtacctatgttcagttaa

SEQ ID NO: 53438 - DNA, 1176 bp, Arabidopsis thaliana landsberg
tcaccaaaacccattaacaaatccatttcaatcctcaacatgaattctcatcgctcgaaccacacaacgcctccgaaagcaaagtcttctcctttcccgaacgaaccaactcgatctccaacgaatctttcgcctggaagagagattcaatctgttgtctcttctccatagtctgcttcagaagaatcgcattgagtgacttcaaattctgaaacttttcctccgatgagtcatggtcctccattgatgactcacgacttagcttcgtcgatttctggtaagtgactggtactgactgattctggatttgttgctgctcattggaagctccattggagttacgagacactttcttcttcgccatttgaacggaagtggcggctgagattttagggttttggttagggtttggggatttcacaagtctcagggtttttgttgctacggcttttaacggtgtgaagcgagagagaagactaaactaagaaacgaagttttggggtaaattttaaaactttcaaactttagggtctaattttgaattgtttttgagagcttttttgagagctttttgattcagtgaaggttatgatttggtttacactttcttatataatagttagacaccacagtgttgttatttctaattaatgcatgaactaaaattttgatacgtttcattttgatatattacataaagacaaatgactataattacaattgctcaaattgtaacatatatctataattagttaaaattttgacagctgtttaaaactaatcattattttttaactaaaattaggtatatgatattttgaccccccaaaaaagatatgattattagaaaagactaaaattagatatgtttctttaaaaatcttgggaaaataaaaaatataacataattacaaataattaagtttggatacatatcaatagttgattaaattttgacatatatagttaacaatataacttttgatatgtgtcagaaaataatattatatatagacatattaacaaactaaatgttattattaaaatagtgttaagtaaaaattatttatttattttgttagaatttaacacttgttgtgttgattggaaaatttactttctcgcactaacactttgaaaatcttaaaaaaatattacggtaatcgtggaggtctt

SEQ ID NO: 53439 - DNA, 611 bp, Arabidopsis thaliana landsberg
caggtcgactctagaggatcccctactaattgaatatcttcattgttctatagcactaaaagtctgaaaattgggggtaggagcagaacagacctagtattgtgaaggcctaggagcaagaggctaaattctcaaatgctagaactgaatagaactatagaactcaccaagatgctctgcctatgactcactgagtgatgagtgcactgaattaattgaattagagatgccaatagatgaaccaaagacgatccagaaaggaaatgggacaaatcttcaacaaaccgttgaacaagcaagctaagtggtttaatgctaactgaattgtgcatttttcttctacgcatagacacatgaaaatagcgaggatattgtttttcttcagccattggacaacgaaatctacattttggtgaaactcgtccttacccaatatttgattcctcggcttcaagcacaggacagtaagagagactatctagaccgtagcagtggaagtggagttggattgtacggttgtccgaatgtgaagctgacgttgtcgcgttgatagaggaggaagtgccgcgtgttggggaagcggccaccggttcgagtggataggcggcgag

SEQ ID NO: 53440 - DNA, 990 bp, Arabidopsis thaliana landsberg
tctaacataaactcaaaagtttaaagcaaaaagaaatctcgctcttattctctgaacaaagttcagtttcacttctcgacaaaagacttgagatccttgagccattgaagatactctctgctatctttgttggccacataatctgccagaaaggtagtgaagcttggtttaatacctctgatctccaagtacctgtggaaagccttctgcaaattctcatccaagtcactgcacataacacaataaccaaattcaatcacataacaataccccaatctcatatattccaaacaagaactcactatcattgaagtaaacttactcaaagtcaggtccttcgtaagcaaggtcattatcagatccttgcggttgtttgatcgataaactatcaatcacaatctcatccgggtatgcgctgactccaaactcaagacacacaccatcacctttctgcacactaacaaccatcggaacccggactttacccgagctctcttgatcttcatcgtcttcttcattgtttggttctgcttcctcttcttcatcttcatcatcataagaagcaacagagtcaacttccacttggatggtttcatcctcaaatttccttgtcagcaacacagttctctcccctgaattatcaatgatttcaaatggaaacccttctggcttatcttccaactgtttttccaaaacatttctaattcagatacaattgttctaaaccccagaaatattcaaatctcatgaattcgagaagaatcatgtatattgaaagagagaacttacgaagtcagtgtcatgaggagcctcctctgcgacggcgcattcgatttcagattcgataacgctaacaagattctcgtcggcggttgttttagagatcgcactttccgtcgaaaagctcgagaatgagaatgaactaaccgatccacgcctgatctggtggctacacgaatcagcctctcggcggagacagcgccactgcga

SEQ ID NO: 53441 - DNA, 1216 bp, Arabidopsis thaliana landsberg
accaaaacatttaatttaattggctatcttgtcaaaaagaaatttggcggacggaccaaaaatacacgttaaaaaattgaatgttgtaattttatatcaaatttaaatttaaattgggtgatttgcaaaattttgtcagttattacgaggaaatggtagaatatacctatatttttattagtaataactgaactttattttgtagttatgtcaaaaaaagttatttgaccgacatactttaaaaacctttaaaattaggattttaatgttatactaaaatttcacttccaatatattataggatgtcaataaataagatagctacgtttatagaatattttgtgttgtttcatatataatttttattttatttgtgaaagctaaagagtacttaaaaaggtttacatttattcgagaataaaaaggttttcatttaaaagtcgtcggtggaaaagtcatcgctagctttgaataatttcgagtaaatattgattaaatcgaaacagcaagaagtaattgcaaacaattgaaaatattaggggtccaaaacgaaataatactaaaaagtaaaacacgcgtacctttccactgaggttgcttcttgagccatttaacaagttccttcccggcggcgtctctcgcagcaacgttacgccgccgtaaatgtcgccggaaatcgaggccagcataataaggtacgtaaatagctgaagccagtgaagaatttctcgtcaagcactcgtaactcttcattttctcgtgaaaaatcacttcgagcatgaactgattagtagcgtaccagctcggagagtagtcagaacttttaccgccgatcaaaggtccgaatccggagttgtcgagatacttacacatactgattttgtcctttggtcttgtaatagacttacaatctttgatgatttcaagattgaatcgagaaggtagattgtggatatatatgtagcgtccgagacacgtatcgtcctcagaagatttgtgactgcgttgatgatcggttccagtggtggctgtggttttggtggtggtgatgagtatgattttgtcttgggagagacgaaggagaagcagagagatggagagaagagaaaggaaaagtaaaagagtggttggttttttcttccatggatgattctcgattgaaactgatgaattgttgttgttcttcatggtgttcttgatttgatgatccatgtca

SEQ ID NO: 53442 - DNA, 578 bp, Arabidopsis thaliana landsberg
tagaggatccgctcttaagtgaatcttgcttgaacgaggaataaagcaaggtctcatgcagcgaattgtgttatttgttattttcttttaattctatgacggaaaaaagtaacaaaactctaaaacctcactactcggattgataagtccacatgaatgtatattggatgttgtagagtagggatttgaattaccttgttggctcagtgccttataccagagtgcctcaccagtctatgccactgccaggatgcatgacacctgatgcaagaatgaaaaagttaggaagatctaagaggaaagggcaagtggtggagttagatttagatgggaggctgtcaagctaagaaagaaaatgattagtgtaaaggagtgtgggacagtggtaggatccttgattctatcgtggttgcaaagtgtgtaggaatgtgagattggggtcgaggtcagaatttccggcttcggaaaggcgttgtggtggtgtgggtgtagagcggtggagcacaataagcgagggagagagaatgtgcagggaaagccttgaagccagtcaagatgtttccttgcttgaaacgttt

SEQ ID NO: 53443 - DNA, 1051 bp, Arabidopsis thaliana landsberg
taaaaaataaggttttgttaaaaattctcatagtgttttaagtagggaaccaaacatagtaatgatgatgacatcatcatcataataatcactagtgaaatgatagggacaaaaacaataattttggatctcgagattgccagcaacgaatcagctgtcctattgttttggatatgtcgggattttattgtaagattcacattgcttggatatgtcaggctatttagcagtcgggacatccggaacccgattcagaagagaagagcttgcatcagtatctcaatttcaattcaaacatgggtcaaatcaagtcttaatgacatgtgtttttgtccaatctagggtcaatgtacttgaagccagctagcaaatatacaacttgcggcggaccaagttcattaattctgatttttggttcctaatttccctggcaaatgaagtggacatatctaggatcgggggtagcactattttgtccatgcttttgtcaaaacaggcatattcaatatcccttacaaaattgggaacttctgtatctctcgcttttaccatttcaccctttcttctttgttccccaaaatcctcgcaaacagttagcctacttaacagtgaatgtagctttcaagcagccactgtttcaccttcgcccacagtcttcccaacactccaaatgcgttccaaatttcccattccgtcattacttgattcttctctctctccaagcttacgcatcgacttgaaagaactctctgttcggaaataggttctcctctcaggtttgcttctcttttagtaaatcctgtttgcttcttctctaatcatacgaatccttctctgtctattccctcaatcccttccaaatcatattgcgtttacacatactctctgtcctgatcctgtagcagctttcggagcccattttggaacgcctccatcgggaatagcttcttcttaaaggtttggttctgctttacccaaatgttcttctccatttggatacaaaattcgaattcatgccatatattttccgaaatccctttcaaatcatatt

SEQ ID NO: 53444 - DNA, 611 bp, Arabidopsis thaliana landsberg
tcgactctagaggatcccccaatttagtccaattataaatcaaaatccataagaaaattgatattaattaagaacaagaggcgaaatgaaatcacccttaaacaaatctcgcgtgacagttatctagtacaatttaccttgtaaatcattgatgattgataaccaggtgagtcaaatatgcaaaaaatatgatatgcagtgaccctttaaaaagtgaaaattaaaattaaactagctcgttgaataaatgatgtatatttgatacataaaattcttcttaaccaagcaaatataatatgtggctcgttgacattcgctaaacgttcctgcacgtctaaaaccagtctcgtgtcaacatgcttccacgatttagttggatgaagtccaaaacaacaaagaaaaacgaatagtctagctgcatttagagaaaacatttgctatataaactcatgcgcacattctgttacaacacaaaccaaaacaacaaaatctaaccaacgtagtaaagcgttggtacaaaaaaagcagaatcataatgagatcttcttctaagatgggggcttcagcgatctcatttccgctctaggaggtatcacatggcaacaatgggt

SEQ ID NO: 53445 - DNA, 473 bp, Arabidopsis thaliana landsberg
cttctcggtttctgcggaacttcaaccggcggaggtgggggaggaggtggtggtgttgccggtagttgttgcggcggagaagacggttttacaacgaacgtatcaatctgaatctctttaggctcagattcttcttcctcgatttcagttttagaaagattctgaaattgttggtaagaactcgaatcctgcgatcggtacttatcgatttcgaaatcatcataaaaccggaaccgtcgatcgccagtatctctaaaaactccttgtctgagatcaggataagagctactactacgcctcaacggtacattcccggtaaccggtaatccatgagaaaaacttcgactacttacactctcatagatcttaagcctatcagaatcatacacgtcatcaaaccactgctctgacaccgtcgacgacgaggatgagattttgctaatctcaccgacggtcatttcaccattcgtaac

SEQ ID NO: 53446 - DNA, 616 bp, Arabidopsis thaliana landsberg
  unsure (1)..(616): unsure at all n locations
caggtcgactctagaggatcccctgtaagaccttcaaatgtttgtgccttatggatcatactttatttgaagaagttgcaggtgcaatttagtgagggaaagcgcagatttcactttgaaagtttctgaactaagattgctgatttcttagatgtggtggctgattcttgggtgcagccagttcagacctcttgccctctaaagcgtgtatccttgaagcttcgaagattggccaggtccttgcagtcctgggggcacaagaatgcaggcaatgtgaaatcccaattggctttagcaaaggaaatccttcacagactcgagatggctcaggatagcaggctgctgtcttctgaggaactatggctcatgaagaggcttaagcaacattttttggccctcgcttcattagataggacaatggctcgtctcagatcccgtgttagatatctgaaggagggggatgcaacacttcttttcccacttgcaggcttgctaccgcaagaaaagaaacttcatctctagtttgacagtaggagatcaggtggtcagtctcatgagcagaagcatgaagctttgaatgattctatacgacctgttgggggtggctnacatagag

SEQ ID NO: 53447 - DNA, 595 bp, Arabidopsis thaliana landsberg
aatgaccatagtgatgttttctgctacgatattatgtgtcatgatatatttttaacatatacaagtttctagatgctttcttatatacaagtttgctacttctccattgacttacgatcttatggtatgaggcgcgaattctcttttatcttttcattttttaaaattaatttttcaacttttccttttttttttcttttaccactaccacaattatttctacaccaccatattgtcatcaccatccctgttgcaactgcccatctaccaccacagccaccatcaccatcgtcacaaccatcgtagctggccaaccgcaaccacaaccacaaccaccacctagctgttaccaccacgaccactgcaaccataacaaccatcaccactaccacgtcattaccatcaccatgatcgcaacctccgcgcgcaaccagtacctccatcatcattaccactactactacaatcaagaccaccaccaaatcatcatgaaaaaagattttaacatggaaagaagccttttacttatcatattttgttttcttgtttatatatgcttttaaaatccaaatcatgatacaagtagaaaaaaata

SEQ ID NO: 53448 - DNA, 745 bp, Arabidopsis thaliana landsberg
  unsure (1)..(745): unsure at all n locations
agtagcaactggcaaaagaaaagaaatgggcataagacatcaccagggaaacgaaatccctgacaatttttccattagagtacctgttcccaagattgacaagtccggtatatccaggtccaaaaactggcaccaattcttttccactctcttgtatacggttccaatcaaaatttgtattttgatcaagttctctttcagcagttgtcatttcagtctgtgaaaattgtagcaaacatttcaagaaagttaacattattcagattaaaaccagcatgggatatctttagcaaagatgatgatcaaggcagtacaaacaagaaaacaaatacaggtgactataaaacctatgctttgggaaatgaagcctcttaacttaagcagtacatgcagcaaggaaaaatgaggaaaaaagacacaatacagtttactattgtaaatgtttacatgtgacgcaacaattacaagtaaacagactgaacgcgtgaatgggaattattgtctcaaaacgacctgaaattacattctccaagtgcactgcgtctttttaatcgcaattataaaaaagtacgcaataacactgatgtgagtctacttgctcttggtaaagaaacatttagtctcagacatattccatgtttctacagttgttttgtggcaattgatactgaagatngaaaaaaacncaagacataagctttctagtacaaccagcacttgcgcaatgcaacccaaaatgggtatc

SEQ ID NO: 53449 - DNA, 580 bp, Arabidopsis thaliana landsberg
tcgactctagaggatcgccgtagatttgctcagtggaggcttggtcagtaaatgagccttgttttatatatctctttcaacatgaatattttttcgttcattttttagttatgcgaatgacttgtgttgggatctggcactaggaaggtaggacactcgacaaaattaacagcgggtggatgacattatttgcttaaggtgatttgccgagttttcttttgcctgacactagataaaccacatcattatcgagtgtttttctttatctaatgctaaactatatttgtgaagtatttttctttgcctatgtactatgtagcattcaacaagaagactcattggctagtgccgtaaatttagcacaagcaaagctctccggtagtgattaatagttaatacggtcgaggactcgagggtaactgggtaactatcgataagaaccggctgcacaggaacccgctagcggagtagcggccacgttttacctctcaccgatcctctcccctccctacaaaaagctagcagagtagcggccacgttttaccgtctcacatccgtctcccgtcctacaaaaggagac

SEQ ID NO: 53450 - DNA, 553 bp, Arabidopsis thaliana landsberg
ctctagaggatcccccgcaacacgtattaccatttaccaacttgcactagtctaatgatattgtgatgtattagtcgagtgaagggagatcatttctataatacaaaaagttaacaccagcggtttggaattatccagagttttagtttgttgaaaagttttagtgtaactttaagcctcaaaatcattcgtttatggtataaaagaacacatgtacaaattaatttggcaacgataaacagatggctaattaattgtgtgggtttcaacagtgatcagtacaattgaaatctgatttaaacaaacgagtttactttcgtaaatccgattcggtgttcgttattggtgatcaaccgtgagattctctccagtgttaagcgtgggaatttctatcgatgcttctctttggtttgccttctttttctttttaatgcaacacaacagagagaacacacggaaattaccaagattattacaccgcagctaatcaccgaagcaagaatcctctaaacactttacctacacacataaaacaaaactctatgttataaag

SEQ ID NO: 53451 - DNA, 358 bp, Arabidopsis thaliana landsberg
gaactgaatggagaaaaatgataactgaccatagccgttaccaaaatctagtattcacctggttatcctagattgcgcgccagattgatctacggacaataatgggatgaactacttttacaagaagccacgaaaaatgttcttgaattgactggccgggcgaatactatacgacttcttgaccgacttgctagacggatatactgtatacagattgcgactgttctatggatcaaatgatgcgaataggctaatcaaacatttgaacttggggatgcgtattgaatctattcatacctacctattgatggggttgaaaggcttaaactctggctcttcgtagacacataatatggac

SEQ ID NO: 53452 - DNA, 1010 bp, Arabidopsis thaliana landsberg
gtaggaacaccccgataactccttccatgtgttttcaacagactccatcttcctaatgaggtaaggttcctaaatgtttcaacagacaaaatcatcgaacaattctgaaacttttgaaaaaaaaatccaacattgggagaactagaatcacttacggccatacaaacgagtcgtcgagtcctgcgagaccgagaaggcggccacgagactagacaaactccagacggtgactttctcgaacgtaaagtgaatggtgacgagtgaagatgaaggaaggctcgagccgttggactcgtcgtcatcgagctattcattgtctagactctagagagagaggtggaagaagacgagtggcgcgggagttgctggataaggaagcctagtttagatgatgagacgtgtttggctattaggacaaaactatcctcgccaattatagaagaaacccttttatttattgggcctttagcccatactaatttacattctcggttacacggtgtaacttacacctgctagtaactctatgggcctatggcccaatatatgtgaagtcaaaactgattcgtcgcgaagttgagtttttgttaaataataaatcaattgaatcgcggtactcaatttcttctcttcctccggcgacgatgtcgatttacaggatcgctagagctttacccttctccgggatcttaaggtttctccattgttttcttctcttcattgtattactgcgttactattgaagaattgactgataaaaagaattcaatttgtatccaatctagagctttttaggttggttaatgcttgcatcgtatttctccgtatgacaagagattacacaataaaagatttgttttttgtgtgtgtgtttatgttgaaattctaaggtttcattttgtacaggcagcttgagaaagaagctgaaactgtgatcaatgttctgcaacctggacctttgggaatcatagagcacaagttctcggctcaagagattagggaagcaagag

SEQ ID NO: 53453 - DNA, 619 bp, Arabidopsis thaliana landsberg
gctgacgtggaggtggagtccgctcgagctagctcctgctgagactggaggaattgaagctgctgttgagggggaggccacttcctcaagggaggctccacaacatatttagcgccgtcacccacctcagcagatgatcggggagcttcatgagcgagtcactcgctcgaggtcacaacacatttctcattttgttcactcagcttttgttgctacttttcagccccaagatgttggacatgctttatctgatcctaactgggttaatgctatgcatgaggagcttgaattttttttaaagaaatcaggtttgggttttggtgccacctccttctaactgccatcccatcggtacaaaatgggttttcaaaaacaaacaaagtgaggatggtttggtagtgagaaataaggcgaggttggttgccaagggtattgccaacaagagggaattgattatgaggagcctttgctcctgttgcccgtttagaggccattaggatccttttagcctttgttgcttcaaagggttttaagctttttcaaatggatgtcaaagtgcatttttaaatgggtatatagaggcagaggtatatgttaggctaccccctagttttgagag

SEQ ID NO: 53454 - DNA, 710 bp, Arabidopsis thaliana landsberg
aaaggacataaaggaacaaaattaaatgcatttaaaaaaagaacaacactagcataaactattagtgggggtaattttgcgtgtctatgttgttaaaataagagagtagcttccccttcttaaccatgaagtaaggaagctcgacatcagtactaggttttgcagcggactggctcgagctttcaagtgtgtctcgaggggtaacatcaacataacggaggatgtcattgtagatgacataagacccattgtgacaacgtgtcacatagaaaaattgcaagaacttcctctctgttttgtcgtctagagtcacgaaaccgcaaaccatgataaacattctatctttaaaggatctgctgatctgataatccacactattcaatataaaattagaagccctcttatgctcatttgagaccctcttgttgattgcctgcaccaaaaaactaaccccttagatttattccactaaaatttctctagaaatacattggaattaggaacttttgcaacttacatcgaggccaggcatctcgaccattgttctaccagaagtcgaagtcggtctgctcataatactttcattgacatacatcaaaccaagttcctcacgcataggcaactcgtagtaaaccttgacaaatccagctgcaaaatctgcttatatatatagtcacaccaaaactaagttagtaagttttgtaatctca

SEQ ID NO: 53455 - DNA, 324 bp, Arabidopsis thaliana landsberg
  unsure (1)..(324): unsure at all n locations
agtgatttcgtagcggtgccggacagtaccgagacgaacaagaactagtcgaagttgtcgagttcttatcagatgccatacgattcgcaaaactaggtgaccgtagaccagcaggcgtgcctttggagataccacgggggactgtgaggacacagctatctcagtcatgccgttaaatctcaggtgttacatgcacaagaatccctggaacggtgatactgagtatggcggtcatatgacgaacgaannnnnnnnnnnnnnnnnnnnnnnnnnnnnnnnnnnnnnnnnnnnnntatcaggtacgacgaatgtactcgacagatt

SEQ ID NO: 53456 - DNA, 924 bp, Arabidopsis thaliana landsberg
tctaacccctacagatgattaaatcatttaataataaactcttcaattattaccttaattaacaaacaaaaaaaatacaatcacgtatatatatatatatttttatcgaccttaccaaacatctcctctctcatgaacaatgacggtagaagaagatcctaaagcaactccgtcattaccagactacaagcctttaccttcatcatcaagtcacgagctaaaagacgccgttctgatctcatcacatccttcttctccctcacgacgccgtttcatcatctctatatttctcatatcttttgcctcgatcctcatctacatcttctggccgtccgatccacgcatcaagatcatacgggtcaaaatttcccacgtgcacgttcaccgccgtccggtgccgtctatagacatgacgttgctcgttacgcttaaggtatcaaatgctgacgtgtactcttttgacttcacggatcttgacgtcacgattgactataaagggaagacgttaagtcacgtgagttctgatggcgggcacgtgacggcttttggttcttcttaccttgacgcggaggctgagcttgacggcgtcacggtgtttcctgacgtcattcatttgattcacgatttagctaaaggctccgttgaatttgacaccgttacggagactaacggaaaacttggcgttttgtttttccgtttccctttaaaggtaaggaacttgaattttactcaattattcggtttattaaactttttactttctcatcattttaatttgactttctagattatatgatcatagaaaatttatatgcagtttcaaatcagattaatggaattttgtttataattatcttgatgaacagacaaaagtggcatgtgggattctagtagatacagttaatcagacgatttctcgtcaaa

SEQ ID NO: 53457 - DNA, 326 bp, Arabidopsis thaliana landsberg
gactctagaggatcatcgtgacatgatttatttcgctctttattctcaagtaaagggtgagtcccatgagctcgttaatgcttgacggtctcacgcactaatccctacaggcgagttgccatagtaggccggccgcgctacctaggtggatcagcatatcggtccctaatccccacaacatgcgaggctgcggcatatagtggaaagcctggggtaccgaagggatgttctaactaagtgatggatgtgttggctcactgcccgctttcgagacggtaaacctgtcgttgcacatgcattaatgaatcggccgacgctcagggagt

SEQ ID NO: 53458 - DNA, 438 bp, Arabidopsis thaliana landsberg
tattgttaatgtcgccatatataatgtcacttgtctatctttgacaatctatctatatgcgctttgccatgtttgctgatcttggtcacttcaattacgcagcaattcaggttagtttctactttagcttggatgatttacttattgttatatcgccacaggtttcaataaatctttgttttgtttgctgtagattgcgtttaccttcctggtttatccggctcttatattggcatacatggggcaagctgcttacttatcccggcatcaccattctgctcatgcaattgggttttacgtctctgtaccaagtcagtaatttgccttacttcaagaactcaatttttttttggtgttgatcattgaaaacgtaatctgatcttttgtttatataactccatggttttgaacagaatgtttgcactggcctgtgcttgc

SEQ ID NO: 53459 - DNA, 593 bp, Arabidopsis thaliana landsberg
tcgactctagaggatcccctgcacggccgccgcgacgttccacgctgatcccaatatgcatcgaacggtcgaagcagaaatgccaagaatgcgtgatgaactgatgatgggtggcaacgaaccctctcgatttgagacacgaattagcgggactagaaaaacaaaccagctaggcctgcaagaacgcggtggcgacgtggtcgtccgcaccacacgtccacctcctcaagtctccggcttgtgcagcgggggcgccgtagccatcggggagccaacgacggcaagccgtcacacgttccctcccggcctcccctgaccgggccacgcaccgaaccgcacccaactaatccgccactcatttcccacgcgggtcggaccgacatgcaaagggctcaggaactggcaatcggggagggtcaacgttaatcagccgagcgttggccgccggggacctggctgcgacgtgactgcgttgttgtgcggtggggtgggggagctcgtacttcacgccgccgccccctggaccctggttgtgtgtgtgtgtaggtgagcacctgggtggtgttgttggcgggtcgatttcacccagaata

SEQ ID NO: 53460 - DNA, 901 bp, Arabidopsis thaliana landsberg
gggagctccatgaactacaaaaaagacacacaacttacaaaagcattaacatcgaaatcagactcataagcattaaggatctttgtccaaacttaccacttgcaggagcaggtgcaattggatgattagcttcgtcatcatccaacattcctagttagtggtcgtctcttcaggctccttgtactagaagaggttgttctatacaacgaacgtaccatatgattattgatcaatacgaattcatgtaaccacatcatgatcaaactttccaatattggagcttgagagatattccccttacaatgacgtcccatatgtgatcaggacgaaaaatgattccaccacatgatgtctttcagtctttgtgagttctaaaccgcaacgataactccagccatttgctaattgctaccgcttcttctttgatgttttagccatattgtaatttcggttcatgattaccgaatttctgtgcttcctcttatcgagccaagaaccgaaatcaaaccaaattgaacaaactttagttcggttgggtccagatgtccagactagtattgcttttcattgatttctcgtgccattctctaaaagattctgaaatttggcagccttgtccttgagcctcttgtcttattggtactttttgggtaaataaacgaaaataccaaatttgtagctttctgttggagttaaatcttaatatcgattttgaagattaattgttttacgtctgtattatatatgcttcttgtgtacgaattgaaattacgtaatttgatggtggaatacatgttttatttttgtttgacaaaattgatggctatttgtcacatacttcgatcaagaaatatcatgaaataattatatgcttgggtcctggaaatactaaaaagtttgt

SEQ ID NO: 53461 - DNA, 1367 bp, Arabidopsis thaliana landsberg
tatgtgatcataatcaattgttaagttttaatttatgcgcataaaaaaatatatgtttgtatagtagttaaggagaatttttttttgttatgttttagcactttttggattaatactagttttaaaagtatgattttttttttttttttttttgtgcacaaatatgatcaaacccaaaagtttctttacatagtagcaactttatattctcagcagccatggctaaaaaacgtaagttaatgacaaaaatgcgttgagtgcaatgaacctggcagtattcgatgaaccttagcggatcaaatgatataaatatgcaatagaatttaaatatttatttattgtccaagctgcgtggatagcttgatagataaattaatgacagctcattgactacccaagctgcgttgataagtacttgatcaaaatctttacatttttatgaagtactataatccaaagttaacttttaagcaaaagataattttttgtaatggttgtgaaaaattcacttataataacacgaaacataatgaagtattattagttcatttatatataatacacaaaaaaacataaaggcaataaaaataaccaaattaaaaaaaaatggagaagtagaaaagaaaacgaaaaaaaaaaaaaagagagagataagatgcatgcatggtatagaagtcgcaggctgaagaccagaaatacgaatgtgtttgaatagacaaattaaggaatataaagacagaagagcccatccattttcgcatacacgaatacatccccctcgactccaattattttattatagtccattctctcactttctattctaaatattgtggacgttataaaggctttttatttattttatgtcgagttttttagactacgtagagccgaatgaaaatttcatgtttaggtatacgaaacttggatccaatgttacggattcagatgggtgtacaagatcaaatttgatagtatttggatttgataggcaagatggtttagtattttacactgtgtatgttcctcttttagctttgcgttgtctactttcactacgatactactttttatcttccaatttcagttgcttctcaccaaaatattaaataccaaattaattggttaaacagttttataagcgattaaattagcactataaaaatagatatatcatggtcgaatacaaaaattaaagacaaataataatacactaaaaaaaactaaaattggagaattgttttgacaaagaataaaaaatgtcaaagttccataaaaaggaggacaaaagaggaatataacgaaattatcaacagaaacgcaccgagtaagtttatttcctctgataacgcaaaaacaaaaaaaaa

SEQ ID NO: 53462 - DNA, 806 bp, Arabidopsis thaliana landsberg
gaattaacatcatctgtctgggggacgggtccagcttaattaaaaactctaaaataatctaaattcctagagaatcactacaagtgtaggaagagttaaattgacacaacggaacagtttttaacttccgactaatggccgggaaatactagtacgtcaatcgaatctaaaaactccgtctcctattcaccaaggatccaagcatccgataatcaaatccatttcggccaaacgaacaaaaccacaaaaatttgagttactaggaagaaattaacgaaggcgcgcacctgagattgccttgagaacagcttcttgaggcggaccttgatcggattgatcgttatggctgcaattaagccgagtagcccgctcgggaacagatgcaaaaccattgaaacatagactctttggcgccgggaacaaaccatggaccggaactgatgctggagaaggagggagaaagaagcatctacgtgcgccggaagtccgtcgagattccgatacgaaaacggaacgcaaaatcgttttgcaagccattttttgaagcttctctttggagatgagtcgaacgaaaaaaagacacaacgctgcgtttggttatttataaaatttctggcgttggcgagggataacgtaaagacagttatgcccataggtttttgtcttctgttaccattcgctttggggttattagagtctttcactaggcccatttgtgcaagcattttaattaaagttagcaagtgaatctaatctaatcattttaatcaaagttagcaagtgaatcgcacacgaaatcatcttaa

SEQ ID NO: 53463 - DNA, 791 bp, Arabidopsis thaliana landsberg
acgccgattaatcttatgtttatgtaatgtgatgatgatattttagttagttagtattaatacattattaatttataacctaactaaaattaaggaaagaaagagagaagctcagcttttcgcggaaaattctctgggacgtggcggcaagcaataggatgacgatttgaattatgtgagtcccacatcacagaacaaaacaaaatcaaaaggttgaaaaaaaacgaagcgcgtgtgtaacacatgacacgtgtcctctgaagctgcatagcagttgccaggtttttgaagttgacagtaggcaaatacattgtgccacgtgaaagcttcatctttctttcaaatattattattattaaaatttaacctgaaaacaaatatttattcgtcatcgaccaacaagttactaaccatcactttcaaatcttatgtaaaaatataaggtgaaaattagttccattaaaatctatgttacttttgttgtttgtttagtgatttcaatatatatataaatgttggttaactatatcatttgatacttgataggaatacgaaaaaataaaattataactgaaacatggttagttactttagtaggtggttggagagctttcggtaaggagacaatatattgtcctagctagtttgattaattatctcgtctttgttttgtaactttgaattgaaatcttaccaatttgtcgttggaatttccacatcacacatgattagttttatacattaatacaaaatgcttttcttgataatgaacgaatgcccgatctcataca

SEQ ID NO: 53464 - DNA, 981 bp, Arabidopsis thaliana landsberg
cattggctcatttacattattgattatgggtcgtacaaggcaacaataaggttggttacttatcaaaactctctgtgagaacacgtccattgactcgttatgaagtgttttgacctggaaccttcagagacgaccagaatcaaggacgcctcctacttttatttgaaacgcgttgtgtcgtgttcggtctggctagaaaccggaagtttctacgaacacacctcctaacaaattcaatatcttaaaccggaagataacgtcagaaaatgtataaatatacactttgaattgaagcaattcacaaaaatcattcatcatctctcttaactcatcattacacagacatagcaatggctcagtatcatcaacagcatggtgagtcattcttgtacattacacaattgctgatatatatgttttaagttcagtttcgcatataatcaatgtgactgatgtatttataaatatatatgcagaaatgaagcagacaatggcagagacacagtatgtgacagcgccgccaccgatgggttacccggtgatgatgaaggactctccccaaactgtgcagcctcctcatgagggtcagagcaaaggcagtggtggatttttacgtggatggtaattttatctttttcatctatctataattgtttctcctttcttttcctttgtatattgatcttttttttctgttgcagtttggctgcaatgtgctgctgctgcgttttggattgtgtcttctagggaattctcccactacactatacacacagcttctactgatctttttgtcttgattcttgatgttttctttgtacatttttataaagttatgattgagtgatgctatttctgattctgttacatttggttgaagttttgtaattacatacttattctttagcatattagttatttccctgttctgagtaggtcggactatcatcgaaaaccaaatggtcagcatttggcagcaaa

SEQ ID NO: 53465 - DNA, 656 bp, Arabidopsis thaliana landsberg
atctgttctctctgctacagttttaagctcctgtgattcattggcctcggaattacaggaggttatgtcgcggaaagtattggtagatgacgggttaaggcaagtggtggaagttgaacaagcagctttgtggagatttctctggtggtcaggaacaatctcagttcatgtcttggtggatcaggatcgggcagatcactctgtaagacctctacgattataacaaaagtctcaagtttcttgaatggttcgtgaaaggggatttaaatgggtgttgcagatgaaattcaagcaagtgaaaagtggattcatgaagagattcgaaggaagctggcaagtaaagcctttgtttgtggatgaacatatgtgcgatcgtttgaaaccgaaaacgctggaggagtataacaggtgcactggaggtaaagggaggatcggatctaaggtaacgctggaccagctaatacagccagcgattgttccacctccgcccatttcttggtatctcagaggaatcacggctaagacgacagagatgcttatccatgacttgttggctgagaccgccaggatccgtgcagctggagtaatggaggatggtcactcgcccgatgagcaacggattggcacacctggagatataaaagaaagatggtctg

SEQ ID NO: 53466 - DNA, 913 bp, Arabidopsis thaliana landsberg
caatttccacttctcactgcagtatttgaatagctcccaaagagctaagcttcctaacaatcccacacaatgcaagtggcatctgatatctacaaacaccaaaaatcaacacttcaattccaacacaatttcaagattcacactttagtctaaagctttagcctttatctaattaaagagtaatgggtcctcacagtgcacaagcaaagaagacgatgaacaacgtagcgtaattcctagcgaatcgtttgatattctcatgaactctcattctcgcttgctgagaagacgacgggaacgaataagagtcacaattgccaatgaaaccggtggtccacggtgtcgtatctccggaaaaatcatcggcggagagcttagagaaagggttaatagtaagaagagaagagacagtgacgagtcgagataagagagaagcgaagaaaccaccggtaatggatgaaacgacatcgtcagatgccgcagaagttgcggcagctgaggatgaaacggaggcggaggaggaagcggcagctgcagcggcggaggtgcggtgatcgaggagctcgaggtaaccggaatctcgaagccaagattcgaaagcaggatcggggacgcttagagagagaggattaggagagaaagccattgttgttgtcgccgtgattatcccatagtaggtctctcgtctcctcggtcttcccaaaatcaatttacaagaaattgcaactcgtgatccaaaatatcttcataattgctaatatagggctcttatattatcttttgttaatttaactcctataatgtagtttaatggttcttgttaatcaattggcttactaaataccttttatattagatgaaacatgcatgcacgaaactaaatatcatattaattattaaaaaaatcattcta

SEQ ID NO: 53467 - DNA, 549 bp, Arabidopsis thaliana landsberg
gtctgtttatatatattataaaatatttttaattcatatggatacatatagaaagggcacggtgcgaaaattggttttttctgttcatgtattcgacgatgcaatttttgtcttttgtttttctcttctgtggccgagatccacagcgctgctgccggacttcttgccaccaccgtcgtcaagcgactccacgcgccgctgccggacttctcgccgccactgccgtcaagcgactccactcaccgcagcagggtcatactctccggcggagtcctccatgcagcccaacttctccaagtcgttgcagccgaggccccatggcgtccgccgctagctggagggtggctacggcgatgtgctggtcatcttccccggcgttgctactatcttctcctccgcggcgcgactccgcgcaacgaggctcgtttggaggttgcggtgatgcggccatggccggtgtccttccgtcggatgtctgtagcaacgcgaatagcggacgaatagtgtttctttagatgtagcggctctgacacatactctaaattttag

SEQ ID NO: 53468 - DNA, 605 bp, Arabidopsis thaliana landsberg
gctggtcgactctagaggatcccctattctgttcctttttttttgctctatttgtttctacaatactcttgtccttcatttttttgtctatgaaggtactgatggttaagaaattgtcttttttaggcataatatatccctgtaatgctgccaagattagatttagcatatctttgtctttagtataacaaattgatggtactgccttctgcagctttaaagcttcttgcattacattgcaattttttggattgatgaatccctaagggcttcgaagaggattggaggggattaaattcctcctcaaaattgaatagaaggggatttaatctccctcaatcccctttgatgatctgatccagacgcaaccgaaaaaggcctaagtgatgcaatggatcttcagtggagactgctagttgaagtccttctgttcactaagccgtttcttgagatagtatctgacatatagatcaattttaattactgcaggcgagagagagtgtgaagattgagcatgagaaaaagctttctactctgcagaccctggagtacagagggagggatagcgcaaagctggacaagaccaaggcctccataaacaggct

SEQ ID NO: 53469 - DNA, 686 bp, Arabidopsis thaliana landsberg
ccactgcctcctcttcctctgccaccaccaccgccaaaccgatttcctccaccaccaccaaaccgatttcctctgccaccaccaccgaatcttttttgtggcaatggttctctctcctggagtttaggcatcaccttaaccacttccaaactcatacttccagcactcttttgtgctcctgcaatgaacaagtctagatctgattgcttaacatcgaacacagctcctgttttatctgctgttagagataacccttcaatcatttccaccttgtcatccggtaaaactctccttagcattccataaacaaatctgttgcagcaaatcattttagtacttgctttcaatgtaaacaaagactacaaaagcagagtataaggagagagaggaacttacgatggcgagtatattggtttccctgcttcaagatgtagtgtcacatagttctccattgatgtaagaagtgaccttttctttatctcagtgaagccctgtaatgatcagaactcgtaagtacttgttttgataggaacaaaaaaaaaatgttacaagggaaaattttcgtaagacaaaccgcagtttttgcaagagcttttgcgaggagtacttcagctgataaaccagaagtttctaataattccttggcagcttcaaggaatgcaggaaccacactgcattaacatatt

SEQ ID NO: 53470 - DNA, 570 bp, Arabidopsis thaliana landsberg
gcagttcgactctagaggatccccaaacgattctcgacaatactacaaactctagtccagtcaacgcttcaatctacttccaaaactctattgccccgcagatccaggcatcagcatttccaatcaatcttaaagcaactccagtgccaatcttcgcaccaatatgatgatatcagattaatcagaacaaaaaaacgacgaataaaccataagcaaacatccacccttcaatattcacatgaacttgcaataatagcagcaataaaccaggctatccataaagctagaaacagaggacgttttaagtataaacggattaagaatctagtagagaaatgttggtgcaatattgggaaggtttatatcaatgtgaggaggaggtgctggcggctacgggtgacgtgccttcggatgcttccaggggtagggagcggatccaagggcgaggtcgtcgatggggttacactggcccggacgacggcgacgagctcctaggcggcgaggtggagcatcaatcgtgccttgtctccccgacgcacgtgcgtatggcgggggtcgggccacacgggg

SEQ ID NO: 53471 - DNA, 518 bp, Arabidopsis thaliana landsberg
actcgagccggctgacgttcaccgcccggatggcaccccagggcagcgcgcacacatcgggcggttaaccgcggcgacaccgacgacgggccccgccgcccgccgccgccgactagtactcgtcccaggcgaggcagccgaggtagtctccagacctcatcccagacacatatcgaaacggaggtggcggtcggggaagccctggaacagcggcgaggtggctcggcagcctaggaggaggaacacgttgtccgggtccggcgacaggtacggctcccgccacggctcgaggacgaagccgttaccccgcccagccggggcgaggtccagcgcgcggcaatcggacatggccacggtcgtgcagggtcaggccccggtacgcgtagtcgacgtcgaccacgcggtaggagaccgaggggaggtggagcatcagagcgcgttgatgcagaagagcaggtctcgaactcgcgtagctgcatccggggtgcagcgcgaacgggtagtcaccgtgatgttgc

SEQ ID NO: 53472 - DNA, 1003 bp, Arabidopsis thaliana landsberg
tacctaacgagtaacgaacctctttctcatcaagtcaaaacgtgagaagaagtcggtgataaaaacctaataaaaatcactcgaaagatatttttttcttggttaaacactcaaaaagattttgtctaactactataactcgttttagtcctttccataaaccattttaattccttttacgataataacttgaaattttcttactcttaacgccacaacattgctaaacgaatttcatacaaatatagcgcaattattactttgatagcatattattgttgcttcatatcatatgtttaggtagttgcaacttttgttttgtctacatgtatatatcaccgtgttaattatatattttgtttcatattgttaagatcagtatataactttttaaaacaagatgctttgattttgtcacttacatatacatagtttcatataagagatccttcctaacattgtagttagctagtcttattccattagttttaaatgggtataaaatttaattgttatttataagaaaacaaagaagttgattagagaaagaaaaaaacaattatttataagaaattcaattattagccatcgcgaatctaaaaagttaggcaagaaagtgaaggagatgtggggtgacataactagctaaccgccaggttagcatcacaagtcaacgtaaacataaaacaccaatgctcttccatttttcaaaaaaattgtattcacatccgagtctgaagtttttttgtgatttgtttagatcacaagttaggaattttgtagttttgcgcagggagggagacgcctagggaggtgtttagggagggagggaggtagacgccgacgctacttagtgtaaattatcttttcagatcgtaaagctagtaaaatattgatagtatacattcatatgtagctattaaaggtacatccaaaccatcatggtttaaccatgtgttattgtgtcgcaataagcaaaggctttatcttatttaatcagaaa

SEQ ID NO: 53473 - DNA, 494 bp, Arabidopsis thaliana landsberg
tgactgtattggctcatctgtcataccttcgtccacccgccctctacaccttcacaatattcttcatgttccccttacacaaaaaaatcttgtgtccattcataagtatactctagacaataatacatttatagaatttcatcctcatgtctttatgatcaaggaccaggccacgaggaaggtgctggttcgcggcccctgtacaggtggtctctatcccttaccgacccagctgaaccccactcagaagctccttctatctgccatcaagtcttcacctcatcgctggcatgctcggctaggtcatccggctcatgagatcgtccttcgtgtcattagagataatggtctttcatgttccactctaaatcactcgtcatccgtttgtgatgcatgcatgcgtgccaaggccgacagcttccatatcctaaatcggttagtaggtctagtgctccctggatctcatcttttctgatgtttggggtcagcaattg

SEQ ID NO: 53474 - DNA, 780 bp, Arabidopsis thaliana landsberg
tctttcttacccttctctcctcctttaccctttttaccatcctttccatttttaccctcacccattcccttcatctgcatcggaatctcaaacccgccaccaccgcctttctttcctccaccgcctccgcctttgaacccattcatcatcatcattatctcattgggacccttaggtccaccaccattaccatgatgaccacccatctgaggcatcatcttgttaggcatcatcatcttattaggaggcatgtgattacccccacctcctccatgtccatgaccatgacccatctcatcatcatcatcttcatcatcatcgaactcatcatcatcataatcatcttcactgaaatcatcatcatcataatcatcttcactaaactcatcgtcttcatcatcagcaaacttaactgacttcttctgatccttagctgccataggcggcatcttcatctgaccaccaccaccaccaccgtgagcagccttcatcatcatcatctgttgaatctgttgaggattcaattgcattggctgaccatgtccatgattctgacctcctccaccgccaccaccagctttacccttgacttggttactctcttttccacctttaggcttattgtttccacccatgttgagatttgcaaattgcccattcagattaggaaacccctttccccctccgccgcctcctcctccaccaccgcctaagatctcagcatgtttgcctgatttgctaagtttcttaaccagaagagctgggtcaacgttccctgta

SEQ ID NO: 53475 - DNA, 533 bp, Arabidopsis thaliana landsberg
tatttatctctatcacaaaattttgaaaccaaaaaagattggcgacaatgtctaaccttaataccagacaaatattgctccaacaattccttactaatctttgagaacttttgatcttccatgtggagcaagacactgtaatgcttccaacaagaagagagcagtagagctccacccatagatacctctgtgcctgaaatccaggtattaaacaatgaatttgaaaagcaagaatcaaaaacagaaacagaaaacggaaatgaacaaggaaaggcggcatcagtcagagacctgcctccttttgggagccaccatgatgctctttcaactcctctaaccatttcagcacttgacttaaccccttcgcatgcagtagtcgagtttttctgttccactggaaggaatcatttgtcaatattactcgactcaaatcatggattacttcgtcacttcaaaatttagaacacagctcaagcatatttagatggatcagcgaacatacagcaaaaagacattgtacaaggcgtgtcaga

SEQ ID NO: 53476 - DNA, 977 bp, Arabidopsis thaliana landsberg
cacagatatgtttccaaaaacatagaaacataactaaagactagactgtaaaggatgacgggaaattgcattgtttcttttgcaacacgttttcaccacgtgtcgatgttgttgacacattaactaacgcaagagttatccttcttttgatcttttccttgatgtaatactttgggcttcaattttgggcttcaactttggccttgtaaacttgtttggatcagtcaataaagaacaatagtgacaaaaaaaaaaaactaataatttgaaaaatgataaacaaagtaaaattcattaagcaaatggcctatcaacgcatggacacaacaaatatttagttcacatatatatattttttcctacccaatatacccctattaatagtagaacagtaccagaaagccactggcaaagataggcatatgtactaatgtacaggctttgtttttgaaagcacaatactgatctcctaatctgaaaaggtcctagcgatcgatcgggtatagggaactttgactacttcaatctgacctttccaacaagaacatgaagttggagttttggcggatcaacggaggaggatcaacctctgcaacctctacgttttgcatcgatttggagatatcgtcaagcgagaatgggatgctgcaaaaagcaatcaaaccaagacacataatttttttttatcaaaatatcaatcttctaaaaagtgatttgttttgttaatgtttctttcaagggtttacctcgaatcgtcgtctagtaaaaatgaattgctgatcgcgctctttgatacatctgacacctctgcccgcatggttgctatcacctgcatcaccattcttgtgtcaagcgaggaacatttttatttcaattctaggtaatgttggattttcttaaaacataactcaggaaaagactaatgttaacggtttggtcgagtgggtccatcaatcacacgaatgtaaagcaagggt

SEQ ID NO: 53477 - DNA, 540 bp, Arabidopsis thaliana landsberg
gtcaatgggttagagaacatcgaccggtcgacatgtgaccatcgggtggatgtgacaagggttgcattggatggcaactggatgatgcacactaactcatcacgggagcgggccagggtatgaggcgtctcatcagaggaggggaccagtgttgtgggccatagatgctgctggtagacatggtcaagatcgaaacacgcagccaaaggtgggtggggaggctggccgcacgttgcattgggcgaggcgacacgttgtgcaatcggaggtgattgagctatgcgaggcacgagctaaggcaacggtgctgcgcatggccggacttgtgcctaggatcgggtgtaggtgaagaggagggacatcgatgggatcaacaccacggagggaatcgagatcgagaggtggaaaggatctagcaaaggacaaacatcctcatcgaaaacaacatgacgagagatgataatgcggggtgagaagatcaagcactggtcccctagtgggaaggagtggcggaggtgttgggatagcagcgcaactagg

SEQ ID NO: 53478 - DNA, 1837 bp, Arabidopsis thaliana landsberg
ttggagtttgactttggccctaaagagatctgtatgactctttgtccgtaagtgagtcccaccaccacacaagcttaatcagtttgcttactattttagattttgtacaaatctcttctacttttgtggtcctctccactcctgctctgccacgtgcttcactctgatacaaatttattgtattttaaagtacaaaatgttttgttacttgtcttatttttttggttgccttggctcataacaagtaaaatttaaaccattaggaatttttttctctcatgaatacgtttggaattgtggtaaaagaactgcaatgcctggttcaaggccaatttggaagatcatgttgaataccatgtcagtaatggaaagaccacgctaggaccatctgcgataagggaagtaccatggtacaaatgatttattggtatgtaaccacttcattcagaattatataaatttaatttgggtgatgtaattatttcataagacattatatgtactaaccaatatttatgaagttattcaatggaatttgtataatggtttcagagtggacattgaacaataagcaaacctttgcaccataatattgtatgagtttaatctctaaaaatttggtttcataagtagtggttgatttacgacagttatagaccgataatactagggcttgataccttgctcgcaatgttcaatagaggcactttttgttttcatatgtaaacaattgtgttttctgttaattatttggataggtaaaacaacatttgcttgtaatcgataaaagtgaagtttggttgaagtaagaaattatattttaagatgagtaaatttttatggaaagggtggtagtaaaggctaatcaattttggcttcaccttttaacaaatgtacaaaggtaaaattgataatgctcgaaggagaaatttttaggttttatatgtaaaaatttgtgcttactgttacttgcggagataacaaacatttcatagtaaccgataaaaaaatttggctgttgtaaatcatgtagcaaatacatcaagaaaagctagtaaaggttaatcaaatttggcaaaatatatcaataaatcacaaaggtgaaattaataatgataggtaattattagggagttcatgaattataaagatacccgaaggtgtaaggcaccattagtatatccaacgcaaattaagtggacaaacaatacgactaagaaacaaaatattttcacttaattaccgtactattaatctgatcaaatcatgctttagtactgattagagcctatatcataattatgtttataacagcctttacaaacaaaattcaaaaacggtggccaagattgtgacagtcctaaacttttgcaaatccttttggttaattaaccaccgaaaatacacaaaacaatcgatattcaatgtactaattaattagcaaacaatgatacacttgtccagtaaagtgtattttaatgtaacttttcacagagtatttcgtgtgtatagatgtaagttctaactatatataaatagaaatcgtctgtctaggaaggcttaaacgtcactcttctccttacaacgtggattccaacatcgatacatttgttttcatccaagaaaaaattgcgaataacacaaacaaaaacaaactgaataaactaatcggtcgataatcgagcaactaaatactcccaaattaaaaactgacaatggactattataaaaaattaaacaaggtctgagaatgtgaaacgattcgagagccacgtgagatgaatatcgcattgaatcaagaaactaataaaagtgtccagatattaaatatgaacat

SEQ ID NO: 53479 - DNA, 1214 bp, Arabidopsis thaliana landsberg
gggtttgggggccctcttaggggaaaggtccatttccccataaggggtgaaaaagtttggactttttgccctcggggttttccaagtttattaattattggccattttcgggaccttgagtctccaaaaacgaagaaccacggcgcttgttgtccgtaaaccaccgtggccgctgtaaatatgatggcagcaactaaccaacaagctttagacattctttcaaccatattcttcaaaaataaaataaaacaagaaattgaacagaggaaatatttattgaagaaaagaagtaagatcttattcattaaagttgtcatataagagaggccagagtttaagtttagatttgaaattgattctatgaagaatattaaaaggctatttaaaagaaagggtaatgagcaaaataagggagactacaatcttttgtatgtggggaggatctttaattttagttaacctgagaatttgtgatagcgaatcatgctactaagattgtattttaatttctttgcaaatattttgtttaagctatttgtatcatcaaagcatactactagtaccccctatcttaaagtgttgctatgaaaaatctgatttttaaaaaaaaaaatataattttaagaatttaaatagcttcttattcgatatatataatactaatattacaacgatgattcaaatttaagtttattactttttgataaatgataaattataatcttagtctaaaaatgtgttttgggggaaaagggtacttttttgaacaacaaaaaaagtataattcgtctttcaccaaacacaaatagtgatctagtgacatttaccgctgacaaaatcattcaaatcacaattatttatactatgcatcatttattcatcatatattttggaataattaatatgggttatgtaaataaaataaaaatattttactttataatacatctaaataacaagtaatcattatttttaaattggtgaaaaaggcatgttattcatatgataaattttaattggagaagaaaggaatgcaatgagtttagaataagcataacgaatgaaatgaaattatagtagatcacagatgccagataaacaccaatccgtaatgtgaattaaaatactagctataactattaccaagatctatgtttattcctttcaatttgatatatcgatataatcattggatctctaatgacctaatgatg

SEQ ID NO: 53480 - DNA, 614 bp, Arabidopsis thaliana landsberg
gcaggtcgactctagaggatcccgaactttgtgatcgtcggcaccttgagcttagaaaaaatccaagtagatctgagagtcggccacaagctccttattgtctgaaacggtaagagcgagaagagatatttcaatggttgaaaaagctgaggttcccagatcgctatgggctaatataaaacgggcagttaacctcgacaccagggcgtggaaggaggttagttgggacggaacagggcatcgcacaccaatcctcacagagttggggatttgtttgcgattcgcctacccggcgatggtgacagagggcggtcaagagatagctgctcattactgggctcattgggatctcaaaccgtacgggaacgacgggacacacacaagcaaagtgtgggatttgttttgggtaagtccattgtgatattcaaattgaattcagattttgcatttgtaagtctctggtgatcttcaaatttgcagggccaatttcgcgtgtgcgacacctatacttggatgattcatatgtgcgtgaggtattcaatggctcagcagatagagctgtaaagggtatgatgtataaatcacgattgagggccgtccggtgtccaaaagcg

SEQ ID NO: 53481 - DNA, 377 bp, Arabidopsis thaliana landsberg
  unsure (1)..(377): unsure at all n locations
tcaagttcttagtgatcccgcagggttctttttagattgcaggatgaattttgggagaacacctactcttcattcccatcgtgatgctgcaatgaaggtacttaatgagctagatagtttgtctactcagaccctacgtgcaatgaaaaggaaacttaaaggttcaagaatgatacctcaattgaaaaatagtagacgtggtcagcgtctannnnnnnnnnnnnnnnnnnnnnngcaagctagtgagaagatgctctcagaactttttgcaggggataaactgcaggagcaattggctaaagcgttgtcagcagtagatttatcacttaagctaagtccctgctacaaaactgctgctgccacagatttttttcggt

SEQ ID NO: 53482 - DNA, 567 bp, Arabidopsis thaliana landsberg
ctgaaacatttggcacctgagacaagctataaaacattggttgaatgtgttgctgattaattttcatttggtctctgtttttctatccaaaatagtttcagcaagaacgtaaataacttcgctactaatatgcggcaaataaagaagattgtgcattgagtaaataaaagaacaacgaattccacaagcaccaactaacagaaatgaaacgaaccttggttgaatgtgttgcttggggatcagtggttcaatcggcgtcttgggggagccttggttcgtaggtgggcagaggttgctgaggtcgatagcagaggttactgtaggcctccccatttgtagtcgtaggtgggcagaggttgctgaggtcgaatcagtgcaggaatggaaggggatggaggagcgctgatggaggagatttggcgtggggaggatggcgctgacatcgcgtacgggtcggtgcggatcccgagcaccttctgctatcggagacggggcgctgatatcgcgttcgggaactttggcaccttctgctattggggaggagtgccacgccgccgcacgcgcaga

SEQ ID NO: 53483 - DNA, 509 bp, Arabidopsis thaliana landsberg
aagcaggactcgacatttgccaaagtcctgaaaatattcgaggcactatgcgtctattcaactgaaatgtttctcgggcctgtggaggaggttctgctatggcaatctgattgcaaagatcctggttcgcacctggaagagcaggtcgggataagccgagaatcccagccgttgagactaggcttctttcaaaggggaaatcttgtattttcatctttatcgtgtcatagcagtccataaatgactgatagagatccttcaccatgttatgctctccatcattcatcgctcgggcgccagtggctacaaagagagatttctgaacagcggtcatggcttgtacgatatcaccgtccacactggtaagaaatgtttgcacattaaagagatcgttgttgttcgtccttaacaagacagtggttcctcgattgaccaaattttggaacacctgaaggctttcgaaggaaagtccgcagcccagcatactgcgggcaatctgctgcgtctgt

SEQ ID NO: 53484 - DNA, 1252 bp, Arabidopsis thaliana landsberg
  unsure (1)..(1252): unsure at all n locations
cattcgtatcagaagggatcatatgggcctgaccttattttgaagtttttgaacccgagtttccaagtaaccgacaaatcccaaaattatgtttttgtttacatatttattccatgtattattttttattttttactgtaattaactatttgttagttttcattttgaaacgaataagttgtaattaaatccattccccaaaatataaaaagacatttaagatggtaagaaaaacgtacaagtttcttaggtaagtaagcttacgtaaactcgatcgtaataatatttgctgatatcaataatccctgaattccctcgcttacgatcaaattcaatgctttcagtttcatcttatgccatctctcgctcgtaaataaaatcttttttcttaaacagctaaaatccttttaatcttcttgtctattaatatacttatcatcacctataggtcttatattatgcagtgtgcacacatgtattatccacaattctacaaatatgtattatgtattatcagatttgtagtaaaattcttgacgacaaaactatacttttctattgctaaaaaacagatattcttggaaatatacttatgtggtaagaaaacgatgttgttgaaatacacaaatactaaaatacaattcatgcgtcttgttttctaagatggaaagttcccatgaattttctttccggctttgactatcttaaggcggccattttaaaaatataccaaccatgcttaaaagaaaaaataggtacaatttacaaaaacattcctatattatgcgcaaagtgacaagaaaaagaaacagccctatcaaaagttttagttagatatattaattaagtcggtgcaatcaactctcgttatccatcgagtatgatgcaaccgaagaacaagttttttttgttgttgttgtaaatgttaaataccgaagaaaaagttatagtaacgtccggcgtcgtgatgcccggagataactcttatccacctaaaaaacataaatatttccgccacaaatttccaaatactcttacaacttatgtttagctcagaccaaaccaaaccaggagattttgacacgttcttcatatcacatgcacaccatcctcctcccaccaaanaatcatatacaatgttgtgatcttcacatataaataagcaatcaattttacaaaggtggtcgtgttacatcgagtatatccttctacgtacggacaatacctcaatacgtatataatatatagatat

SEQ ID NO: 53485 - DNA, 262 bp, Arabidopsis thaliana landsberg
gctataagcgccaaggctatcgagaccgatcatataatcctgcacaggcgtgccgagcctgagattttccggcaacttctcattccccggcgtagagaaatcgcgcagcgtggccagcgaagaaatggcggcgctttgcgcttccggcgaaacctgctcagcaagcgcgggcgccgcgaaaagcagcggcgcaagcacggcagcgcggaaaagattggaaagctttccggactttttcatggctacggggcgggcggacgcg

SEQ ID NO: 53486 - DNA, 869 bp, Arabidopsis thaliana landsberg
ggtttactttaatgggaacatgatgagcatttcaaaatagatatttaaaaaatatcacactctcttatactttgaaaaatgacatttaaggatgtttcccatttttcatacgtagtcaatcatataaaatttgagattttaatacgttgacagagtcatatgatcctggatcgtgtcaaaatgtctcttgtgtaagtaagaagttttccaaaagaaaaaacagttatgagctgtcttgatgattatatcactgcctagttgttaattaaggaagagctcatctgtttggttgcgtgcacgaagaagagagtatggtacaactactttcacacaaatctataaatacacagacacactcataagttcaaaaaacacaagataaatatattttctattcaattttgtttaaagaataagaaaaagatgagaacttcttctcttcttggttggtttttgatcatctccctcttgttactttctcaatccctcataatttcatgcggacgccatacgatcactcctttgggtcgggaactagttgaacatgaagagaacaaggagggtcatccggtcatcaccacgaccatcttcgagtcttcgtgaggaaaagcaaaagcaagagcaagaagaagaaggacaaatcagcagccactcgaacccttctctctaacccatctacctatgtatctactgttgtgagttcctttgttttattgctcgccgcattttaatccaagataacaggttgcgacttttttattttatttgtcaaatggcttgaatttgcgtgtttgtttgagtttgtatttccgatcgagtttaacgatttgttttcttttccggctaagatcgcgtgggtaagaactcaa

SEQ ID NO: 53487 - DNA, 740 bp, Arabidopsis thaliana landsberg
ctaatatcccttgcgtgagatagggcaaaaatcaaagatgattattgattagggtttggatatagcatcttccgatgacatgagttgaagatgatatatattttgaactagcttggttaagaggaaccacaatataatgttatatatgttcaccgtttaattagatctatagtcttatgtttataggaatataggatccacgactctaattttcacatgaggtaataatgaatttattggtttttactttttgagttagagctccattttattgagttttgaggtgaggtttaccattatgtgatatttgttgtaaacttttgatgatatcatatatgctttttttggttaatagacctttaacttagttcacaccgtaaaaacatgcatatatgttgctaaattcggctaaaaacaatatttatgtttccgaaagatgatatacaaaatgcgtgagaatcattttgtcacgaatttaatgtttgttctgttcaccgagtccaagcgttagatggttacgtgacaatatgatttcagatgacacactaatgcatgaaaaccacaagccactagagttcttcctatatttgatatccacttgatacataggaggcgttgatatctaaataatcaaatttgctcacaacaattgacatggattatttcgtaagaaaatagactgctagttaattaagccgttaccctttaaaaaaaaaagatactaaatattttatagactg

SEQ ID NO: 53488 - DNA, 984 bp, Arabidopsis thaliana landsberg
cgctgagtgcgctacaaatgtaagtaaaattcaaaaaaaccgtttatatgtttgacatatcgttaagttttagagtgttggatacattctacaaatttggattaatatgttttttgaattgtactgttaacagtggacaaatcacttggataagaacagagggattatatgcagcatccttcaaaacgtcatctttatacaccaaatctcttccccttcggccaaccttcaatataggaccaagcagccaccactgatcatcggcgacaagcttaacaattttcgccaagagatcattagggatctctgacatttcaattcccattttgatatttttaaactgagaataaacgaagataagttgtttggttcttgggtattatagagaaattcaactttcttgtatatataagccgtaataatatagtagctggggaagttacagttgaggataatttaatcctcacaccaaacatatttatgtcatcttagttttttttaaaaaattacccaattaatattaatattaaccactccaataaaaaactcgatgtacacatctgtaaagcgccatctgtacagcgaaagaagagaatgctctgttgttatccgtacaacattataaagtactatacagctatatcttcaattgagtaaaaaactactttttgagagatacattcaccagtagtacttggcactttcaaaagtagtttaggtaataattaatactagccaatcaatgttaaatattaacctctccaacagaaaactcgatggacacacagcgtcatctgtacagtaaaagggcagataactgtacatcgccatttgtacagtgatgtagtaaagctatttaattcatttgtacaacgaagtatagaatgctctgttttaaacgcacagtaatataacaaccgtactgttgtatctcaaattgagtaaaagctactttttcggaagtaaaacacaagtttcaataaa

SEQ ID NO: 53489 - DNA, 481 bp, Arabidopsis thaliana landsberg
gcttcctcggagaacagaacttacgccaccgccaatgaagagtagaaacgccgccgttttcgctggatctgtgattagaggaagtgtttcagcgagtgctggtgagaagaaaggtattgggatgatgcgtaaaagctacgctgctgttgatgatcttaagaaaatatctatggctgctgcttccgccattaacggcggtggaggaaaaaggagatcaattggcggaggaggaggaggaaggaaatcacttggcggcggtggtggtggtcgggctattctaggttatagacaaatttattgattcttttgttcttgtttgtgtccaaactctataacatttgtgttcaaagtttgtatttatgtgtgtttaattggttttgattgataaagattagtcctttttcagattttggttttggtgattgatagatttttgtatataagtaacgactaacacttgcatagttgttatcagaaagct

SEQ ID NO: 53490 - DNA, 759 bp, Arabidopsis thaliana landsberg
tattttagattttataaaattatttatattttttgggatgtaaatggtgaagtagtaaaaatggacgagtgcaaagttttttttttgcataaaacctatatataaacttaaatcattacacttaatactaaaatggtttgaaattttcttccattaattgaaaaaaaataaatcaaagaattggatatatttccagtccaacgaatttatttatgctaacgtattacgaaaaagaagtatatctacatttcaataatccagatagaagtttggttacgtatccatttctgcctaaacaaaatgtcaaacttctgacgatccgtacacaaagtacataaatttgagaaaagtattaattacttttgttagaacttatcaataataggtgcatgcaataaatagtaaatataaaataacataagactttctaaccttatcttaatagaataaatacttcagcgtaacactgttacttgtgagttgtgacgttgcaaatgcaaactttcgaataaaattccagattagattttaaaatgtttattaattattgtttaatgtttttagtacataactgtttacacgacatcgtttttaaaatagcaatttgtgatctgccacgacgatctcgcgtactatccacgtcagacaaacgactatgatttcttccatatataaattttttaatatatgcatcttttatggcaaactaatatttccgattttacatatagttttgggtcaacagataggtacggcgat

SEQ ID NO: 53491 - DNA, 1243 bp, Arabidopsis thaliana landsberg
tcgtgagcttatctattatgatgtggcgggcgagtgctataattgttgctagagagttatgcactttatagaaatgagtgttgtcatatacagttccactgcgctactgctgctcccttgttagaataaagcaccttgtgcttatcttcccgtaggtgtggttcagcacatttgttcttcataatgggttttctgttattgaaatgaaattttgctcttctttgacaatttagctggttttcttttctgtagtagataacttctttcagttattcatatttccatatctaattagatggttcacaataatgcctaaggtaccttgattgtatatgataattagtttgcgttatttttggttgtactgcttagtttattgtgtgaaagtcacttctaggaaaacaaattatgaactgttacacagaagttgctttcttggtaaccatttagcgatcaaatgttattaggaaaactgaagctcttttggattagaagctttaaaagtctttcatcttgttgataggccttcttgcattgttaactcttacaaaatatgtcttgaactttcttaatttatcgttgttgcactgtttgctttacagatggtaagaatgttagatatcctggcagaatacctgtctcttagaggtttccagttccagagactggatggtagtactaaggcagaactgcgtcacgaagcaatggatcattttaacgcacctgctagtgacgacttttgctttcttctttcgacccgagctggtggactgggtatcaatctggctactgctgatacagtcgttatatttgactctgattggaatccacaaaatgacctgcaggttttgcctccaataaaatttttctacctttggattattactctttaatactaaatgttgataatggaatcccaaccctattatatcaggccatgagtcgagcgcatagaattgggcaacaagaggtcgtgaacatttatagatttgtcactagcaaaagtgttgaagaagaaatcctggagcgcgccaaaagaaaaatggtatactagttttagacatgcttagcttatgtttacatgaatcttttagcagtgcaatgaattcctttgtcctgcatcctcaccttcatgaaataattccacttcagcgctgttaccgattcttttgtagggatactttagcttgttacatagtcgagttttaattgcaaatctgttttatcatgggggttattctat

SEQ ID NO: 53492 - DNA, 1005 bp, Arabidopsis thaliana landsberg
  unsure (1)..(1005): unsure at all n locations
ttcagactctgctaatctgataagtgctgcagaagtaagtttctcttagtttgttaggataattttagatcagatgttgtaatacagtttttttattatatcgctcctcatttggatatcgtgcagatcatgattagaagtggaagaacaccagaggaagctctaatgattcttgtccctgaggcatacaagaatcatccaaccttatctgtcaaatatcctgaggtaacaacatctgagtctgatttgttcttcaagaacccattgcaaaactcaccattttctctgcttcttttttcaacttcaggttgtagatttctatgactactacaaaggacaaatggaggcttgggatggtcctgccttacttttgttcaggtaaatcttttgagtacctagctgtatttgaccttcttactagatcaggtaatctaataaagttatagtgttgtggagtaagtcaagggagtttcttgtcactgcattcttgttgtttgcaatgttgtgtctgagctcaggcttcttctattccctgtcgtttctccattcttttttcggcttctcctcaggtttatctgacacttgctacttgaattcgtcacctagtgatggaaaaacagttggggcttgtcttgaccgtaatggccttcgtcctgctcgatattggcggactagtgacaatttcgtctatgttgcatctgaggtatttcacatttctattaatatatttttggctgatcatgattgtccaagtcactctagcaccagattttataggactcactaggtaagagaggcctattcatcttagtagtaataacttatatgcacttaagttgattctattgcatctcaagttgatccccttgtagccaaggagattgccatatttcttgattaaagtaagctatcttggaacgcacatttctcccctgaagatggaaaatgctaatcctgatgactaaaactttgttttcttaagatctaaactancgtattcgccct

SEQ ID NO: 53493 - DNA, 692 bp, Arabidopsis thaliana landsberg
gctctcagtctttggattatagggcaaacacatgtttttaagaatctttttcttttttgctttctttcacattatttgaaatatgtaacatattcttgtgggatttgaacccaatggtcctacactggtgtgggtccaatgatgatgtcgggagatggggcctagccgcagatttgtttgaacaacagatcaaacggtcatcatttatttgatctaaatgattatattaggttttgcattttttcttctcctttgaaaagatgaaaaacgaaaaaaggtcagaaatctactggagataagagtaccgtctgagactagaataaacatagatatcagctgaaaaaattgataagagtatgataatgtgcttattcagttttattattaaaaaaataaaaaaaattagtctgctacgaaaacacaagtatacatactatagttgataagagcattatccatggtgtgtagtaagtaagtaaacaaaccattatatttggattaatcgagtattcagcaaatattcatattgtcttgttaatgattaagagcctagaagtctttaaaatatccatcaagattcaaacattatgactcaaactagtgtggtgttgtccattatactcgaaacgaaatggtattttttcaacttttgcttgtaaaacttagccagtgcatggcctttattaaatcaa

SEQ ID NO: 53494 - DNA, 689 bp, Arabidopsis thaliana landsberg
atccaattagcttcattcgtgttggagaaatttgattttatatccgactgagtaggtacgtatatgcaatacgttatgtcctattagccttatgggactcacgggtacttatgcaggagatggattaatttcatatccatctgcaaactaaatacatttattttcttatggcaaaaagccaaaaactatgtaacgtttaatttacgaaaaaaattatatttaatatttgggttatatggattttttttgatttttttttttttttttcgggacattagcgagagtcatactattaaagaaacagtaaaaacaacgaccagatttaatgcaactttattactactttaattcagattcgagaattgacaggcaaatacgcattattttagtacattatgaagaatcatagagttacatatttcacatatatattgttttaaagatgtaaaacgactaagcaagtatgtcatctgatagcattatgaactaataagctttttgtcaactctgattttcatttttaaaattattatatcttgttacctctttgtaaccagcaatagtttcttgacaacaaaagaatcggcaaatcaatgaaaaactattaaactaacacacaaaacataaaaaatagtgattagccgacacaacaaaattggatttgtctttctctcttaaaagattttcac

SEQ ID NO: 53495 - DNA, 579 bp, Arabidopsis thaliana landsberg
cgactctagaggatccctactgtttcgcctcagagttatctcgggcatccaatcttgattgggcgattaggagtagtgatctaagtaattaaatcggagtcgtcgatgttggatgctatggctagcatgaaataccatttcagaatctatctgtaggggtcggagctagatctggtggatcacctgcgggcgtgcccgttcggctgggtcattttatgaaagaacccctgggtttgctatatatcaacgtgccatccgcacgctgtttaaaacagttacaaaaaggggcttgaaatttgcgaagaagcgctgactttataaagaaatgttggaagtcgatttataatataaaaataaatatgaatggtttagaaaaatcatatctcccgcattttaacgtcttctttatccattccagttgcattagtgtcagatttggattgtttatggcgtggtaagcttattttgttatgagacttagatctgaaaattcgcgcgcttattctttttatgcagagcttgaacttcgaaaattcataactggtctgtgttacttcgaattgccggtccagttgtgtt

SEQ ID NO: 53496 - DNA, 556 bp, Arabidopsis thaliana landsberg
gtcgactctagaggatcccctggcgctgccactccagaacggcgccgcaccttcccctctgctctatgccctcttgctgattcttacctaggcgatggcgacgccttagatctttcggccgcctggacgcctaggcgacgcctttaaaacaaggggtacaacaatacatcaacatagtaataaacagtggttacggtgtttccagaggtcgaggcaccaatgatgacgagagttgagagcttgctgcatcagagaactcaattatcagtaagcgaaggtgctctctgtctggaggccaaactgctgcagaaggctgaaccaaatttgtctgacaagaaccttaatgatgagctggcgagattacctgtgcaggcgtctagactatgtcataccgttcaatgacgatcagggatctattcgcacctgatgagctggtacctgctagtcacattactgttatgtatatgccgtagtgcgcttccaatataatgctatttggagcaagtgtgtacagcactttggctctttagcgtaattgctcgacttagtaaaattg

SEQ ID NO: 53497 - DNA, 671 bp, Arabidopsis thaliana landsberg
  unsure (1)..(671): unsure at all n locations
caggtcgactctcgactctagaggatccctgtacgtgggccaaaacagcagcttcgatgtcctcggcggccgggctcctattgcagtacggaatgtattatcatatttgttttgtttttatgaatcctagtcactgtaatttattcacatatcttacccttttgattaacgtttgacaggtacatccttcaatgggactactagcatataattgtggtgagtacaacaatgcatgattgtctgacatcaagtaacgttcagggttgtgtactctgccatgtactactgttagtaaacaccttgtaatctgttttgttgttgatgcagggcttgcaattgcaatggaattgatgaaacaaagtgcttgctatcagaactgtcttaagtggccttcctgcagcatttgctgggcctgctacgttgcttgccgctacagattttattgttgagagcaaatgctctgttgctatagacaggtanagcaaactctcgtagtacaatgtcgtgtcaactgccaatttttttcaatattaatgttcccacgccaatttacgagtacagtgttcgaactggtagttcagctcagaaagtttatcacatagtagtcccccaggcccnactacaattttcctgatctaactctcatgctgtgatgattctacctgagaagg

SEQ ID NO: 53498 - DNA, 746 bp, Arabidopsis thaliana landsberg
catattatcattcgtcagcttgtccattttgttgatgttttttttttcctaaacgttttctatatgtttaattgttttatgtttcgtggtttatccaataaattgtttattttcttaaaataaatcgccagataaaaaaatgcgaactagaagggagagtcatagcttaatattaaataaataacgatggatgcgttgtatacgcgtttacaaataatcccatgcaggattcatattgtaattgtttaactagtctagtggtcaaagtcatcttcccacatggagaggtgcagagttcgaaactttgaatctccgacctccttttcattgttcttcaattaaaaaaaaaaaaaacattttcaaataataggccgtaattgtttttttgcttctgaccttcaaataattgaggagggctctggttgttgctcctctgcttctagccactctctttaaactatgtgttgtgtgttctctaatgagaataactatgctaatgtgatttctctttacaatggtgaatggtggtctttcttttaattataactgtgtataaaacattatctctattaaagagaatcacatatccaagatgtattgatgcttcaactttcttttcaacgttcactatttaaacccatgcataatgcattcctttgttcgcacttcgtattttaattgaaatattcaggtaagtcatgcctgcctctattctttgtttcttgttctaataaccaagccctgcc

SEQ ID NO: 53499 - DNA, 928 bp, Arabidopsis thaliana landsberg
  unsure (1)..(928): unsure at all n locations
ctccaatttgtctacactttggtattgattcgttacaagtgaatgttctagaccacgtttgttgatctattatgtagttttgtattcatcctagctacatttatatatatccacttatttcttaactacggtatgcattatacatgtttgtattaatgtcgccgataaaagtttcggacnnnnnnnnnnnnnnnnnnnnnnnnnnttattattgttaaaaaaaacactacaaggaataagatagatcaaaaacgaaagctccttcgaaaacaatctcaaagaacaagaaaatatgagaagactctttctcttctctctcctctttttattcttttactcatcctcctcctcaagatcttcatcagaatctcacatcttcatctacggaggatgttcaccggaaaaatacacaccaaacacaccttttgagtcaaaccgcgacactttcctctcctctgtcgtcacttcctcctctgacgcgtccttcaacagctttgccgtcggcaacgactcctcctcctcctcatcctcttccgccgtcttcggcctctatcaatgccgtgacgatctccgatcatcagactgctcaaaatgcatccaaacctcagtcgatcaaatcactctcatttgtccttactcttacggcgcttctctccagctcgaaggctgcttcttacgttacgaaacaaacgattttctagggaaaccagacacaagtcttaggtacaagaagtgtagttccaagagcgttgagaatgactacgatttctttaagcggagagacgatgtgttgtcggatcttgagtcgactcaactcggttacaaagttagccggtccggtttagtcgaaggttatgctcagtgtgttggtgacttgagtcctagtgactgtacggcttgtcttgccgagtctgtcggaaaattaaag

SEQ ID NO: 53500 - DNA, 820 bp, Arabidopsis thaliana landsberg
tggtattaaataagaaacataaatgtcgaagttgaaagcaaagtgtccgtagcatggagcgtacggctggacagttttggcagcccacgctttcgcatttaaaccattgctaatttgctatatatctatacacactatttgagtaactccggaagagttatatattaattgaccagtagtgattactcgcaagtagcacaacgtctgttaaattattgagtatgtaaatgcaacttttaccaaactaaacttcactttaaaacgttgtatgaactatgaagcaaatagtggtgttctctatgcagtacctaataagaaaatcatcatttcaaagaacagatacatgcatttaattttagaagaaaagtcgtgttggtattattggtatgacacgtaaatggaagaaatataaagtcagttggtgggtcattctgtacgaatggaccatagtacggcgtttatttcccccaaaattcattaatttcactaactcatctttagaaagcagtactatatccgtatttatcatttggattatatataacggcatgcactaatagacttgacactgttcttccttctactacgtttgcaataataaaaacaaccatgcaacaactttttaaaagaacattaatcatgcatggtttctaaaaatctgtaaaaagagagaaaagaatagtgacaaattgacactgcacgagacattcggagtcacggaattgtacatatttttgtactgtccctgcttcgtatactccaagtacgtcccccgcaatttacgcctctcttttcctaattcttttatgttccgttgaaa

SEQ ID NO: 53501 - DNA, 671 bp, Arabidopsis thaliana landsberg
gcaggtcgactctagaggatcccctttgataccatgtacagtttactaattccaaaccgaaccgaacagaattgttttacggttcagccggtaatatttttggataaccgaataacagataaaccgaacctaaaaaaacgaatgcccaagactaataaagcattgtgttcctttttacttgtctcacttacgcttatgcataaaagctattcaatcaaccctataaatgatacaacaaatataaacacatagatacctaaaaagaagtgaggaaattacataaggctacatgcgtggacgttgtcgtcgttgaaaaagttgctcattttgtcgtcaccacggttggtgacgtgaatgttaccgtgacggtcactaaggttgtagccatggcgatagtagttgtagctctccctaaactcgcgggtggtatctttgaagtaatggtcagaggaagtgaagtagcgaggcatgtccgggtagggccagaactcggctcgtttaccggctcttctcaccgccttgagcaccttcttcctctctacgtaccgcaacaccgttactctctccatctctaggttcacatgcacgagtccacgacttcaccacaaaacaacgccagtttagttactagtctgatatatcacaatattacgtttcgatataggagtgtt

SEQ ID NO: 53502 - DNA, 524 bp, Arabidopsis thaliana landsberg
gttgtgctcgtgctggcccaaaaaaccctccccatattcccagcactaatccaatatcattcctcatggctattcggtgtcattcctgcgatccgcctcttcatgtcgtcacagcatttgttcctttattccctgacttcggatgctttcgttgtccacgagctagccacgtcgtagtttacacaccctcatgatctccagcgtcagagagcgctaccctcatctctgctgtgagttcatacataccgaagccattgctgcacgagtgaaggagccccgtcgcttgccttgcctttaccatgcatgcgcctttaatttcagaatggacgagaagacgacaaatgagagctttcatcgctccatgtccatgctgatgtgtttccttatcctgctaataataagcggcggatacaggattaatctaagagggggatacaaacttaaagactaacaaaaataaattaaaccaaacaaaagcagtacgtacccatcaactgaccacacgttctgcgagcgatgaggtg

SEQ ID NO: 53503 - DNA, 548 bp, Arabidopsis thaliana landsberg
cctctgtcatgtcatgcatgatcgtgtgcttggccagttggctctccgattagtgttaggtataagggccgtgtttttttgagccagcacggctaagccgtcctttattttcggctcacgacacggcacacacgcatggatcatgtttagtatgtttggtctggcacagaaaaggctatagtgttgatttttttaattttagtaagctatggactttaagtgattaatattttggttattcaaacattatcgttatgtatagagtgaattgacaccccagaccacggtccgtggctcgaggtatgatctagttgaaaatagataggagaggaatagaagcgaatttagtagtctcgacctggggcacgagaaatttctagatttgcccctggatatgtattctttgtcgtacagagaaagccctataatgggttgtaagtcctcaacgagtcaaactgaggaatatatgttgtatgctcaaactatgtgtcgtactattgttagcattggattgtgtcaataattaattactggcagttgaaatattg

SEQ ID NO: 53504 - DNA, 913 bp, Arabidopsis thaliana landsberg
caaactcttgttctatccacacttccaactttctttattcttcttccaaatctttcactatctctacattaaccctaaccttttttccactatttcactacctgtcatcaactctaatctttcttcaaaccaaacccatcataaaatcttccccctaaacacacccaaaagttacgaacataaaatcagtcaataagcccactccgatggtaaccgaggctcttgcactgactgctccgccctcacgccaccgaccatctggctcgagaacccaccattgttgctcctctgtctccacgacacatctacataaattaacaaaaaaattaaaccaactggtgataaaattgaccgctcaattaacttaaataagctctcgaggttgagattaatttggtataccgttgagagtagccgtagaccggaccggttcgcctaaattcagattcaggacctgagccagtctagccggaaccaaaatcgtcgatatagctaaacccaagagtaaaaacagttctcatcataaaactaaaatataccaaagattgacatttggggaattgagcttttttggaactcactgggcttctctcgagtctcagttcttgaagtatggttaacacttcgaggtaagaagacaccgattccggttgagccacgttttccggactggtccccgatgaatacagctctcataacatcacgcctcggaaactgattagaccatgcagaatacgacaaatccactggaccaacatttttgttgccattaactcttactcctctgttctgacgcaccaattggcgacgatgtttcattaactgttgctgctttagctgctgaaactgcacaagaagacaaatgaaaacaaaccaatcagcacaaacggcacacaaaaaacttcaagaatca

SEQ ID NO: 53505 - DNA, 964 bp, Arabidopsis thaliana landsberg
caacactggggatgggaccatgatttcgcttgtagaaaaggtcgacgggagtgacataagatgagactaaggccgagcggtgaggctcggcgttgaaaggttcctgcggatcacccaaatttagatgccatgaagaaaaaggctatatcagactagtgactgattcgattggaaagagagaagaagaagaagaagaagcttaccttggcgttgaccttgagagaagggtgacgaggtggttcctgcgagtattccgaaggacctctaattccaggcattcttctttcgaggaggagataccgaggaaatgacgattgagtgctttcctttgtgacgtctctctcttcttcaaaggaaaactatggaacggcgtcgttttgggtttgcgtctcaaactttgtggataacagacagagcccaaaatgagcccaaacaaaaacaaattgtgagagatggcgatggccaaacttcacggcggaggtatggcggcgatgcgtcttcttcttccttccccgatgacgcaccggcgaccatcaacgcttccgagcattgcctctttctctccacggagatacatcgttgcgttggcggccaagagaagccctaagcgtctcaaatactctactcctcgtttcaccaaggagggagaattggtgtacatcgaggtcgatccttgtggtgctgattcctggaaactccaacctgtcattgaccttctcaaacaaggagctgttggtgttattcccactgataccgtgtaaacaagctcttcctctcctctttacttcttcttcttcctcctcttttgcattttttttgaatttctgtttctccgtagatatgccattgcttgtgattgtaaaaaccattccgctgttgagcgtctccgaaggttagctacctacctctcactcttgctgcttttctattccaatccaatcctttgagctgactcgtgttagcc

SEQ ID NO: 53506 - DNA, 831 bp, Arabidopsis thaliana landsberg
  unsure (1)..(831): unsure at all n locations
accctaacggagatcccttccttacacaaatctatttaagactgagtgatagggtgttaatagacactttatatacttcatgtctcatctgtaaagaaaaaattattggaagattaatatgggaaaatttgaaaaagaagttaaaaacatttgataatacagtgtctgtcatttagtaagccaatgaatttagatctggaaaacacaaataacatatttggacagtgaagaaagaattttgatacactcatagaaaacccgaaaggagaaaagcaaaaaagccagatcacaatctcaaactcacttcttcttcttcctcactctcttattaggttcagttccttttcgattcttcgtgtggatcgctgtcggtagatttccgatttctttaggttctgctcgaaatcgtggtttagtgtttattatcatcgattcagaaaacggtgggtaaacttgtagcggaagatgaggcggtggccggtggatcaccggcggcgaggtagaaggagattgtcgagttggatatggtttctccttggttctttctctgtcgctggtttagttctcttcatcgttcagcattatcaccatcaacaagatccatcccagcttttacttgtatgtctttctctctttatttaataaaatttaattgctgagatttgagttttgctctgcttgatctnnnnnnnnnnnnnnnnnnnnnncttgttgtgctgacaaaaattgtgaattgtataacctaatgaattttaatttgatgatgtagtagaaattggtgatttcatttactaaagataagacattgggtgagtgtttataactgctaat

SEQ ID NO: 53507 - DNA, 618 bp, Arabidopsis thaliana landsberg
acaaagtacaaatccttgtccatattatttcatgttagataaatcaactaaacttcttttccaatgtttccgtagttagtttggaactaaatctgtctattgttcagaataatatcatgagtaattagtgagatatatagatcccaactctttttgattatttaagtcgagctttataaattttgttaaatactctcaacctcgtaaactttctgtagcgggaacgtatatcatttccttggaaataattttgctaattcttctctttctctgttctttcttcgtatgacgaaaatctagatgaaaaagtaggagggaaaataagactctggcggcatcttgaattatacgattacatatcagaaaaaaagtccaatatttattaaaataataacgacgccatcttcgctaaacttaaattacttatttgtcgtcaacttgttatcactttaagaacattttcagtcttaaaaacggttaaaaacaaggttatatattggcagggctatacctacatgcattagttgtacacactcacatgttaggtggttttggtatagtggtagaggattgtgttgacgtcttagattctgacctgacttgtgcaccttaatagag

SEQ ID NO: 53508 - DNA, 554 bp, Arabidopsis thaliana landsberg
  unsure (1)..(554): unsure at all n locations
aaaggttgaggatttagctattatataaatttggaagtaattttgaaaattcacaaaaggttgaggatttagctacagtaaccgaatcaacttcagttctcggagttttagtgttgttgctcgatctttggagacccttatctttcaatctattaagttttgatcaacgatccttatatcaaaattgtagagctatgattgatgaacaacttctattcctggagattgatgtgttactacatgaaatcgagaaaaaactagagctcaagttgtggttttaggtgatgaacaatgctctttttcagcttcctctatatttgcttcaccagccaccgacgacgccaccgccgtccaccagtcgtgctcgcgcgcgaagancgcaactgcttgccttggacatgtccgtgatgtgggtgacaagctctagagccgctcgggccacatgaagatcgccagcgatgccacgattttcttctcagcgtttccagcaccctcattgtctcctccttatacggccaaattggacgagcttgatgtatttctcttcaaattga

SEQ ID NO: 53509 - DNA, 1062 bp, Arabidopsis thaliana landsberg
  unsure (1)..(1062): unsure at all n locations
acttgaatgctttcttactatgacttatcttctctaacatttaattgataaatatatcccattattgtagatatttaattttattgggtcggaaaagagaaaaatctaaagcaaattttcctacattattattacaggnnnnnnnnnnnnnnnnnngtttgttcttcagcgacaatcgtcaaggttagtttttaatatattcaattttaattagcttcagccaaaagatttaaaaatttaatatttttccggggatctttcacaggttgatagttcaagaagaaatgggatattgttagaagctgtacaaattctcacagatttgaatctctccattaaaaaagcttacatttcttctgatggaacatggaacatggatggtaataatatatttaaattcaattatctttctaattacatttatataactttgtttcctaattcgttttcttaattactgcagtttttcatgtcactgacttaaacggaaacaaattgaatgaccagagcgtcttgagatacattgaacaggtaattttaagattcatgaatttgtttcaattcaagaacatagtttctaaatatagaatctttttcttttctgattttcacagtcgatcgagacggtttactatggagaaaacattgaagtaaacggtttaacagctttggagttaaccggaacagaccgaatcggtttactatctgagatgtttgcggttctctctgatctcaactgtgatgtggttgacgctaagctatggacacataacggtagagttgcttctgtgatctatctcaaagattgtatctcaggagctccgattctcgattctcaccggatatcaaagatcgaaggacggttaaagaacgttttgaatggcgataacgatgttaactctgctgcaaagacttgtgttactgtggattcgatgatgcatatcgaacgtagacttcatcagcttatgtttgaagatagagactacgagaggagatctaagaaacatgagagatctccatggtggttgtgacggttcagaattgggctgagaagggttactt

SEQ ID NO: 53510 - DNA, 1120 bp, Arabidopsis thaliana landsberg
aaatcatcattctaatacttttgttatcattaacgatttgtatttaaaagaaaaatgttgaaatagagacaaaaaataataacatttcattaattaatatatcctttccaatcatcacgaaatccgtccgtacatgtataaaacctacaacattacatcacaaacgacgcataatcatacatgacagaaccaaccatctatgattccattcgcgattgctctaggccttacacgatataattaattattacatccaatcccttaatacgatcatcagtaataataatcagacaagggtggcggtcggggcaaagtgtcttcctcgttaagcttcaccttaataccaaaagtcttgaaaatagtattcaagttattaaacacatcaaaagaatcacttgttagattcttcccaactccaatcccaatccccacttccttcaacaaaatcttgtcttcaatatcgtccaaacaagtcgaatgataccccatgattgacattaactcttttttacacgtaaaataattatgagccaacgtcgttacatctttccccgtagctttccaaaaatcggcgaaatcttccaacgcgtaattcaagtttttctcgcagctgttgaccactgcggttgcggttgcgtctgacatgtgttttggtttgattccagagaggaaagtcacactttgtttgacggatgtttcagcggcagccactaatgctcggattagttcgatggggtcattggtaggaacgtgtttaagggttttgcaacatagacttgtgtccgttgggataacggtgcagattcccgcgactgctttggcgtgcggtgtgaaaaggtagttcgttcgtttgactggtttagccgttgcggttgcggcaacgaatatgaagagaaagaagagtttgattggagtgttcatgattgtgttttcgtatgaacggagaaagggatcggaaaggaacggatctcggaggaagaagagaggttttttgatatagctagaaagataatccatgttttgtatatatttatagttcgtctatatttggcactagcttttagttttttttttggtaatactacatatggttaggagtgattcccgttaatttcgggtt

SEQ ID NO: 53511 - DNA, 611 bp, Arabidopsis thaliana landsberg
tcgactctagaggatccgcagcggctcgcagtctggtcgtatcttgaacttggtagccctgaagccgatggggcacatttggagttgtcgccgccaccttggcgcaggacaaagtgatgagctcactgtcgccggttgctgcagtgccgttagcgaagggccaaggccttgttgctctagcttgttcggcgtcactagacgatcgaggaacaaagaaccatccggcatttacagacgtcaatcatcttatcgtcaccgttaattattgcaaactcactgttaatatataatcgatctaaacaccgtacctgttgcacctgaggctcagcgcgaggccgccgtccggcacgacgatggggtgcagctcccagacagcctcaagagatggctgccctgctctggacttcaaataagcctggttgttcccaaaccctagcaaccagaacctgtccaggcctctgccgccagctccggaagcagcggacaccaagctgcccacttccatgacggcgtgctcgacggggcagtagcagccctggccagtgatacggcgccactgccgctgctcctccttctcgtctctgacacggcggcccaggcatcggcggcgt

SEQ ID NO: 53512 - DNA, 1067 bp, Arabidopsis thaliana landsberg
gacttaaactcaatttcagcgggtgttgtaggtattgagtatgattactgcaacttcactcgtgtggaggtcgatatgaattcccttataagattcagtagggcaagtgatgaaggtacgtaatactgataatgttccaagtttcaacttttgttttcagtttcttgattatgcgtacagtcgaacccaacagggcagcatatatatccgatccttaggcttacatttgatgaagaggaccgtattgatcctggtaccaatgcgccgcgtattgatcctggcaccaactttagtttcactcttcttaaatttccttggtatatacataatccggtaagtattgttacgtaaagtttttggatataattcttttttttatatatcgtgaacacttaataaactcttttaaaaacaaaaatccctgtgaagcatgccaagtttgctgtaaatgtgactgaagcgtttggtgccggtggatatccagaagacagaatctgcatctacttcagaactcgaagtactgtctcagcttaatcaagttggagggtgaaaaaatatgttttcaagtctttataatacctatatgagtctctcgcgctaccctttatgtgtgtttgtccaacaaataaaagaaaactctcaagtttacatgccctaatttatgatttcaccttgcctttgttgtggtccagggcagaagaaagagattagagaggacaatcactggcatcactgttatatcgaaaaagagaaacaaatgtttaaatcctggacaaaaagaccaaacacgtctaatttgtaataagtgtggatgagctaatataaatggcaaaaagacctaactcgtcaaatatgcaagtgtggatgagctaatataaatcgcagaaaataaacaagacacaaaatttgggattgaggattgaaaatacctactttccgggaccacgcctagatgtcgattcactagaacaagaaaacaaaaataaagtactaagcaaacgggaaaacaagcacaaaccccgtgaattacccgttcggtccaataacaaaaaaacctaaaaaaaaaa

SEQ ID NO: 53513 - DNA, 604 bp, Arabidopsis thaliana landsberg
caggtcgactctagaggatcccccgcagcagagtagcaactctggcgaggtcgatgcgcagaacagagaccagcagggcgcgtgggggacgattcggctaatgtgcactagggaggcgagcaggggcaggggcttggctggccgcataggtgggacgacgggcacgagcgggagaactccgacgcagccacgcaggtcatcgacggcgcgtcggcaagcatcagctggtacatggagcatgtgcagcgagcagcagagaaaccatgggaggggttcaatggggtgtcggttttatagccgaaagatggggagacgagtggtcgtcggtggagcgcagaaagacggacgccattgatggcacaccagcaatgggaagggggagggacagccgtgcgcagtggctagtcgggaagaaacgaatgactaattaaagaggagagctgagcgattacatccattaatggcgtgaagaggaatcaacgtcgtggtgggagagacagagacggtaaaggtgcttcatttccgagttgagcaggcgaggcggcgatgttgctgtccaaggatgcgtactcagaagaaaagatgggatgggagagaaaagcgg

SEQ ID NO: 53514 - DNA, 258 bp, Arabidopsis thaliana landsberg
tagcaggtgaggacatctctctttgcacggaggcagcggggatgcgacttccactggggtttgtgtactacgacaggaagataatcatgaagcctacgtaacgcaagaataactacatctggctatgctgacccacccgcacaccgagaacgccatgtataggtatgaccacataaatttaagactaattaataacccgatacctacacaatgcggacatagatgattgtaatcctaatcaaacattgggctaactaa

SEQ ID NO: 53515 - DNA, 674 bp, Arabidopsis thaliana landsberg
ataatagacatgttaacttaatccaaatgcaggttcatgaacggagtgattaaaaaaagcaatttcaaaaagagaagaaaccctaatactatgatagtcacatgtacacattcacaactatgtccaaaatataaattacataattcgtatcttatcaaattctgccggccgcatcatataacacgcagcatacactatagtgccttttcccaaaaacatactatagtttatttataactagattacatttgataatttgtgataaatattgtgtcaaattggtaggattatgttaatgatattgcttagtagaaaacagttgtatctttttagccttttaggcaagaagatgatgaaaatatcagagaattgagcggtaggcccatcactcttctgttcataaatgagaatcatgctttactctctctccctttttctcattcttcttcttcttccccatttacagcccaattccactatcttcctcatcatcataaattcataatactattgcactaatctcgagaagataaagagacaacaaacacctctctatctctctctttcttttttctttcttccgtttcaaagtttcttccttttgggcgggttttaaggaaattttggaatttctctctttttggagacgtttctttaatttctgggcttcttct

SEQ ID NO: 53516 - DNA, 716 bp, Arabidopsis thaliana landsberg
gaagattttgtatattcttctacctttacatttaattcggaaaaatactaataatcataaataaataaaggcataaaaaaaacatagaaccccacttcatgaaagtttcaagaccgaacctaataataatattattataccatcatatcctttgatcaacacaaaaatcccttttcccttttttggtttttctactttttttcttcctcatcaatcatcatggaaactaatctacaacaggtgaagaacagttctcaaactttttctgaaaagcaaaaccctaaacaagaagcttcaccttcaccaatatcatccacttgttcttctccttctcatgacttctctttcactatctctctccagcctctctcttcttcctcaaaacacatcagtcctactcttagaagcccatccaaaacgacatcgtcttatcaacaaaccgatcctttcgccgtcgacttatcccccgccgatgaaatcttcttccacggccaccttcttcctctccatctcctctctcacctccctgtctctccccgaacttccacaggctcgtataatgacggatttaccctccccgtcaaagatatattacccgaccagcccacaaacaacaacaacaacactgaaaacgctatcaccaacataagtaccgaggcaaaggacgacaacaccgaagacaaagcagagggcgagattcgggtaaaaaccaaacc

SEQ ID NO: 53517 - DNA, 610 bp, Arabidopsis thaliana landsberg
cattacattcttctggttttgacatatgccattaaactatttagactactaaccttgccattaaacttcttataaatttggaatacaccacgatgtactgtttttggttgaatctagtcttccagcaagtattcgtattttcctattgtccattctacccacgaggcccttggctttcgtttgcctatcgcctctgttcatttcccaccgctactcagccaccgccccgaggagctccctgtgtcgaagatcgccctcacacctgaagccctcgctagacatccccacatcaattatcgcctggtcgccggacgccccacgtcggtactcatttgaatgccagtgctcatcgccggagctccttagtccgccagacgtcatcgccggagatcaccctctcttctcacaagggatggagcaccccgtgaacacagtgagctctccaaaattgtaattaggaatcgtaacccttaactctgtcagttttggttggttgattttgatccggttgataggaacttgtacacagtagatatctgtttgggacttgttctcaaattctgagttaaggcatcatgattatcacatcttcggacattcgacggatcga

SEQ ID NO: 53518 - DNA, 478 bp, Arabidopsis thaliana landsberg
gtttgcactatggagggctgcacaacaccggaagtgagagtggctcaaagctcaggcacttctgactactgtaccaggcatggccttgcagtcctcgacatattttatccaactacaagatggtggactgacctatgtgaagcatggcaactatgtagctcaacagggacgaaggaggcatggtgggcggacgtaccttgcgggtgaagcggccgaaggtggagactaggggcacgacccctacctagcggccgacgcggcggatggtcacccggcccaatcgtcgccactagacagtaaggcataggagaggagagagagagtaggtgcatgcaggggggaggatttcgagctctgtctgctcttgctcacgtcgccttggtgccattgcacatttcagggagaaatcactaagccctaggttcgggcaagatgctcggcgggctatacgtcgacctcccaccgtcgtcgtcggttg

SEQ ID NO: 53519 - DNA, 1102 bp, Arabidopsis thaliana landsberg
gatgcagaagagcgcagagatcaatctaggtttaaaaattcgatttttaagttccgtaacagatgaaaataatcggagattgaagtttacttaccgttaaatctttcaaaatcagatacgcagatgcattaaagaggagatcgaaacggggaagagaagaataaagcctctctctttttctctctctcgttgatccgccgtgttagctttttaatggcaaaacgctaaagaaaatatcggagcaaacgacgaaaacgacaacgtttagttggtagctcagactcagagagtattgaccaatgtgcacgtgccatcggtgtgacctccgtgacggttaaatatttttcacggctctgacttgttttaattattcttttcttaaaccttcttgatgatttagaaggtttcgaggtttgaggtatattcgcttaaacgacaactcaattttttgtcgtcgtagctggttttgatgtttccgatacttcatcgatccacagttgtagaaaattcttccacatgaagttgaaattctgattagggtcttcctcgattcgcttttggtgaatcaaatttctttaatttcaggtgaatccttaaaaatctcacgacctctccgtttcttaattttttggtttttgtgataaaagctcaaggctttagattagaattatctgaaagttttcatctttttttttctttagctcttgtttttgtaacactttctggtttgtagactatggttgattttggaatttttagatttttgattgcattagtacgatctgattatctaatttcgatgattgtcgacgtaatttgacttgggcattgagaatttccaaactttctctgactgaaatttcatttttccttcatggaaatgattcttcctagttacttgttttgtctgtcttccatttccagtgaatacgcttttgacaggaggaccatactaagtcttgggaaaaccctcttcatagtgggtttgatctacaatgatgtatcagacaattcccacggcaccaaccattcgtggtggaactccaacagagagtggtgattacgttgtgactttggatcagattccacggtggagtgatgt

SEQ ID NO: 53520 - DNA, 634 bp, Arabidopsis thaliana landsberg
caggtcgactctagaggatcccaaaattaattacacaataaatgttaagagagttagtggtgcaggcagggatagtcgtatgtggcttacacttttctccgtcacacctcttcaaactttatcacgtggatcctcaattccgtattttattgattttatttcgttttcacttgcgaaattactaatttatatgctgttctcttgtgcaatttcattgaagaaatttcttcattgaatcatgaatcaacgtgtaatgagcaccggaccggacaaataagatgtttacatctccttgtaaacgaagatctttcttttctttactatactggtcactttcttattgaaagacaattacactacattgatattgttaataaatcattagtaggatgtggatttatctgatggtacattgttaccaaaattcctgatcaatctgaccgtagggtcttttgaccagtcgctttgactttactctttggcagctgatatccgaacacgtgttacgttagttagcaattgacgccgttagttgccatcgttaatgggctagcctaaatgattcatagtaatatcccaatatcttaattaagtctctttagcccatgaaggttcatatacagagtagtgtaga

SEQ ID NO: 53521 - DNA, 650 bp, Arabidopsis thaliana landsberg
acgtcgactctagaggatcaactaggataatatcaataggcattaaatcatgaccaataacaaaaaataaatgtctgctagctctaagaagcagtacctggctgggtatagtgtggtacgtttgaaatggcctggcaacaagatcattacgtatttcatatgtctctcctgaaagaagtcgttgcattataaggaaacaaacaagcagaaaacatccaaatcagtaatgaagcaatatccatacccaaatctagtgcaactaattcaacttttagctcaatttgactcgttctacgatggacttgaagcagatcctcgacatcatccctgatgcagggtggtacaaacacagtaggaggcttcaagttgtagaggcctcgggtagctatgtacattggaagaccaccctgcacgatcagcacagcagaaattgatgtggtattgtggtaatcatcagtgcgccattaatagttttatagtagttttgtaagagctggacttagcaacggcgcatgtaaaccttaggtgttagaggtgtataagcaaacaaagcaaaagcagaaatagagcctgcaaatatgaaaacagggccaatgcgctcacgatgtggtcgaggtgggcgtgggtgataaagagatagtcatggctga

SEQ ID NO: 53522 - DNA, 530 bp, Arabidopsis thaliana landsberg
gataggatataaataagtttataagatatatagatagatatagatacaagatgtagatgatcgatgcatcgaattaaaatattattgctttattttcttattgtgcaaattcaaaaagaaaaaaaggactcgtgcggcagaacaggaagaaagtgcggcttcatccaatggagctgaggtgtgatgattagatattagttatccaactgatttgctaagcttagggtcacatgctcacaccttacatgtaaaacactattagaatccaactctttgtcgagtgtctagctctttgctaatagcaatttatcagacactcggtaaaacatactttgtcgagtgccacactcggcatagaaagacactcggtgaagagagtctttgccgagagcaaaactcatcgcatagagagtctttgccggtagccacactctcggcatgaaaaggctctgacaaagcgtcgtcaggtgccgacggtagctggacttcaattacctttggcgagtgtttcaagggagacaccgccaaag

SEQ ID NO: 53523 - DNA, 660 bp, Arabidopsis thaliana landsberg
aggtcgactctagaggatcttccagatgtgtttttaactttcagactacatgtgacgtacatgacttcgtagctttgtctttagagaatttgcgtgtacttctgtgtcacacgttccatattaccacgtggatctacacgtgacaccctgtatctaatcgttgaatccattcaaaaatatttgtttcgttgtaattttcttattagttaattgtttcttagcaaataaaaaatggattagatgaagaaaaaacttaccattctacaaaaaacaagtacatcactttattgcatctatgaatccaaaatatcaaactttcttctacacaacaactgcgaataaacccatatatgtattatgtatatatttaacaatatataacataaattttaaaacacatccaaaaaaggtaacaacaatgtgattcttctaccgaaaatggtaatgctgaccaaatcttgaaaaaaagagtcattttttctgtagacaatggtagtcactatgacgtgtcggctttgttctgcttcacactttctggtgcctttatgtcctggcatttccaagacgacgatcctgctatgaccgtgatcgcactacgtctacctgcggctgagcaccggtaatggagcgcggaggaagtccgtatcttgattctagaat

SEQ ID NO: 53524 - DNA, 1241 bp, Arabidopsis thaliana landsberg
  unsure (1)..(1241): unsure at all n locations
gatctctatgcatggccttctctctctctctctctctctctcttcacctttacgcgaatttcaaatgcacaacttggtttggttttttattttattttattatctattagatcaaaatatttttatttttcatataagtacaaatcaatgagtagaaacgccaaattttgcattagttgtggattagaaaaacttcttagaatttgactattttgggggttaatggttaatagcattacaagaattaatattatgactgagctattaggaaaccggttatgaaaacaattgtgtatatatccaaaataatttatttagttcattcactagaaaaccctcaaacaaaaaaaaaatgtttcatcttagaatttttttttaaaaacttttagtttgataaaggctagctttaatatttgcaaataaaagtatgaaatgtgatgagcatataagagtatagaattgtctatattccacaaggacatataaactaataagagtacccatcaattcacgtgtgccgattaatcatcaccacaaaaaaaaacactctacacaataggcatgctcttccttgtcacgtatagattcatagatatccctaccatttctcatattcttctacttttacagtctgttttctcctcattaattaattgtttaataaaaaaaacgatagatatttagggtttcaattgctcggatttaccaaagaaaatggcagtcacgtgatttgcattttgggaagtacattcacatgcacaatttgacgacataataagaaaaacaaaacctattaatctctaaagctgagaaagaaatggttttgttgtccacatagagtagagagaaagggacgtgagcgagagagtttggacatcaaaagttcacatacaaaggagatttggtctcttcccatatattctgcaagaaaatatatttgtactgctgcatattattcgtgttttacttcggcttatatagaagtgggtttgtgtccacacattaatattattggatatataattaaaaaaaaattaaatgcgtgtgaaaaaacagtcgagaggtttttagataaagaaaaataataatacaaatatgatatgtactacacactacactcgagcagaatataatnttacaactctgacattngagggtgatgtgtagacttaaggtatcttatatagagataaacnagataggaacgatctttacanaaaataaattctaagaatgtcaat

SEQ ID NO: 53525 - DNA, 962 bp, Arabidopsis thaliana landsberg
atgatatatttttgttgataagaagtaaatgttttatgtatttttttctaataaaacataaacttaataattgtgttacgaaactcctaacttttgttttgaactgaagagggaaaaaatagaaatatatactaaaaaagtgaaaatattaattgttggaaacaattagggactaaaataggattaaagggcgtaacgcaaacccacacgttgagtgtgaggtgtcatataaagcaaaatacactcttccctctctatctatctacgcatcatcgatctcgaagtacgtttcggttttcaggccaatctctgaatctgcgtgacaaaagcaacaaattacatatctctctctctgcgcgacttcgaagatcaacatccatggcggtatgctctactttttttttgtgtataattttgttttatgcggaagaggtttaggtttcctctgctggtagatattgttgcgatccatttgtttatcgggaaattttctcaggattgatatttttggctattgatttgatttcttcttcaatttggatgatctgttgtttgattgctgcacttgccgacataatatctccaatgctatttggacgagtttgatgattattattgtcgttattaattgattctgtatctctgtgtgatctgtattcgtgcaattatctctattatctccttgatttctcggttatggttttcgtttatcgtagtaaatcgcgattgtgttattctcaatttggaaccgaatctcgctagccaatttacttttagattcctccatacattgtcgattagtttccttaattggtagccttcatggttcattcgagttttctttttgtatagtgagatgatgacagtcatcttctaagccactataatattatccctttacttgcataattgtataatcttgtgataaatctaggcttttttgagtctgagctgatttgatt

SEQ ID NO: 53526 - DNA, 1133 bp, Arabidopsis thaliana landsberg
  unsure (1)..(1133): unsure at all n locations
aagattgatgtttttgttaaaaggctaaagccccttatcaaccttaggtaggaagctagaaagatatcgtaagtttccccctttggaaggagtttttgttaagtgaagagtgacttggtacatttttttaaagcacgaaatgtcttttaggtgtcttattctttctttcacttgactttgaagatcgaggaagtgaagtgaagtgaataagccaagcaagtataacgttatacataagctttaagcctcaacataggttgttgctttctaagagaattaaaaggggaacgattggtttgatcgctgagataatgccaccttacgtataaaagatgtagttgttagatggatttcacaagatcatcaagttggaacaaaatattgcatatcgaaacttctatacatatcatcacctttgaaagcagaagacatggctattgataataaccatacaaagtatcaaatttcttgtcatactaattagtcattttcgagaggaactgccaaattcttgttaacatatatataccaaacgggtcacaaatggacataaacaactttcttattggttttgatgttaaaagacttgaacaacttatgcaacgatatcatgttttgggcgtcaaagtttaaacacatcgatttattcatgttaagagaaacatcaatgtaccagcacatgtcattgcaaagacggatcctttactcctttagagttctcttatgattcaagtttgtattcatttaccagattggttaacttcaggcattatatcgtgacactatttcttcacattaatatatttcctggcaaaagaaaaaaggatataactaataatagaatgatcctttatgttcaccaaatccatcctcgaatgttttcataaataaatagatcagtttatccttaattacgttttctatcaaagatatagatcagtatattcttttcttcaatcttttttgcaaaataaatatccgttttctgtttctgaaatactttggaatcaaaatctctcgtgaaacacgataaataccatanaagcatggtttgtaaaatattaaatttagaagcatgacataagcattcgattctattttggaacacagctgtattttcttgtcaaaaaata

SEQ ID NO: 53527 - DNA, 514 bp, Arabidopsis thaliana landsberg
ggtatccattgtaatgattgggttacaagcgatcatggatgcttatttgtgcctgttacatctaacagccggtatattagtcggtacgtattttggttataattgtactcgttaaaggatgccatcttcttatgctttttaattaacttattacttctttttcatgtaacatgtttagcttttattttactctgtagtgtcccttcattttgatgatattctttgttggtttttcatggaccattcggtccctcatctgtctcactgacccttatgctacctgacattgtgatgttcttttctttctcaattatcaatcagtgttaaacctaaagcttactacttctcatgcagaatctctatttaatgcatttgcaaccgctgcgttcttcaagttcgtagtcttttcgatttttgagatgagatatcttctggctatatggaaagcaacccgtccttccaatagcggagagggttgggaaacaatgaggagagaactgtcctttctgtacag

SEQ ID NO: 53528 - DNA, 556 bp, Arabidopsis thaliana landsberg
tgtttttaatatctctaatcaaatattagtgtatcctccttttttaccatcatattttttctaccgtattatgtttccttctaaatccgtaaaattagactcataaaacagaccaaacactccagagtccaggctctctctatctctccccggtacggtcggattctacggtatccaatcacactctatttttcaccgcagttaaagaaaaaaacacaaagtgaagtaaactcattactagtttggtttctcaacgaatccttacttaatcactctgatcaaataccattaattatcaccgatcctctgattaatcactctttaatcgtctctttatttctctctctctctcttcttcttcttcttcttcttcttcttcttcctccagagagcaccttatgctgattcctctccttttcttcctcaactcataaacgcgatcggccgattccttcacaattacgcttaaaattttcgattttgattattgggtttctctctgatcatggcggttgttgagactggagcagcagctactgctgctgatgcaggagga

SEQ ID NO: 53529 - DNA, 560 bp, Arabidopsis thaliana landsberg
catttctaaatttgtgtgcttatcaagttcactactatataagattatttctgaatttagcagtggctctttattttcaaagtagaaattgcttaacaattaacatcatacatatattgcatgtaaaaagttgtcaatgtcaattatacgagactatacgcttagtcaaaggtataaaaattaagatgaaagaaaacaagtcgagagtactcgatgtcatgtccaatccatttattgtctttttatgttatttaagaaccaaaaagaaaaactttaaaccctctatctatctatgatgaatgaagcatgtcgataggcacataaataatcgaacgctagggaaattcaaaaagtctatagtacataagtttcgacactgaaacaatgtgtgggcagggtccgatatgaggcacgttggcgtttaaacacgttgcatatgtataaatgatgatactgaaaaaatatagaatcaagtaaaactaccctaaatggatcattgataaaaagcattatatcttttcgatcgaccgttgcgattgataatattgcaaactatataa

SEQ ID NO: 53530 - DNA, 1109 bp, Arabidopsis thaliana landsberg
ttaacaggtttggtattttactttgaacgtgtttttacattgtattgattgatcaaatctaatcgacacgcgaacgtgaatccaaaatattagtgttgtcttttttctcacctcttactattttttacaataattcagctactgagctgtagaaagatagggtcacaagacaatatagtagctagctttgtagttcgattttgtatttttcccatgattcttattaacatggcaaaacaaaaagagataagcttcactcatcttttaacaatctcttcgtttttcgtggctcactcatcttcacaccacactcctatatatataccccctctttcctccgatagtgagagatagagtcgataattatggagagaataacgaccttatggttttggtttagtcttatgattttcttaggaatctctatcaatggaggtttgtctcaaggacagcaacatgttatgaagaagacacgttcttctgcagttgtagtaggaactgtctactgtgacacttgttttaacggcgccttctcgaaatcacccaaccacttaatctcaggtctggcttctgctttttgtttttttttcctcttgcagtcttgctcgtgtttttttggtaacactacttggaaaataatgttttttggattctagaacagagcactctgttttggaaacttatagggttttttcttgtttgtgggtctaaaatcttagaaagaattatgaaaagttttgtggatcttgttgcaggtgctttagttgcagtggaatgcattgacgagaactcgaaaccgagtttcagacaagaagtgaaaacagacaagcgcggcgaattcaaagtgaagctaccattctctgtgagcaaacatgtgaagaagatcaagagatgctctgtgaagttgctaagtagctcacagccttactgttctatagcttcgtctgctacttcttcttctctcaaacgccttaaatcaaaccatcatggagagaatactagggttttctctgcagggttcttcactttcagacccgaaaaccaaccagagatttgtagccaaaaacctatcaatctccgcgcttccaagcctcttttaccggatcctt

SEQ ID NO: 53531 - DNA, 570 bp, Arabidopsis thaliana landsberg
tctttcttttttttgacattatgtctctgctaaagtaatgcatgtcacacacagtacaagaaaacacgagtttcagacttcagtgtaaattaaaacaggattacatgtattgtaagcgaaaataattaacatcaaatagtaaaaatattttacactatgtaatgttaatgatgtgtaagattagcaagacttacacgttcgcggaaagtaatctaaattatatatttccattaacaaaaggtaatctagctagaattcttaattgactttgatagctagttcttgtataaacaataattcttttctcgttgatatttatatcaaagtggttatcatctatctaaaaatctatacataagaattagaatatccttaaaaattctaccattaactttcaatagagagttatcaaatatgaatcatgattacatcagtgtttattacacacatatttacacgtaacacataattagtttcatggtcatcgttaattactctgacgataatgtaaactaaaaccgggtggatttaaccggacccatttgccatcactctccataaatcctaacc

SEQ ID NO: 53532 - DNA, 771 bp, Arabidopsis thaliana landsberg
ttcctttttatcaaaatttcaaagaagttagggagaagttataacttactaagtgttgtaatgattattgtttgctttttagacgtattctttatgtgggtttaaatttggataataacagttgcaagttgtatgacatattgtggtggctgaaaagcccacaaatcttctcagttagtaagaactcaaaagttgtaatattaatttagacaacgttactttctttgttatccatctccggagaaaacgttacaatttgtcaaaaaagtattaatgtcaagctaatttctccgaagatggataacaaagaaagtaaacccaatgagagacatttgaaaaaatgagtgacgtgaacgtggtgggatggttatgatgttaacaaaagatcggtggatgtacaatacttgaattgttctttagtgtgtaggatgttgaaatgtctttaatgcttgaaaatcacaacatagtcattatgacctaaaaaaatcattattcgtgttagaaagaaaaggaaaaagtaattggaaatttatgaaaacagacagctttttaggttactgtagaaatgagaatttttaatacaaaatacttgttggtattgacaagtcaatacttccaatctttttttttgtttctcgactcgaatgcttgttcgaaggacaaacacatattgtggaggtatcgttgtccgacagtactatgaagatttaaatacaatccaaactgcaaaagcaaaacatattggaagcattagatttgggaaatgtgaga

SEQ ID NO: 53533 - DNA, 1251 bp, Arabidopsis thaliana landsberg
aaaactatttaaaactctgtgttaatcagaaaaaccaaataaagaatagccaaacttgtgacggtgcattgatctgaatatgatgccttgggaattccccacactatttcgttaattttcttgtcttcaattaattatccttcatagtttatatactctcggacttattacgtataattatgtgtttactataaataatcattcgaagacatagctatatataaactaatatagaaatcacatacttatgcttgtcggttataatcgatctctctaatagagttggtgaagtacgtttgaaagaaaataaaggccgacgtttagagagtcgaaattaaacaagtagagtccacacgctaaggactttaataaacgcgaattagaattttgtattttgtcaagtactatcctaccatacatttttgatttcctctttacccaaacctgccaccttacttacctacaaaattaatatatttatatacgattttgcgtttgaaaatgtctttaatcgagtaatatatttcctttttattttcaaatctcgactaaaatatactataaatagattgtgatatcctaatatgtattgtgattttattttgcattatttccggataatttagttagatagatcatacaaattacacctttcaaggacattagcaacgaacaattagtaacacaaccactaaccactaatccttcattaacataaataaacattaaacattaacgataataaaagtgtgattaaagtgagatatatatagataggggcaaaagacagtaattaaaattcgaatctcgaacacaccgacacgcttctttgaagtggcattttaagtaaataactccaaaaacgaggggtattttaatttgaaactcatcactttaagtcatccccttaacaatgtcgtctaaacaaatggtccgttaacgaaacacctttctccattgttcttaaaaagtcatcttcttttctttttttcttcatacatctctctctctctcaaccctaaaaccactcgtcacgcgccacgaactctacaccacattccccactactagtgaccatccacctctccgtctatggcgtcagacgccgttaagtatatgccaatccacggcggaggaacaacagcaacaaccgccgccgacatcaagagcttcttctccgctctaaaacccaaaaaaaacctcaactttcgcttacgctttcgtcataacctttgtctcattcactctctt

SEQ ID NO: 53534 - DNA, 1079 bp, Arabidopsis thaliana landsberg
  unsure (1)..(1079): unsure at all n locations
gatcagagacatatccaggggaaactgaaagagttggaagtttataccattttgaccaanattcttacaattgcaaaccagagatgtaatccgatgtaaaaagctaacctttgcccctgtgatccttattgaatccagactttctcttgccattatctgcttgatgcaactgaggtctctggaatctacaataaactcagaatacatataaaccaagattatagcaaacaaatcactgaaaggcgagtaagtagtaggaacatacccttgaccagggcctttgaaattttgatgctttggaaacttatttcgaaaatcattcccgttaggacctgaaccattggtattatcgacagactgcccctgtagaagctcaagttaacttaaagagcaagaagtactggaaacaacttagacaagtctcccttttgatagagaaaaagcaatgtaaataagaagtttttacctgtggtcttggctctgagaaacccggaggccctgattggtgattttgatggggatttggaaccggaggataaggaagggagttaaaggaattaagctgtggtcgagaagagaaagcatgaggttcacgagaaggctggaaaaagttgggaagagagtgacccataaggttatctgttagcaactgcaaactgaagattccccgagagattgggaagtagctggttgatatggttgggcatagcanactgaggaagttgttgaggcatattgttaaagaactgaggatgtattggcatattgggcattggcatgttgtgacccatcattggattattcatcatctgtggattcatcatccctaattgattagcgttcattgggttctgatacccattatgttgttgttgttgatgattagaaaacccattgatctgcaaatggcaaagcaaacacagagacatcaatacgaanagttttttacttttgtggtgaanaaggagagatttttattgagtggcacagaaatagaaggagaaagacctgttgctgctgttgtagttgatgtttgcggtcgataaggaccagcttgaggctggaaggaattgtacgga

SEQ ID NO: 53535 - DNA, 657 bp, Arabidopsis thaliana landsberg
gcaggtcgactctagcaggatcccctggattgaccctccttttcttccaatcaggagcacaataaaaacctctttgcgcaaaataaataaagcgaaaattaaaaggttagagtcgatgggtccaccaagcactagctagctagtgtgccactggttatattagtggctactgctatacaagctgtttgtttggcgtcgctgtccggccattgctgcctggcgtacacatttttcgcatcacgctagccatagccagagggatgagcctgagtgcaagagaaaaaaaacggcgttatggattttttttttttgtttttgtggttgtagggtacgggtggcggtgaggtggatctggtgtaagcatgccatcactgcatgcatcccttactctttttcttattttctacctctcgcttaatttatagctttgtgatgttctttatatacagttttcgtccaatacatgtcaaggcaagaagaagaataagaagaggtgggggagggaggtttgtagctaggctagcgttgctggtgtttattttgctgtgatagatgttattgtactaaaaattcaattaacttccaagttcaatttggaatataatatatggaattaaaaacaagctagtcgaattctagctagggaaaaaaaatggg

SEQ ID NO: 53536 - DNA, 369 bp, Arabidopsis thaliana landsberg
ttctctgatagaaaattcaatctctctgctttgtttaacagtgaaggcaaaaaaccccacaaaagaaatccgtcaaatgttctaagttttcttcaacctcttaaactcaatttcttcctcttttgcttccgtggtgagtcattctctcaacgatcttcttcttcttcttcttcttcttcttcttgttgctttctccggtgatttttttcttctccggtgataatcgattttcgttgaactgaaattttgaaaatcgattttactattcgacttgacttcgagtcttcgattgttgattttcgtcgtctctgttcttcattgtttcgtactgcagtagagttgctgacagagattcaaaatccccatcgc

SEQ ID NO: 53537 - DNA, 855 bp, Arabidopsis thaliana landsberg
catgttaaaaaggagaagaagagcttcctttcgtctcttctaacaatccactcttctcttccactaccgcttctgctaacttttaacaagaacctaacttaagagagatggaaggaaccttgaccttctgttatggcataaatcagcttctccttcatcttctcctgcaaacacacagacaggaaaaagacagaaacacaacacagtgagattgatcatgagaccggctatttaatcagagaaatccacgagtaataagagggcggttaacaaaagattcacgagagagatatcactttggatgaataaggaggaagcttcagataattggcgcatgtcatcacactagggaggtcagtatctgaagaatcgctaccatgctgttgcacaacaaaagaaaaagcctatgagaaaagagaagagagcatttcattcaatgtgagaaaatagaagttttttcagtccactggaccttgcggacgattgttagtttgggactgagagacgccaaaccaccatgaggtaaccggggagatcctgttacaaattgcaaaaaggctcgttgttgctccctatcaaactcatgcagaatctgcaataactggaatataaaacaattgaaccttttagtttatccgtgaaaaagaacaacataatgcagaaagaaaagtagatgttttcaaagttaaaaggaccaacatattcaactggtgggctgctagaagtatatccatgatcaaacttgatgtgatccaagacttcattcatctgcaaggaaaacacctttttcagctgatgaaaaagggtactcaacacgttccatctgaaggtttacttacactaaagagatcacat

SEQ ID NO: 53538 - DNA, 1106 bp, Arabidopsis thaliana landsberg
gaaggctggcgcttaagctaatcttgaaaaagcatacgaccgcataagattgattttcctagaggaaacgttagaggtagcaggattgtttgccaactggaggggatggattatgacttgtgtgacgggaccatgaatgagagtattgtggaatggggaacagacagcctgcgcctaggtgaccctttatctccatatctgtttatgctgtgttttgagcggttgtgtcaccagatcgaaactgcggtagggaggaaggaatggaaaccgattagtatctctcaaggaggtcctaagctgtcgcatgtatgtttcaaaaatgaccttatcctctttgcagattcttcacttgctcaggtgagagtcttagaaaagttttggagaagttctatttgacgtgaaaaagaaacaaaatttgatttcgtggaagagagtgtgtaaaccgaaatcagaaggaggtttgggttaaaggacaacaagagtcatgaaccgagccttaatatcaaaggtaggctggagactaatgaataatgtggatagcctacaagcgagagttctccgcatcaagtataaagtgggaagaatacaaaatggtacatggttgaccttgaaaggtacttggtcctcgacgtggaggagtatatgtgttgggttaagagaggtggtctcgacgtggaggagtatatgtgttgggttaagaagccaagcgagagctgggtcaagctttcgacggatggagcttcacacggcaacccgggccagccacgtcgggtggtgtcttacgggtaatgatggcttgtggttgggtggttttgcattgagaataggcatatggttagctcctctagctgaattatgaggagtctattatggcctagttatcgcatgggagaagggatatagaagtggagttggaagtggatttttattaagagttttaaaaacttttgattttgacgttttagccaataaataaataaatatttgaacgtgcaaatctaacatccataatcatcaagcccactttaaaacacagcgtatatgatgtaacgacaaaagttttttttttgtagatttaagatgcaagtacattaagattataagga

SEQ ID NO: 53539 - DNA, 402 bp, Arabidopsis thaliana landsberg
tttctttttttttcttgtgttattttgctctaaatgtgcttgagtaagcataggttttgtgttgtatcagtttatctgtgtactaagttggttgctgttgttacttatgtctaacctacttattcattgtctatgtgctgtctaatgtgttcgatatgtttgaatgtgtctttctcttattctactattcgtagtataaatgtgtcttatttatcttgcctattcatatcttcgctggtgttcattttctcatttgttatacttgattgacttatgtgtctgctagacgtgtttgtctgactctctttgccctaattgtctatattatcgctattttactccttgttgtggtctgtttttgtgtacttgtggtattactattctagtgtagtcctttgtatt

SEQ ID NO: 53540 - DNA, 1130 bp, Arabidopsis thaliana landsberg
taaaaactattttaaaaactcagcactataagactataagtctataagtctttttattcaagtgtcagttcttgttatgcaaaattttggtattaagaagtaactatacccaaaagttaacaaggacaattattcagttaaagtgtaactatacttttcacaaacaaactaaaaaacttgtaactagattagtagactccttaattcctaagtaaaaaaaaaaaaattgaaaaaaaaatttacttctaaacatatatatatttctttccattatcgtattaccaattttgatatccctaaaaaggtatgatatatatatgtttgaactgagataaattttgcttaattccaacaatcagatcttctatataaaaagcacttctccattcaaaagtataacacacaaaaaaaaaagtcatgacgagacagaaagtgaaaatgactttcatagaaaatgaaacagcaagaaaatcaacattcaagaaaagaaagaaaggtcttttgaagaaagctcaagagttgggaattctttgtggcgtcccgatctttgctgtcgtcaacagtccgtacgagctgaacccggaggtgtggccatcgagagaggctgcgaaccaggtggtgtcccaatggaagacgatgtcggtgatggacaagaccaagaagatggtgaaccaagagacctttctccaacagaggatcaccaaagcaaccgagtcttggaagaagttgcggaaagagaacaaagagttggagatgaagaacattatgtttgattgtcttagtggcaaaactttggtttctagtatcgaaaaaactgagcttcgagattttggttatgtcattgaacaacaactcaaagatagtaatcgtaggatcgagattctgaaaaggaacaatgaacaatcttccgccctcgttcctgttgctgcccctacaacatctagtgtcatgcctgtggttgagatgggttcttcttctgttggattttacgacaggattcgagatcaaattcaaattactttgaatatgaaacagaccacaaatgatttggatctgaacaagatacagtggtgagccatcgttgatcttatcttaagttgttgtcatttcaactatcaataaaaagttat

SEQ ID NO: 53541 - DNA, 505 bp, Arabidopsis thaliana landsberg
agcttattttctctagaatggatacggcaacaaagagaaacatattgttaaaacttaaaaaacaaatgacaaacaattttataactaaaatgtcacaaacaaacagaattaaccgaaaaataaataaataataaacaatttcactcaaaaatctaaatgaaaactgtaagcaacagtttccacaaactaatttcacaaccttacctttaaaccaacgctcaatctcactaaccgacaaaatcaatatccaaaatcgaaatcaaattctcctctacgccgcagacgacgacgacgaccaccggagactttcgtggatgggccaatcaacctccgccgccggaaattccatcctcaatcgacgacgaagcaaatcgtttacactgaaattcccgattgaatcaatcgaatctgagatttcacaacctgactacacatcgagtttacctgacgagtgcttagatttggtgtccagttcttaaactccggtaatcggaaaagatggggt

SEQ ID NO: 53542 - DNA, 627 bp, Arabidopsis thaliana landsberg
gtggccaaattgctttctgtctgcaaagccatcacacccgttacaaacatggtcataggatgcgccgtaattggcattgcatcaatggtggcaaatacatggttgggcacatgactgcggcgctgccagatgctggtaacattattcacatcggcttccgcgggcagttcgcccagcagcatcagaaagaacagtccttcaggtaaaggctcgccgccaccgggcgatttcggcagtttttcctgcagttcgggaatggaataaccccgaaaacggataccttcctgtgcatcgagcaggctggtttccgttaccagtcctgtaatgccgcgcattccctggtatacctgggaaagagatacttctcctatctttttggtaccatgttccttcagcaggttcttgacctctatattcgctgcttcagccttttccttaaacctttctttcaatgaagccatgtctgttctttttatgatagaaccccgcgaaaatatctccgccgggcgcttattctgaagggttaaagggtacgcacgttgcttagcggagcataacaattaagggtccgcccttgaataacgattacatcatttggggcctcgcgatagagatacatgaatccag

SEQ ID NO: 53543 - DNA, 505 bp, Arabidopsis thaliana landsberg
tctagaggatccccatggtgatttatccccgctgggaagcggggatgcgggaagaaatatcccccgcaaacgttcgagggaatcaccacggggaaatatttttgtcgcggggacgaggaactaaaatctgacaaggaatcccacattgccatctctaccaactttggggtactcccagtcaaggttaggtatgataatgacatggataccaactatatgatcaaggtacaatcaatgatagagtcccaagctaaagtggagttgaagtccaatttattcgcgagttcggttcgggctgtaggagtgggcctcacgaaaacggacgctcgggccacatacggactcaattttgtgcgttctagatatcgttggaaagctaaaaatataatctttccaactcagttggttccacattaaaatacgcccagagtcgatgggaaccgtcataacaagatgacgtccagaatctaccaaaaatcagcgacgcgtagttttttgtgtttga

SEQ ID NO: 53544 - DNA, 1139 bp, Arabidopsis thaliana landsberg
atgcttgtgactatgttcctgcattttggtttagagtttaataacatgataagtttaagttttagagtttatactttataagcgtggggttgacaatcataccaaatacttatttatagtttatttccagtttccttgtactagattaggaaaaattatttttgcagcaatttttttttgtagcaaaagaaacatgtagactagagactagagtaccctgtacccctatcattagtaagtaatcaattgatgtcaacatcaagaaattatttagtaacaatgaagtatcagcacatgtttttgtacactctgatcaccataaattttagtacttggaatttgataatggactctataatctttgatgtttaaataatagaatttaacttataatatatttgaaaaatactacagatgcacatgactaaaaatctttattcactttctttccaacatctctactctctagtactagtaagtagtaacactgaagaatttaaagttaggggcagaagacttatgcaaacacctaaccgcactcagtctcacgattgctcccaacaagccttcatggactactggttcttcttcatcaaacaacttctcatagaagactataccggactcagaccacggacctcccgtcaataggtacatcatctggcacaagttcaacaccacacagtacatgttttcaatttggtttattcatgttggatcgaaacattaatttgaaatttggatagagtcaaaagttggggactcaacattgatgatacatgtctcctatgctgctaagctacataatcacgagataattcttgcctacttctctggcctgcacttggggtctacaccactcgattggttctctgatactcacgtactttcatattctgcaagagccagatgcaaggaagcgcactcttcgattctcatcgtgtaacaagcctccatttatgagaactgggacgagaaaaatcgtttgtagccaccattccaccagcatgccaccaacacacgaacgtattgaagtttgttgacataaaggtcagaaacagagcacagtcaccactgtggtcctttaaatcccattggagtcataactcttaaactaagaaagattaacaataattgac

SEQ ID NO: 53545 - DNA, 404 bp, Arabidopsis thaliana landsberg
tattatccccttatttaaaaatcgcataaccttaatatttaatatatctaattttaactattctatttagattattttgtacattgtcacaatctatattatttcaatgttaatagatactctattatttgctagtaaataagaaatattcttattaacatattatcacatgtatcttgactaaaataactaaagtttatgatcaaagataaccgtatgattattcactagtatttttgttacaagtgtgtggcctacgtacctatcccttaatctttcactctagtaatatttaagttaattctcaacatacatattaaatttatcgttcattatacacgtgtctttctaactacataatatatatctaaaatttcattactgatcataaattagttcatgat

SEQ ID NO: 53546 - DNA, 150 bp, Arabidopsis thaliana landsberg
gatgtgtatgttttattttatgtgatttgttttattgaatgaatgagtggctctgtattaatgttatgtttatatgggttggtctgacacacttaagtatttgtgggctgtgtcgtcgaccgacggcgtcagctgcacgggtctggtaca

SEQ ID NO: 53547 - DNA, 590 bp, Arabidopsis thaliana landsberg
gatctagaggatcccctttatcgtcggcttcggctacgttggcacctcggcaccctcctgagtctcatgagagtcaccaacacagcctgacgactgtcagtgcctgtgatccaaattaaagtcataatatttcattaaattattcgtagccttaattgtatcgatcgcgtgggcaatagtcatgataaatcaggtttttttatagtactacattaaagggaaaaacaggttcaacaaaaacaaaacacaaaaaggcttcctagagccaagctggacctcaatacactgtaggctttacgttaatgtgtcatgtatacttccagtcagatgcacatgtacttgctagctagctggctcatgtattctgaatgaatatgatttgttcttattacaggcatacaacagcaaaactttactaattgaacacaaaaggaaggcaatgtcatcaatttgacgtgatagatcggacaaaagcgcattttctttcggcggctattagaacacaaagtacaattaaatcaatgctactcccttgaaacagtcgtactgcagtacacaaactcgtaaatgatgcagaactgcactaatac

SEQ ID NO: 53548 - DNA, 581 bp, Arabidopsis thaliana landsberg
tcgactctagaggatcccttgcagatattctgtatatttaatgttcgtaaatatttataatctgacatcataacatttgtacctataaatacttctttgtatggcatgtagagattggaatatgatgtagatggcataagcttagtgcgtccaaataatgcaaggccaaaggaaaggacgataaaaactagtgaacaaagagttgtgaaactgggtgcgaaaggagaaaagaagaacactcgaaagtgccaaaaatgtggcattgctgatggacacaacagtctcacctgcctatctatagaggaaaatagggttaaattggctagccttgctgatagaaaaagaggacgaccgcctgggtctagaaacaagaattcaacaatggccccgcattggaatgagacatccacatcaaaaaagcataaacatattgattctggagaacatagttcggatgacgataatttgacatgattgtaaaacatttatacagaaatatttgatgatattgaaatgttatgatcatgatactatttgatgaatatgaatatttacgttaaaagctcacatgtatggattat

SEQ ID NO: 53549 - DNA, 962 bp, Arabidopsis thaliana landsberg
gtgtaatgagatttttctcgtttggacctgtttgaaacgtagagcctgctaatgacatccaggaatttccttgtgacagaggctctgttgcttgaacaacagaatgctgcaattgctctgaaggtttagaagcagcagctggaagtggaggaggtgggggaggtgctcccgcttgagccaactgcggtcttacaggatgaggtggtgacggtgtgggtggcgaaaacgagattgctttcccatcatgtgctgaaggactcttcggaaaattctcctcggcattttctggagatttagaatcgtccacaagaggtttaactgttgcagaatgatgcacaagcttgagagaaggggactcttgatgtaacaactttgttgcatcctcgctggcgttttgttcctgattatttatctgaaggacagaatgtacatcttctgctataaacttcttgactgaatcagtaggaggcttttctggtgtgtcgattgtttcaacctcggacattgaagacaatttgaactttgcactattttcaattgctgcatgcttcataatatcatggatacttttagggcttaacccttgtagtcttgggcttgaattaccatctagtccttcttggacagcatttgcaatggctaactgctgaaacatattgcgtgtggcatctgtctgatcaacccaatcaacttgattgaagaactcatgaactttggaaaaaacttctattggaagaccatctttctcttccaaggaagaaaaattcatcaagtcaacagaagaggcagcatccatatctgagaagagaagcttcacacagaaagtactctttgtgagtactaagttacaatggagtagctttatgtaccatgtaaaggagaatatgaccttcctgaggtaaataccctaaactctgaacccccttttggggaatttctttttattttgcccattaaatgtg

SEQ ID NO: 53550 - DNA, 1112 bp, Arabidopsis thaliana landsberg
  unsure (1)..(1112): unsure at all n locations
cgctgaattgtgatgccaatgcagtcagggtctcagccgcagcttttcgtgttacccaatctgtacttccaaggcaatcatggatgctttctagcaatgactccaagctctgaggtgcaatggctcccacctgaatcaaagtaattgctctttacttctctttttcataaacagatttaaccacttaaacctactagcattgaactaccagaagtaaagagagagagagatattaaacccctcaaaatttcactgagacttgtatgctcaaatcaaacaataaacttcagcaacacctaacagaaaaagtgtcggattaagactaaaacctcaagcagtgttatttactaaaactttgtgttctacttactgacactgatattcaaaattcaccatattcttccatttgctgtctatagcatgacaaggaggagattataaggattctgggcaaacctgagagagacttgaaacaactggcaaaagggaagccttagcaaggaaactggaattgctcaatagcttgcaaattctagggcaaagcttttggaaagaagtaactggaggactagcagctgattcaaccatcctagccatacacattgaagctccagattgtaccactttgttctgctctcccattgcctcaaacaatggcttaacgaacaaacccaccgctaacgacgctgaaccagtattagtcccctcttcttttcccttgagataaatcccagacaaagcaccaatcgtatctctacaagcatccctaactccagaatcagaatccttcaaccgtttaactatctgagcgatgattttagtgagatgcgcagccgtcgaatcgcaatggagactacaaacgtaggagagaagatggagacactccttcttcactgcaggtttcggatcggagcacgaatcgtagagacaattgagaaacatcggtagggtttcgggagtgagagattgaatagttttctcgagatcctcgacggcgatctggtatgtatctcgatcggcgagcttagagattgaggtaaggatcttttgcttcagctccacattgcttggaacgaagtangggaacgggaattggacatgacctagttgct

SEQ ID NO: 53551 - DNA, 862 bp, Arabidopsis thaliana landsberg
cttctatattacagcaaccaactcgaatcaattctgattaatctaggccaagtttttctagaatgggatcagaaagagattatcagtggtttaagaagagaatcgaagaagcttacgagttcgtgtatgcagaggatagggaaaggaagaagaagaaagaagcaagctgcgtctaaaacttgtgaattgttacaacttattaatgtggttcggttcaaccgcaataaaccactcacgaatttgataacgccgtaccaataactctaaacccgattctcaaagagaaccgaaatatctttccgattaccagattaatccggtccaaccatgaggacattgacctttccaaatttttatcaatttcaaaaattcacaatatgaacatcaaattcttatttaggtaatactttatttatcctatagtaaatgtcattacaaaaattcgactagatatgtacatatcaaaaatgtgtcatattttatacatagttaagtaaattattcagtgtatagtacatattcaagacgatattaatacatacagctgatttgatttgcatgttgatatcgaattaaagattacagacgaacatatttgaccaatctagacaagatatatttttgtgttcataattgacaaacacatatttttgggcaaaaccgtatgcttctgaacaagaagaaaatataaacatcaaaaaagagtaacaactgattaacatgcttcttaaccgcatgagaaaggaaattcaataacttgatccatatcaccatatgcgtggattacacacctcaagtgtcccaatgataaagagattttaagatcaagggaaatgggatggtaataatggctcactaatgg

SEQ ID NO: 53552 - DNA, 623 bp, Arabidopsis thaliana landsberg
  unsure (1)..(623): unsure at all n locations
tcacttgctatcgatacaagaactagataaggcattaatggcataccctagggcagaagtgagtactcccgggagcatggacgacttgtcgatgagagcattcccaattcttggacagcttgccgactnnnnnnnnnnnnnnnnnnncgaccccttcgagactcatgcgccaatcatcgaacaacctggctgctttctccacctcctggacttgcttaatctgctccaccgcaaagtccgagaaagtcgactcctagtgcacttcctaatcgacaaaacgacgatcccatttgtcgtcatgatcaacgaacctccatgcaatctcatcaaggatgatctgagtattaggattcatcaccactcgctgtagccgcgaacacgtgaggtacgagtgattcaccggctgctccagatcgaacaccagcgatgaataatatgcccgagaacccttgtcttcgataccacttgttagcctcgtttagacactcaacgtatgcattattacatggtttggcaatggagaagaggaggaaggaggaagaagacgtggagaagaaggacatatttgtttgatacatgcacgctagacactacgctcttcatatctatatgctatattgtag

SEQ ID NO: 53553 - DNA, 558 bp, Arabidopsis thaliana landsberg
atcaatctcctcttctttggtgaccaccgggtttgaatctgatgccggtttatcattcaggacatctgcagaatccgacgaaataatctctttctccatcaacttagcttcctcgctcaccttattctccaatggctgcatcaggtaaaagtaaacctctcttataattcacaacaagaaaccttagaaaggtattgcttcgtttatttctctaactagaatcatactttggaacgtaagaagagttttctagaaaaagatggacaaagttggttctttaacatccatgtgcataatctacaactttctgaaaagttccaacttttttttccttctaataattgctgcagtaaaacaatggaagaatacacatacaagtatattggactctgtctcagtgaaagcatatggatcttacaagtatcaaaacgtgatgaagaaacctatctatcaacctcaaaagcatcacgcatagaggtacatatacataaatacatacatgagcacgagcttagaaaataagagtcaagaacagagggatagttttcaaaatagctt

SEQ ID NO: 53554 - DNA, 330 bp, Arabidopsis thaliana landsberg
tacggattgtacataactgattccacctgtttgtctccagctgattcagagacatcaacaatcttcgtctcttccctatccttagtttcttcttcaacaacactctcaacggttggcttctcttctgctttctccgcatctttaacaggttgaacatcaactggttccacctgttggacttcagcttcatctgttgattcagagacatcaacaatcttcgtctcctcctgatccttatggtcttctattagaacgttctccacggtttgcttctcttctgctttttcggtatcaacagtttcaacattaacttctgcaacagtctcttta

SEQ ID NO: 53555 - DNA, 565 bp, Arabidopsis thaliana landsberg
  unsure (1)..(565): unsure at all n locations
gacggcagtggaactgtaacacacctttgggaacgcgagtgcagcatccagagacgataccaaaagatcattgaactggcaccaagtgtcgtgtctgatcgcaagctgattgccaaggtgatcgaagatgcgttgagaatggccaaacatgttagtatcacggcccgccctgaacctacttcgctgatctctgcgtagatacattacgtctcacttggtacttttgagttcctcgtcaacccaacaacaaaagagtactactttctggaagtcaatccgcggttgcaggtcgagcatacaatcactgannnnnnnnnnnnnnnnnnnnnnnnnnnnnnacaattgctgctcgcccaaggcgctcctctaacccaatgtggcctaccagtagctccaagtagcccagaagtcccgccctctgcgcactctatccaactgcgcatcactgcggagaatgttcagagtgactggtctttatcgattggcaaaattacatctttccaattcccttcaggcaacggtattcgggttgatacgcacgttatcagcggtcgacatgctgtag

SEQ ID NO: 53556 - DNA, 810 bp, Arabidopsis thaliana landsberg
  unsure (1)..(810): unsure at all n locations
gtgaacaaaaaaaataaacaccaaaagtattcaataaaaatgtatggaaaactgaaatcatgctttcatctttatgaacaatcaaaaaacgaagaatgatattatccaacaatgttgtggattatctatcactttgaaataaccacagagactttaacatatttaacttacctagtgatattcagtgactctaagtctggataactttcagctactagttgcatacttttgtccgttaggctctgcatcaattggtgcacattcaaatcaaaattcgcatccattacaaacagagaacatagaagagaaagggtgtccatgtgtgttaaacattgccataattatcgccacccatcaggagtaagactccaaaaatgtagattaagataccttgcagccacttaagttcaaatcagtgatatgtctgcaattcttcactagatttctaatgccagcatcggtcaccctgtgaaataaaccaaagcattaggctcgtctgaggagataaaatcaagaagtgtgatacaaatgagtaagacagaatctcaccttacgttccagtagatagagaaaacttttaactttggacatatgctagttatagcttcgattccattgtctgatatcttttggcacacgttcagattcaaccattctagactcaaaagagcattcgggcactaaaatgttcataaatcagccagtacattattgtaagaaatcgatccacaaagtcaaacaaagtcaaatattcttgaattcgacgaatattcagaaaacatannagccatatgtaattactaataactg

SEQ ID NO: 53557 - DNA, 974 bp, Arabidopsis thaliana landsberg
ccaaaagttgagagactatagaactatgaaaataagtttaatagtacttaagaaaaaaaattgatataattttctgttatgttttctcagattgttttctacgattgatgctactttttttttttttttgtcgctacgattgatgctacttagatgaattatttattcgcttgcttgataaggttgtaatatttgctgagataatttaacatcttaaaaccaaaataaatctaacatcagggatcttttagcaaatgttttcacttcttaaaatgcatatgatatcatccacatatgttactgtaatatcatgaatgttttttggtcaaatattatcattaatatatgaccaatattcttgtctattttggtcaaacatagtgtggggaataaatctgaagtagtctttaattgtttggtatgaatttttgggccttaagtattgttatatgcttcatatttggcctttatagacccaaaaaaaaaagtatatataaaatttccatgaaaaataaattaagattactctgctccgaatgaaaatgatatatttatatagatcaattaatccactacccacagagaagaagaaaaaaaaccatcgcactcaaatataggttgaacacttttaattgtgaacaacaaattagttcggttattgcttcccaacaaatataatcattttctgttagatgctatcctccaatcagatttcttgaaaggtaattctcaaccatttcattttcacattaaggtttttagatattcatttacctttgttaaccgaaagtttaaatatgaatagttacacgttatcactagatgtcattcattcttgtaaactacgaactatggtgattattactagaagaaagtattgtttttaattagaacatgtctacacggaaatttttacgaaaaatttaaaaggggttccaaaatttaaaggcattgaattggacttaaaattttat

SEQ ID NO: 53558 - DNA, 1151 bp, Arabidopsis thaliana landsberg
ttcattcatgttttagaattattttagaaagacctatatatcgtatatgtttcatgataatttggagttttcattcataaaatcaaataaccaataattagtttagttaaatattcaattctaaacacaaaaacatacagaaatgaaagacacactttgtatggctaagtttaatttaaattattggaatcacaaagtgacgaaccggaccgggaagaattgccggcgcgtgagggacacgtgttctcatctttacgtgcgcagaagtaaaggagtactgttgttacatgggattatgaaaagtacctaatgggctagcgacacgtgtctatatagtgtcgatgacttggcatgtaattaaggcaaaaagaaaaaaagaaagcctccttattattgaaatcacggcgtaggttttttgatggctttacacgtgtagttatcacacaaccatttaagattagagaacacgtggaactcagtaatagattagtgggccccttttgtgttgaacgacgatttttttcggatgagctgttatttttttgactgctggattggacataagtatatgacacactttctcttttttttttaaacaaactaaaaaatgtaaagaaactaaaaaaactttttgatcgaataaatgctgtgattttgacatacgattttttcttcctcatatgtatctattttcagtgcacctttcaaaagttatagatgtcaacaatctattgctgtgactttttggcgattcttcttctaaagaccctaatgattttcttcgtcactttataaggcaaagtcttatgttgttttgtgtgtaaaatgaacataattaaaccaaaaagttttatgttacaggtgtatatcaaattcagctttaaaagatcaacaattactatataaaaaaaacattgtgtttagatgtcctatgtatgaaacaagtatagcttttaaaaaaaatactcatggacgcattcaaactgcttagagatggatctcacatttataaatacaaagagaattttcagtagctaagaaaaaaccgaaacttgtgaaaactagaattaaataaccatgctcagacacgaaaatacattcagtcaaaatttatgtattatgtgttttcggaatccatttgccacatttcg

SEQ ID NO: 53559 - DNA, 1363 bp, Arabidopsis thaliana landsberg
ctaccaattttacgatttttttgttcctgtttgaactttttttaatcttcccttctccatgagaaaactttattctaacaattaaaagaagagtacttttctcttgtcaatcttgtatgcaatttgttttgaacgaagtgttacttttactatatatctttctttccatatgtgatcttaatatttaatgcccccttattgaattggctcttataatattgcatgaacgtacacatgcagaagtgagagaattcggggatctacaataatgtatcgcttttttagagtaacccatttgctgtgttttgtaaagttatacctttaatgcatagactagggaatgtaatgtatacgtaggcgtatgctttaaacatgcatatactggatcaagtatgcaagtatacatggtaaagcagagcagatgtagagagagggagagagggactttacgtagaatggtcaaatggtaattaaggcgaagaggtgatttgcagagtgtgggaatgctgggctttgtggagtcatgaatcgcattaaacgaggacgtgagttcccataatcctagtggggtttagagagagaagcttgagtgagagagaaagatagagagttaaaatctgcttttacaaaaagtttataagtcatttcattgtgagtgataattaatttgcctaaaggttggattttttcggttggaatcttaggtttggcttactatacgaaggtgacaccgcccattttattttattgttttagattttatagaaatgcatatgtttttttttgtttttttttcttaaaaatctttcgtattctgcaaaattagttgtcactagctcacaatatattacccatacacaattgtttttagctggctattaaatgatgttttcagattaaaaaaatatatacaaatttgtatcatttgtgtaatttctaatgttgtgcgtttaaccaatacgtaatagaaaaggaaacggaggagcatatatagttaacgttatactatagtaaaagatattttatggcacacaatattttaaattttgaagtttaattaatcgtatgaaatatataatttcacaaatgtctactagtctacgtagtaaaagttttaatagagtttattaaatctatgcttattacttactgctgaaaaattagacataattaattatggttatttagataagttttacagaatggaggaattattcatgagctagaacccgttgcatataattacgtcaatcgtgtgcacctttctttatagcagataactttttgtgtggatgattttctatactattaatgttatcgccggatattcactgaggtttaaatcccacaaaatacgttggta

SEQ ID NO: 53560 - DNA, 1160 bp, Arabidopsis thaliana landsberg
tttggctttatcggacaagctcgttagttaaggattcgtctgcaaattaatatttgattggttacatataacataattggaagggaatgagatttttttattttctgaagtaattgaaagggataatgcactactctcttcacttgattctagtgtatatctatgttctctattaacttggtctatcaagctcatcagtttgatttcacatttatagctcaaattttcaagtcaaaattttcattgtggccttaaacatattattagagagatttgaaatggctgatgatataatcatgtacgaaaatgctccggaacaaacatagtttctttacattactattacaattctgccaatcacgtcgataatgtagtgccatcgtaactttgttacattttctttgcaacatctagttcaaacacatatcttcttactttttattttataaattatatatattactagaatcataaaagaacaatgaaaatactctaaaaagtgatttttttagaactttgaatagccaaatcccagcgactctgctcgtccaacacgtaaggtttggttagatcaatgttcttgcttagctcctccagcttcttgaacctgaatttctcgctttctccctccaactgcgcgcattcatcaaaaaagaagagaagtacattaagtctctctgtctcaatactgtcataagaacacgatcatagtgaatataaacaacacttttgatctagcaggctcaccacatagtacaagcgttgcaatggaatatacaggatatagtgcaattacagacacgacatgcaaaaacgcatgattgttctttcggatatctcacttgcgaaatagaggtgctaagataatgcgttggatctagtttggagaaaataatttccaagcacccaaacatggaaagtcctgatctagagtctcacactgacttcacttttcacaaattgtgaaacccgttttagagtcaagaaattaactattaaaatgacaaacttgcagactggattccaaaactcggtaagatgacttcacctattgcaatgggagtctttcccaagtcttggaacaaaactacgggaccaatgtgtttacctaattttgtaaggttctaaacaaaggtaatggtaaaatttatatgccctac

SEQ ID NO: 53561 - DNA, 1186 bp, Arabidopsis thaliana landsberg
caacaccatactacactatgtatatatgttttttttttcattttagcttgtttaatatcctataaatatggctgttgctgtatgatttcgtaagaaaaaaatctagaaaattttcaaatttttgggtcatatacatggacagagagaatggataaacatttactggtttgtaaatctcttcctcttatttgcataaacgttctcatcgttcttttggttagtgatcagtggatttgtacttatctcttttctcttaacgatgagtgtttgtttcggcttcatagaaacattacacagactcatgagaaaatgtataaaattttgcaaattcctaaccattgtaataaaataatagttaactgtcttatctcgttgacagttttcggataaattagaaaaggcgggacccacgttaatcggaagatatcaacggctggatcggcttactcagatcaacttcagcaaaaaaaatgccactctcgttgcaatctccgccttgtgcaactctctctgcttcgatccaagtactctcctcgtctgatcaaattctttctctcttcgcttacttctttcactcgcatgtatttgtgcattgtttgttttttatctaatggatgcgagctttgaacttcgcagaagggacgatggaagacgctcgccgccggattctccgttactcctcttcccgccgttaacttcagtctccggcgatcgattcctcggattcttgcttccgctagttcctcctcctctccatcgtcttcgtctctcgaagctggtatttgtttatatctttgatgatcgtgtttctcattaattaataaatacgatttctggaaagacaaaacaaaagtatgggtttttgaaagattgactacgattcaagctttctttttatgtgggtttgtttttgtaatgtcttgaatcacttgttaggaaactatgcttgacaaagttgctatttttggttaaagtaggaacctttcttagttcaggaccttctggttgctttagttcttagctgaacagtgttgatttatggttgaatttgaagaaacacattgtgtatttggtgtttaactttgttcttggatgatatcgggtttcctaaagttctcaactttatattttctcgaatgcttttaaatgatcattgagttgtttgatgaaaattgtgttttttttt

SEQ ID NO: 53562 - DNA, 828 bp, Arabidopsis thaliana landsberg
  unsure (1)..(828): unsure at all n locations
tcctattgtgtatattgcatatggcatggatgacaaaaaaaaaatactatctctttattggtcccttagatttttagttaaaaactattaatccactgagatttttctttatactaaaggtaacacacacatgtcacattcatttggtaaactctcccgatcactcttctaaatacactaatttggggtttgcattgttatgaatactttgattaattatcttctaataacatgcaagtatgaacacactaaaggttatttttaagaaattcttccgtttaaatatatagaagatatcagataaaatatcaatttctatttggtcagaagaacgataataagtagttatcaaacaaaataaccataacaagtttcttaatatgctatttcaaaggtcaagttcaagttgacagaaaaaaagaaggtcaagtttaaattagaaaaatgaaaaatccacccaaatttacattgattatatacatataacattgcccaaaaaccaaaaaaaaaaatcacatatacccatataggctcaatggcaacaaagcccttcaaaataggcccaaaagatcgtcacagcgaatatcaaaaatcaaacaattcatagattaaacccatgtgatatgtaattatgtatctcctacacttggtttctgattttacaatcacaccatttgtatcacaactatctatagaagatgaagacctctgacgtctcatttgatcttttaccagaggccagctgctgatccgttaacatcgccaagccgattcatcatccaatctatgatatcacgaccgactttctnacgctcaggttcaaagaga

SEQ ID NO: 53563 - DNA, 1102 bp, Arabidopsis thaliana landsberg
ttgtagactatggactttgtcaaaggaaagcacaagatccggagtcacaatcatttgcctagtggggcaatacttttgtccatagaacttaaaagccgggcacggcacgtgttggtttgacctgatagatcaaaactaaacatcatccaccacattaccaatctctaacgaatggcacacatcccaaatcgttcacctcatatttttctcatgcaacatcaggaaacttttcatttgtgatgaataaagaagaaaacaatgaggaaacttttcatccactaaaatgtgagaaagaagaccaattattattcatctaattacccaacaaagaataaattacatattagttggctaaaattagattaacttttgaagaatttactaatcgaaaaatcctaatcaaaccgaaatttcgatcgagcatagtagactgagctggccagccgctatgatgtcacaattcattaacacaaggaaaaactaaagaacaaaattgatcattttgagcccatgtcggcgtttagatgaagcctcatggagaggaactaataacaaacttgtttaatgtcctctgcttcaatgaggaatggtttcttgaagctgagggtaagttgaatgcgaaaagttttggggaagttttataaaatgctcgtcgcgggctagaccacgaaaagccataccaagcgaataacctaaagcacgagaaaccgagactgccactgcatttccaatctgacaatacctgtagatagtgagaagaagtgaaatgatattcgcatttgcttagtagtctgaaactattgtcctggttcttataattttttccaaatgaacaaaagcaagtacctttctttaatggttccacagaactggaagtaatcagggaaaccttgaagccgtgcagattctcttatggttagcactcgatcttgctcaggatgcaataacgcctgcaaatagcaaacttcttatagaaacttttaagaatttaaaatatggtatcatgttaaaacctggaatggctttgagggtacctgactgtggcatgttgggactgttagaacggttggaacagtttcatcccaccaaagacgagcaaacg

SEQ ID NO: 53564 - DNA, 1191 bp, Arabidopsis thaliana landsberg
gaaagtgcggagagaaaggttgagcagtggaccaataagtattggaacttgagagatccaaaataagataatttcgtccatggtgaaagtgtaattgtaagtctggtttaatttgtatgaaaataaatagaatccaattttgccagtctggttaatttttgtatttgaattgactaatagagaccctataattaatgcatgtcatattttttctcatacaatctaatttgatttataatcaagagattctaatcggtgttaaaaacaaaatgaaatcctacttgatacattagaatctatcttacttaaattttgcagacctaatatacatgcatctagtagagaataatataaattaagtagaaataaataatatgttgctcaaaaaaaaaagtagaaataaataatataaaacagcaattaagttatttggtcacatatatttcctgtattgccaataatttaagatatttattacttcttttctaaagcctaatatagtaatttaatgttcattatatcagattacaataaacaattgaatcttcttaccaaaaaaataaaaataaataattgaatctctcttataagtaggggtttttttttctgagaaattaaacgaggtaatctaaatcgaaacctgcaactatgaagatgaacaacagaggttttaatcagaagccacgtggaatttatcatcaaaatctgagttccaattctaaattagccaccattctctgcatcatcatcttcattctaatctgcagtgcttggatggatttggtactaaaattctttctcattttctaatcattttatacatacatacaactataaaattttgacttttcatatagtttgtaataggtaagatccaaatgatgactacatcaatattgacaacgacaaacacaatcatcaaaatccctttaaagtgcaacgcaacacaaacatgtccttcaacttatccaagcagattggaaccaatgatctcttccttggaaacttgtcctgactacttcagatggatccaacaagacctaaaagtatggcaagagacagggatcacaagggaaacactagagagagcaaaaccaaaggctcatttcaggctagtgataagtcagggagattgtacgttcatcagtacgacaaggcttatgagtcaagagatgtgacacaatctggggg

SEQ ID NO: 53565 - DNA, 1286 bp, Arabidopsis thaliana landsberg
atatgatgtacctatactcataaaagccgcacttctctcgttctctgcgtttccccagttatgccaaccgacatttctgatacacgcatccatgtaagtgtaagcaaggactaccctcccaaatggtccccatggccttccgagatacatatacccgctctgaccattgcccgtgatcacacacctgcacacaagtcagtagaaacttagtttccttggaagaatgtagaagctgtaagtaagaaacggtaagtaatccttgtgaagcagaccttaagaatacataaccagtagattcctgagacgattttcggctttgtgctgttataaacccctgagatttgcagtggatatggcagtgttccaagagtgcggtactgtttccaaatatgaaatccacacttccctcgatgtaacagtctttcaaatattgattcccatgatgtaaatacaatgtatcctgcatttcacattttgcaaataagctataacaagattgcataagcctactagcaatataccacatctaaactatgaacaaccaacacaaagtttccacaagtttacacaaatcatttgaatcaaaggactgctaaacgaacctgccagccgagaaatcgacagttataaaaggcgcaacggtctgcagtgactcgtatcgcaacagcttgccctgatccctatatacaaaatggtcaaataacaaaactaggcattaccaaatataacattcaccatacacaactcttgattctaatctcagcagaagaaatttccaaactttgaatctgaacattaataagaacatacaaaggaagcgactttatagatccctaaactaagttgagtaaagtttctaaactttgtgtaataataaaggaagagactttaaatgattacctcaggagcagagttctcaaaagtaatgttctctgcaataaaatcttcaccttcaacaataacactcccacacccaaacgtaccagtcccaatgactctagacgcctgcaaaacaaaacaaaccaatcagagccgtacacgtaccaagaacactaagaacatagcaacgttacctgatgatgctcaatcttggaagctgtattgttccaagtcaaaaccgtgatctccggtgagattccggcgaaggtaatgaaattcttcctcttgggtacatacacaggttgccgataaatcccaggtgagagacgaatccccgttctgcaagtgttacctaaaggtacaaaataaattgcgtcttgaacagagcagtaatctcccgaaccatc

SEQ ID NO: 53566 - DNA, 1395 bp, Arabidopsis thaliana landsberg
  unsure (1)..(1395): unsure at all n locations
ctgcaggtctgagagaggatcccctgactgctcttcatcgtgtaaatgtttgggccaatcgctggtggttcatgcgacaaagggaatgatgttggacaatttggacagtgtatttgcacttacccttgtccggctgataaaactcatgcaatcaaaagttcaatttctcataatatataagcggaggttaaaattcgtatattttcaaagtattagatgatttgtttgtgtaaacaacattaacttatgtccattgttctacatatgaataaaaatataatatttttggttcaccacttttgcgtttaaaattaaacagactattaagatcacaaaaagactattttgtctacaatcaaaaatattttatttgatgacttcaaaataggtagtgccatagacaattacacttacatacattttttaccctacttaagggatgctatgtagaactttgcgttacataaatatgtagatcaagtgtgcgtttcaatctagtctaaacagaactattaagatcacaaattttgatttttttctatctgtatttttttttaaatgtcttacaaatatattgttgattaaaaaaaaaacattttatctcagtggagtggtgatcaataatacaagtacaatttatcgttcattttagagcttttttaaaatattcataagctcgtgttaaacactagatctagcaaatacaaattaatatttgcttgatttttcaacaacacaaaatataaataatgaacatgcattgcaacttttgattaataatcagaatttatttattagtagttttaccacatccgaatctaaacatgaaagaaaaatacaaaatttattgatttttgcttattctagaaacatttaaaaagttttagcaattatattggcatttacacaaagaagtattgccaatgctgtcacaaaatccacttccttgattatacttttgcgcacagttttggttgcaacactgagccccacatctatcgctgcaaatgccagctccaccataacattttttgggctgcggaggcgatggaccctgtccgcaagggtaattgcatgtgcatagttgaaatttggagtcacaagcgcctttggccgctggtccgtgtctggccttgcatctcacgtcacattgctgacaattaccaataccctcgatgcatgtatttgcgtttaccttattctcaactgtaaaagagtatacattatttgtttttttgttttttttcttagtatataaggaaattaaaccattggtggaatctactacaagtaacggaaacgatcatataattgtgaaaattttgagctttgtcaaaaatgaagtataatgatcgtggntttcttaaatgagattacaaatatgtgccactgtgc

SEQ ID NO: 53567 - DNA, 240 bp, Arabidopsis thaliana landsberg
  unsure (1)..(240): unsure at all n locations
cccccccccccccccctcccccctccncccccccccccccctccctccctcccccccccccctcccccctccccccccccccccccctccccccccccccgccccccccccccccccccccccccccccctttctctccccccccccccccccccncgcgccccgcnctccccccccccccgaaaagaaaaaaacaccccccccccccccccccccccncccaaaaaaaaaaaaaccccc

SEQ ID NO: 53568 - DNA, 363 bp, Arabidopsis thaliana landsberg
gctgcaggtcgactctagaggatcccccagaagacgaggaagaagggaaatacaggtgtgttgggaggaagaagctagcgggacactctaacctgagtccgaggattagactcgggagggatcgggaacttcatagtatgtgaagcaagttcccacgtcgctatgtggtctgtagacattctggtagaagatgatgactagagcttctacggccagggaactcggaatctctcggagttcggacggctcgtcaccatcgaggccgtcgcatgcgaatgcacgcgactgagaatcctgtgcagctcgccattcgactgagggatctgctcccagcgtctggccgcagtgagagctggtccggcg

SEQ ID NO: 53569 - DNA, 976 bp, Arabidopsis thaliana landsberg
actctcccatagcttgaacctccgaacaaactctttatacctctgttcccctccttccccaagtcgccgcaccgccaccggaactccattccctaacaccactttatacactatccctaacccactcttccccaaaacatatgcagaagctctcaacaactcatcaagctcaaaagaaaaccctttatcaatcgctacaagctctccatctcctttcccttctcctctctcattaccttccgcttccgaatcatcctctttcggaaaccccgtgatacaacaacacgatttccccttcaccgaaccaccaccgagtttcgcattccctgtgcagctacaccctccctcagagtcttttttcttccagtacaagtaaactaacactaaaccaataaaagctacacttgctgcatctgccaccgagatcaacactattaatccagtacttaaccctcttctagaatccgcattattctcgggcgactttcgaatccccggagagttctcatcagtgtctttacaagttttctggagagggaaaccacacagtttcggattattgagaaatgcggttggcccctggttagagaacgaaccagattgaggaatctcgccggagaaatcgttgttccggagatcaagagagactgtcaccggtagatttcctaaggaattagggatttggccggataaatggttaaaggagagattcaaagtaccagagagagacttaagctctccgatatccttagggatttcgccggaaaattcgttagcagagagatcaagctgagctaaattagtcaattccggccagatatcaccaggaatctcaccggaaaagttgttagcggagaggatcaaccgttgaagctgttacacttgttgagatcggtgaaagagtccagagagcgaatcatagcaaatcgaggtctgaactttgggagtttcagatcgaggaggaagagtccggaga

SEQ ID NO: 53570 - DNA, 412 bp, Arabidopsis thaliana landsberg
  unsure (1)..(412): unsure at all n locations
ttnnnnnnnnnnnnnnnnnnnnnnnnnnnnnnnnnnnnnnnnnnnnnnnnnnnnnnnnnnnnnnnnnnnnnnnnnnnnnnnnnnnnnnnnnnnnnnnnnnnnnnnnnnnnnnnnnnnnnnnnnnnnnnnnnnnnnnnnnnnnnnnnnnnnnnnnnnnnnnnnnnnnnnnnnnnnnnnnnnnnnnnnnnnnnnnnnnnnnnnnnnnnnnnnnnnnnnnnnnnnnnnnnnnnnnnnnnnnnnnnnnnnnnnnnnnnnnnnnnnnnnnnnnnnnnnnnnnnnnnnnnnnnnnnnnnnnngatgtctaaatgcacccgtaggcgggtgatccggcttagggagtagtaacgctctagcagctccagtttagcggtactcgttatagtggcttaagttatgcactcctggttgagaa

SEQ ID NO: 53571 - DNA, 1285 bp, Arabidopsis thaliana landsberg
cctgaccgtcaatcgttagaggatcttatgcgcatttggctaaaaattagttttgcagtgatgatgttgcttttattaaaatttgtacaaataacactctttgatcttattagtgtaatttaacaatcaactaaaaatgtttatctcgctttaaatttaatgtttgagttatggatataaaaattatttagtataaatttgaatttgaaacttttagttttctggaattaatgtccgaacggtattatatattgagaagagattaaaaacttagtagtgaacattaggattgaagcaataaaagtgtcaaaaaggacactaaagccaaatggttagggattagacaggttgaaatgttggggagcataaaagccaataatttggtaattttcagaggacccccctcttattgcggccacttaattctatctaattttttctaataaattcacacacatgcctctggagttttagctttaaaagttctgtatgcagaagaaactttttaaagaaatacgaacctttaaaagctgaatcgcagatctaaaagtaaaacaaaaggtacatgactcggttaacctctaatggaatcgtcatatcaaatgttttggaaaattattggtttttaattagggtatatatagcttatagttcaagagatttacatatatagcggcatttctttctacaagaagtaggattaataaacttattaggttcacaaagtaaatcacacagtttataaaaaaaaaaaaatgttagaaaaaaacaaataaatatgttacccaataaaactaaatgaataattctataagcaaccttttgttttctgaaaaaggttgtaccaattatggagtcacatgtgcaaatcgcagtgcaattatcctcataagtcataacaaatccaaataacgaaatttatagtaataaattctacagagaaccaaaagacaagtactatatatcttccgataattatttaaaaaccctacaaatcttattagattttgaacataaaaccccaaaatccaaagacgagtgcctccatctattattgtctctaagtgagacaaaacctacattgatatgaatacatacacatcaatgcacacatgtagtcaaattatttgatagagataatgaaaactgagctagacacatgttgcaaaacacatacatacaaaatctcatacaaaaagatctgtatatctataattatagacatatctctctcatctctcactctctctctcgcccacacacattcgagaagaatataagtgtt

SEQ ID NO: 53572 - DNA, 432 bp, Arabidopsis thaliana landsberg
gcaggtcgactctagaggatccctattaaaaagaattagcatataaaatttgaaccggaactatattaaattaacgtaattatatttataaacgtttttaactaaatgtttacaaattgttcttaagaacagataaaattttgttgtaaatagaaacaatcttaagggagtaaatagaaaatggaattgtggaaaaaaagtatatataaagtatttattatgtgtatgataactcaaggtgaatttccgaatctgtggaagggtacagaattaatccgtggggagaggataaaattatatagatatatctttttgttttaatatattaatgtgcatagctagattttaaatctaggtgtacgttggacaatgagaatagagtaatgttggactatcaagtagcaaaaatttaggcaaatacgcacttattat

SEQ ID NO: 53573 - DNA, 598 bp, Arabidopsis thaliana landsberg
tgcaggtcgactctagaggatcccctatgatgtaagacaacttttgataacctttgataaattgataatccaagtgattaccgtagccgagctgctgagtgtttactctacccctgttcttccttgttctcctggacttgtgaagacattcctgtgggatccactagttcgtgccttgtgagttccagtacggctgcctcgcattgtgtggattagctccggttgtggttctgcggtcgttcgaagatcgagtcgaagtctacacggtttcgttgtctctctccccgtcgcttggtcacctccaaccttgatcaggtataaagttagttacccgctattcttcaccaaatttaccttgttattccattacttatatacccaaccatcctatttatcaacctactgtcgtgaagatctggccacccgagtaccgaatataacttggtacatatcatctggtatcaaagctttcgttgttacggtaggtcttactgtcatccatttatttatcacagtcttcatccatcttttatttttcctatagtcaaagaccaaaaaaactataacctttggtggtatgttacttgtgttgttaaaa

SEQ ID NO: 53574 - DNA, 160 bp, Arabidopsis thaliana landsberg
  unsure (1)..(160): unsure at all n locations
agtgtgtcngagtcgcgtgtgcgagagtgagagtgtgtgtgtgcgcgagagcgtgtgagtgcgtgtgtgcgagagtgagagtgtgtgtgtgcgcgagagtgtgtgatcnagcgcgtgtgtgttgcgagagagagagagtgagtgagtgtgcgagtgtgtg

SEQ ID NO: 53575 - DNA, 751 bp, Arabidopsis thaliana landsberg
ctcttgcaagcgctctatgtgaataatttatttattgtttgctacatgttttgctttgggcggggattgtgatttcagcttctgggcattgacttatatacatcctaatctagcaatacataaaggtttttagattttgaaaggtaatattcgcatgctcaaaaggtaatatgcaaaattatatgatagtttttgtttgtttgtttgcggtcgctagcaacaacgaccatcaaaatactttgttaactggtttgcagttgctatagcataattcaatcgatgcaatatattgttatcactataacttgtcactattgttaacgatttcaaaacgatcatgatttgatcaaatctatatcactgatgactacaaacaaagattaactacgactaatttcgataataagggacaatgaagagatcatcgaaaaacagatattcttggatatttttcgttagttatattcgaaagtttatattatattttctagcgaacaggaacaggccctcaatcatgttcgaccaaattagctgccagaactggttctctttgataacatttgtttatatagatataagaatttgttcaacatttattttaactattaaacaaaattgaaagggacaggcgtcataaaacaaacaaatagtattacgtatatagatttatgtggatcatgagatctcttgtaagaatgggtaaatagaatcatctaggtcttatatattgaagcgtatagtataaaggact

SEQ ID NO: 53576 - DNA, 583 bp, Arabidopsis thaliana landsberg
  unsure (1)..(583): unsure at all n locations
tgcaggtcgactctagaggatccccctcagtgtccattctattaccgataatcaggtatcattcttgattatttgtcattgatgctgtcttatgcagagaaaacagaacggctttgttcatttctctgtcttatccatatgctttggttcgaagctgaaattggatctaattgtgtaggtgaatctgaactttgagatagagaaactgagagcggacgtgaagcatgttcaggagatgtatgccatggctcaaaccgagactgttggtgcttcaaaaaaggtttaataaaggtcttgaaccacatagaccgtggcgtttttatttttgttaacatttgtttgttcttgcttttgttttttgttgcagctgactgagctaaaccagaggcggttcgaggaatccgagaagcttgtggaactgaaggaaaaagaagaagtagcaaaagatacagcttcaaaggagaagcaaaggtacgaagaggcgatgaaggaagcagagaaggttaaagaactcatgatgaaagaggctttacatagaagagaagctgagttcaaagcagagcgngatgctagagagacagat

SEQ ID NO: 53577 - DNA, 585 bp, Arabidopsis thaliana landsberg
tcacttgtgtctaatctaagaatgcacgatcgttcttctcctttcaccaacaaaacaggacgacacctcctcgccacagtggatgctaacaggcgtaaccccgatctagccatcccagcacattcatgcataaggaccggtaacgaatgtagccaagacaatcgtgaactatctgatgcactccttacccagatcgttggccgcgaggtaatttcaatcgatctggtccttccccatgctccaatgtgtcgggaacgcgtttgaggtgctccagcaaccacctgggcgccctccaatatccctgtgacgaggcagtctcgggtttggtgacttatctcgtccttcctctctctctacaatcgccactgggttgaattccttggctcacggctggcaacagctctagcggttatggcaacaattgcaaattgtaacaaccctaggtggaagacggttctggcaccatggccccacatgccagtgattatgctgtgcgcgagtgaaatcttgtcgtgcggctaacatcgcggcccatcagtagtggtgggcagcgtgaagacgacgtgtggtgaaatgggagactga

SEQ ID NO: 53578 - DNA, 278 bp, Arabidopsis thaliana landsberg
atgcatgcaggaagacactagaggatcccctaatatagaactcaaatcggtagctgcgcaatcatgagtataaatatcagtagatgataattgactaggatgatgattccagtactaccgatacagtacgtccaggtgctcggggcatgcgtcaattgtcgcagtgataagtggacgtgtatcgagtgtagagctccttgtattatcaagggcatgagtctaactgtggatttcgacgtgggcaatatggggttcgacggagtggatagctgtcactt

SEQ ID NO: 53579 - DNA, 694 bp, Arabidopsis thaliana landsberg
  unsure (1)..(694): unsure at all n locations
atccatcttgtcgcttccaacgtgtgatcttagcttctcgttgttgtttcctagtttgcacaagtaatctatgtagtcttggtaatgtgtttcgtagaccaaacccgggtctcggacttttgtagcgtttaagtgaccnnnnnnnnnnnnnnnnnnnnnnnnnncatctgtcatttctgaggctgcaaagagaaaaagaatattcaaatatatatactacaatatacagatgaattgatctgttattggtgcattttgggacttacaagtggtcatgagggcagatttaatagcggatggagaccaacgtttgaacgacttgaggtacaaggcaagtccagtggcgtgagggcaagccatggaagttcctgacattatgttgaatctgagatggcggtaatcgttggcggggcggtctgacgatagtttcacattctcaggccaacccgctatgatgtctaaccccggagcagctatatcgggctgttcatatgagaattctaaaccaaaactataatgatgcatttttctagagatcaagttgacgtgtaaaagaaaagtaccttgagaatgtttgctaggaaactgtcacaattaggacccctcgatgataagtgagcaacagttggaacccatccctcttctcgttggaatctcctcggtcttgtgaattttggctaaacgttctttgctg

SEQ ID NO: 53580 - DNA, 1036 bp, Arabidopsis thaliana landsberg
atataacaccggtcatttgtatgatattgacatcaaatatcttgataaatttcaattggttaagacttaagagaggggatgtgtcattttcctatcatacttttgtagtcatgtgaaaacttttaatgacttagcgacaattagtaatttagatgttttaggtattagaaatgagtttctgcctagttgttcgtttatatgtggcttgaacgaaaaaaccaatacaagctatctttgtctcatcaatttgtatgcccattccatttatttaatcttctccaataatttaaaattcacaaacaaactttataggtattctaaaactgtaaattgttgcgccaaaaacacaaaacaacttcaaacactcaatctttttttctttgtcaacaacttaaatataactaaaacggttcaaatactcaaaccaatatttcaaaagaaaatatatacatatatttacaaagaaaaaacggataaatcataaactgaactagactattatgattggttaaatgcaaattttggtttacaaacctatttaaagatatcatctaaaataacaaaaaccatattttagtgacattgtaagttttggtattatcaattttctttttgtctttttcttcatgaaaatcagcctcttgtgatataaaaactattcatgcatatgtaaacaaatgatttaaataggagaaaaggacaaaaagaaaagcagaaaggaagaaaaaaagggttaccttcttgagattgaaagccatgtgcttcgaactaaacttctccaaactatctaaagtcattctcgcacacctaaacgcatgtgcctgcataaaccccggcatgtccgcagctagtatcctcaccgtcaacatctccgccgctgcctctatcctcgccgccgtatccctctccacgtgagacaccgatttcctcccctcctccgccgcgccaccgcctttctttctttcattatttctactacaagtagtctctaactcgaatatatccctcatcacatggttttgatgacttttattcg

SEQ ID NO: 53581 - DNA, 526 bp, Arabidopsis thaliana landsberg
aggtcgactctaactctagaggatcccctccactacatatgtgtattattcttcttgaagatcgtaaatgtcagttcaattattcatctagaagattatatgtttgtaaatatatatctatatgactttaaatatacgtgtaaattcaatcaacctaccgtacgtattataaaattgatgctctggtttgtatactctaagattctcctccaccaaatccggtccatttgtttgcactaatctcattaaccttttttaaaaggaaatgtgaagcatcaaccagaatacatgtttcttcatgcatgtgatttagtcttatttcttggattttatagttcgttagtttgtctggtctaaaatcatatttttgatttttgacacacgtgtagatgttctggaaaataagttataaaatagactcgaagttgataagacttgtgtcgtgatcaagttgtgtaagtctatcatcgatatagatcaagatcggatgtgttaattttcataagagctaatattgccatggtga

SEQ ID NO: 53582 - DNA, 379 bp, Arabidopsis thaliana landsberg
tacaacagtaataaaatgaatgaaaatataatattgataatgaggtggataattaaaggaaatgggaagaaaagaaaagaaaaggagaatatataatacaaagagaaattatattttcagaattggtacttcttaattttacaatataattaagaataattttagcacaagtttgaattcaaattcgaattcaaattgaacttggaaatatagaaaagagaatagaggataaagaaagaaaagaataaaatgaaccaagccaacgtgggccggctgccacacttctcggcccattccgaattctccccgtgcggcccaggattcttaacaccagcacgcgtgcgtatcagccgctggccaatcagtgggacccagcatg

SEQ ID NO: 53583 - DNA, 449 bp, Arabidopsis thaliana landsberg
taattctaagccactagaacattaatacacttgagagatacatatagaaagtcgtgcagagacgaggtctcttgctttttttgtacttaacttctagacactctttaagtgacctctcaattaataaagttgtcatttatcttggaaaaacaggcccaaggtctctacgaggcgccaaccttttggatgagccgtggtccgcaggccgcggccggttgccatgggtcgtgggcggcagggaccgggaatgcggcagatggctggctgggccgtggtcgctggtcactggtcagtctcggtctctaggcccttgccgtatcccgcagtctcgtctcgtggcaccacatgcggacaagctggggtttctggtcgtacgccgctacaggcgctgcctgcccacagggtcaccagggtcaagaacctcgtgtgcaacgtgggcccattcgact

SEQ ID NO: 53584 - DNA, 417 bp, Arabidopsis thaliana landsberg
cgttccaaggaagcgtttcccgctcatcacgtgtatgacgtcctccttctgttgttccatagcaattggtttgatacacgctttcgtctccggcccccttctgtttgtatgttttctgagactctgctgagtcatcgtgccaattccacgacagcagtgagttttttgagtagaacagcgcattgcgttagtgtgtttgtatgcggccaattagttattttgattatgatttttacacgttttacagcagttgttcggcgtcctctggtataggccggttagagtacatatacagtgaagtcaacccgtgcaagtaggtgcccctagtagtaagagcgttgtgcaaaagagctgatacgttgagtcagcgttgtaaatagtgggggttgaaattgcaagttggggcccgaaacttta

SEQ ID NO: 53585 - DNA, 497 bp, Arabidopsis thaliana landsberg
gtggagcattgagaagctctgatcaacgaatacgctatttacatacaatacagcccccctgttcttccgcaacgcctgcgctattttcgccttgggattaatcaagctgtctcacattttatttacctcagctggaagttgaatatcttgagcgagagaccaaagagcaaggcaaagagcacaggaaacgcgaccaccaccacagcgaccacccacagcaagtcgtgatggtacccaaagtagtcttcaacgaagtcagctatacgcaccccaccgtcactgaacgtctcggatacatctccaaactgtgaagtgaccagcccgttgagcgtccatgcgatggggcaaatccagtagagccatctccaccagactggaattctctgcaagagggggactcgccattttgagcagagatggattagcatatatacaatgaaagataggagcacacagattggctctctagacctatgaaagaattactgtactcacag

SEQ ID NO: 53586 - DNA, 966 bp, Arabidopsis thaliana landsberg
  unsure (1)..(966): unsure at all n locations
ttcttactgaatcatctgcttaagcctttatctaactcagcactttccaatctagttattttgggtctttcagcgtcaagctgttctctcatgctggcaaagatttatcacttttgttttactgataaagtctctctaaaactcccagggccatggacactgtagtcaatcaacacggtcttgacattgaagctttgaagtcctcgtgtcttcctcatcctggtggtacccaaacggaagattctgggtctgcacatttggctggtatatcctctctcctttgtttcagttgagtgtttcaattgtctcttttatttatttatttattatcttaagcttcttgcatcaatgtggaatacagggtcttcccaagcggttggagttagcaatgagggtaaagcaactctagttgaaaatgagatgacaaaatacgatgcattcacttctggtaggcagcttggtggatcaaacagtgcgtcacaaaccttttaccaagggtctggaactcaaagtaacagatcatttgatcgtgagagtccatccaacttggattctacgtctggaatttctcaacctcacaatcgtagtgagacaatgaatcaaagagatgtcaagtcgagtggaaagagaaagagaggtgaatcatcactttcatgggaccagaatatggataactctcaaatatttgatagccacaagattgatgatcaaactggagaagtaagcaaaatagaaatgcccggtaattcaggtagggatatttgcttcaacattgtttcttacagaacaaagcatatcttttttaatctagaatataagaagcaccctacaattgttgccattaaacctcaggtgacattaggaatttgcatgttgtgttgtcctcagatgcattcacgactccacaggtacataacactaagtttccccgatccatccagattatatacatatngtgtacataac

SEQ ID NO: 53587 - DNA, 708 bp, Arabidopsis thaliana landsberg
attaagggtgtgagaatgtaacagtggatggactaagaacaatggttagtcttcggagtaagactttgactgatgtgagaatctcttgctgcaagaatcttgacacagctgcttctttaaaggcaattgagccgatttgtgatcggatcaagagactgcatatagactgtgtgtggtctggttcagaggacgaggaggtagaaggaagagtggaaactagtgaggctgaccacgaagaggaggatgatggttacgagaggagccagaagaggtgcaagtattcattcgaggaagaacactgctcaactagtgatgtgaatggattctgttctgaagatagagtatgggagaaactggagtatctatctttatggatcaatgttggagaatttttgacgccattacctatgacaggactagatgactgtccgaatttggaagagattaggatcaagatagaaggagattgcagaggtaaacgcaggccagccgagccagagtttgggttaagttgtctcgctctctacccaaagctctcaaagatgcagttagattgcggggacacaatcggtttcgcactgaccgcaccgccaatgcagatggatttgagtttatgggaaagattctttttgaccggaattggaagcttgagcttgagcgagcttgattattggccaccacaggatagagatgttaaccagaggagtc

SEQ ID NO: 53588 - DNA, 1109 bp, Arabidopsis thaliana landsberg
gctggcgagacacgattcacagtgtaatccccgatcacaattcttgctcacgattcatgtttctccttcctaccaatcaacacaaagatcaacacttttgttttgtaaattttcttgaaaccgacgatccattaggtttttttaggttagactcatttatgatcaattcttgatgatgttgagaaagatttgttcagattaagttaccttgagggcatatgaagggctaaggataattagaatacatggaatgagaagagctgttagaaagaaggtgaatctctgaaacattttcttctttcttgcaccaaaatcccataaagaagtttaaaagaataaaaacccaaagattttgactttgggaagaagcaactacttggtaaaactccaaaagacttggaacgggtgatttacaagttgttttgaccaaccaacaaaaaacggtaaataaaaacttaaatctaaatttatcttttcaaacaaaaaataacatgaggaatcgcgagtatctaggatacaatgatgatattaatagctatagaagagagttctttattggcttctcgttttcctttatggtttgttcttattattatacttaacaagttaacatgccatcctacatgaaatggttctttgattccattttaaagaataaacttaaccaaaaaatgaagaacttgcatgagactgtcatcattatcaagtaatcaaatgctatcaagttaattagcatgccagctaaaattataaagtactttagtcttatgaaaattaaatacgttttgtgccggtccaaatcaatcataaaactaacctcacacatgagagaaaaaccatatgataaagtatttggagaagttttaatattccttccatactatcatctagtttgacatttaggtgtccgccgtatgttaacattttacaggtgttttatgatgaaaacatatagcggcttattgtttctaagagttgttaatattctttgtggaaccaaatcatgtgaagagataagatagagaaaaaaaaagaaacttaaaaaccgaccactgcaatgattatgtttatacatgaaaagttttattgaacgaaaattagtaatttta

SEQ ID NO: 53589 - DNA, 301 bp, Arabidopsis thaliana landsberg
  unsure (1)..(301): unsure at all n locations
cccccccttcccccccccccccccccncccccccctttcttccttttcctcccccccgccccccccccccccccccccgccgccccccccccgcgccccccccccccccccccctgccccccccccccaccccgcgccgccccccccccgcccccccctgcccccccccgccccccccccccccccccccccccccccccccccttcccccgggggggggggggggggggcaccacccaccccccccaccccggggggggccctgcacccccccaaaaaaaaaaaaaaaaaagcccccccc

SEQ ID NO: 53590 - DNA, 478 bp, Arabidopsis thaliana landsberg
  unsure (1)..(478): unsure at all n locations
gctgtctgggtggagctgtccaaggtcctgtcactgaacgggtggttgggtgtgcgtgtgggcttggtgtgcatgtagggccgcttggcgacctcgcggggcctccaaccgccgagcccaagcgcggcaccggctgcactcgcctgttggtgtgccaaccatgattagcatttggtgttagtgttgtgtaggcagcgtgcagccagtgtataaacgccngttggggataccgtgtgtaggctgcaaggtaggcgttatggggtgtggttgtgataggatgcgcgtgtgtacngtagagcccggtacgtgttgcatgcattgtaaccaaaagccgcaaagtgcgccgccccnggccgtaggtggcctaggctagcccgttgggccgcctagcagtggtaggtggcgtgatgctatgtgcccagtgtgccccgtataggagtttggccgcataggccctgcggggcctgtcaccgcgtgg

SEQ ID NO: 53591 - DNA, 509 bp, Arabidopsis thaliana landsberg
gaactgtccaaggtcctgtcacagacaccccgccccgccccgccccgtccccagcacaaatgtccggtgtttcttgagttaaggtggcaagttcgtgaattttagtgttggtggtttgtaggggggtagggggtagggggtatatatgatgtagtatgggtctagcggggcggcagcgggttgtgtgtctgtgtcgtaaataagaacccgtgtgttgcaggccagtaccagtaatattttgtgggtttaagggcacctaggtgttgcgcgggaacgagagtaccaagtgagtgttgagctcgtttcggaaagtcgggtatcgggtgtacataggtaatggagagactggggtagttttgttagtgcggggtatagtattttaccgtagtgcgtatacccaagttacaggttgtaccacgtagaattggggccacatagttaagattgaacgggtcgtgcaacagcgaaagaagcgggaggtagcgcaacacatgttggtacaggtactg

SEQ ID NO: 53592 - DNA, 869 bp, Arabidopsis thaliana landsberg
atgtttccatacagaaaatgcaagcattgtatataccaagtaatttgtgtatatcatgtcaaggacaaacaaaacaaatcaacagaataaaccacaaccccatatataaacctgttttcggagaatctcccaaataattattgcaccaataaccagtatctaaccttgaaataaacactaaagtaaaatcttaaatcgaaactctcgcttataatagaaaaatgtgccagaagagaaaataggtttcttggcctttactagggatttgtttctgttttcaagtgtgtcagatttgctcattatttatcaagtatgaacaaaaagagaaaaaagtaggttgagattttaatatggttgttgaaccattaagaaaaaggagcccattttcaagactcaagagaatggtaattttctgtcgatttgttagtctataaacaccgcttgtagatgtaaaaatttcaatggttttgtaaaatgatgcaaattgagttgttcactgtggtgatcttgcgtgttgaggatgaatttgcccgttgagctaataatttctggtgaacatattgtcatttgtaagatgttcattgattgtgatgatagtcatataatatgaaaactaaagtattcatctactttaaaaaaaatgaaacctgttacattgcaatgaaataaaaaatccattaaagagctaggaacaaaattcagaggaaaatatgattctactgttccaaagaagaatgtatgtgataaattttattcttgcatctatctttttataattcccatttggtggttatatctcatttatcttcaatcaattgatttatttatgaatatattgtataaggctcgagcaaacaaatatagaaagt

SEQ ID NO: 53593 - DNA, 534 bp, Arabidopsis thaliana landsberg
  unsure (1)..(534): unsure at all n locations
agagctaggagtccgggctatgacagatacagaaggtaacagtacttggcttctgaatggtcaatatccttatatatagtgttatgtgctactctaattgtctgatttttcttttctattttttaacagccggtccccgattcaaagagcaagaggttgaagatgttgttgggcgatggatttttagaatgtatgggcatggtacaaaaacaagttcttagtactgagtctttaccgcttatgacttgaaccgtatgtgctttgcactctatgtggtgtagaaagtattagtagcttataatggcaatgatctcttttggaattggaatagtttcaaggcaatccatnnnnnnnnnnnnnnnnnnnaaatcattacttcattttatattcagaaacatttataggttttgtagaagtaaaaagagaatacacaagaaaggaggacgatcattcaaggcatagaagagagattgtgattacatagttcttgggtgagtgctttctccaaccaagtttaggcgtcttccatcatct

SEQ ID NO: 53594 - DNA, 668 bp, Arabidopsis thaliana landsberg
gaaacccaaaaggcaatgaagatgatgagaagcgtaatgtctctgcactttctattgtgcttgatgatcccatcatttggagcactcccatcacttgaagtatatcttccaatcactgctcctaaaggtcctctcatctttgccacagctatgtctcttcacagtctgaaaaaccctcgagaccaaaaaaaggaatttcggagagaacagcacacagaccttctttactaagtgtcttctctctctctctttctctgtgttcattgttcgagaagagagtgtgaaagcacttgaagggtatttatgtctttttctgtttaaaagttattttctttttggtaaaagataaaattaaatggtttctgttcaatcttatatcatccatggcacatgaaaagaatccatgtctggttcttatgggctttgagatttcttatgaccatttttaaatggttcctttaatcctagtattaaacctaatttaaaaatctttgttctgttttttgaatagattttaaaatcaagcttttttttgttcttattctctttgagatctgcaagactgcaactgtaacgccatccacttcattaaaaatacaatgattccactttttctatgttatattattaaaacatgaataaaaaatggaccagagttatgtatagaa

SEQ ID NO: 53595 - DNA, 1317 bp, Arabidopsis thaliana landsberg
ctctgtctcttcgaaaagtacagtatctgggactgtgattgttgagatcagacagcgacgaatagggagatggataatccacacttaatgggcctttcatatgtggccttttaagtcccgtgggatgtatatattatctttcatttttcttttattcgagaccacagaattagaaatactaagcgcagcaataagattcgcagaatcagagattactattacacaatgcatattgaagagattacgcaggataaaaaataaccaagacccgtcatcaccggtgggaggatggtgcatcttcgccgttagatcctctttgagagccttcaacttttttctcaacctcttttcttttctgttctttgtcttcgctgcctttactaatcctctccctgatctcttcctcctacgcattagaataatttaatttcatgattactatgacaaacaaacaaaaatgagattatgaaacctcaactaattggttacattgtcaagtgctttagcgttgggaagtttcgaaccatgaacaccagctcggttcgaggcttttccaaccatcgtgctcacgccgtcgtaacgaccatcaaactttccgacggttcccacagatctccacaactttccgatcatcattctaattatttctaccctcattcaagaaatcgtgtatattatatggttttgattcaaacgtgaggtgtgcatagtatagtcgatttatctaccacgtgtcataaaaagtgtccacgtgacaaatccacgtgtcactagcgtgtttccggtcgggtttctaatattacgtggatttacgctcttacggttccgtcgtcgccttgattgccggtgaaagtccaaagattgttgaaatttagaacgaccgttgctatttaagctttagcaattcagcagcagatttacacaaattgtaatcgatcatattccactttattaacataaaatttattcaaacaaggaaaaaattacaaatggaataataccgtttttggatcggaactcacaaaagggaatggttttgttcatgttgtcggaatctaaaaaaaaagctacaaattgggaacaaattacaaagaaacatgggagtgtacaatgcgtgaagggttgttgttgttgttattctctcatcatcagttttatgaaaccgaaagaaaaaaaggattttgttttgttttgtctgtcctcggttgtcacttgttgtcgtcccatccagattccgagcagacaagagaaaaagggcaaatttttatgtttttttttgttggttctcatcaggtaaagaatttacatgtaatcatt

SEQ ID NO: 53596 - DNA, 743 bp, Arabidopsis thaliana landsberg
caaattatgtatgagtggcataatgaaacacttgcagaatctttagggattaaagacggagattatacttacagcacaaaggattgattttacaacagaagcacaacccttgtcggaaatgttcatagcttgaaattgcttcatcaaactggtatctttcattgtattgcagcatgtttttcctttgtaaggacaaaagctcaatgtcgaattcacctccgagggagctcctgaaaaaccatcaaaaaacaaaatgttgcatcaatctacaatagcagaactaatatcaaatcaataggataacaaaaaaaaatcactcacttgaatcggaacagagaggaagagcccatgaagaaagagcaaaacatgagaggaacaagaaaaggaacacaagaaattgatgaagcttcatcgagtctcgcaagagacaaatcttgaagataatgacagtggaagagagaatcaagagagaagaagaaaagaagtctcttttttatacatctgatctcaggacaagacaagagaagagagataggactgaaaatcaaataataaaattagtttgtttgactctgcagacagaataaatgcaattgcgatggcgtttactgtcttcccatgactaccaacaaccatatccccagaaatctcccttctcatataataattaatgaatataatcatgttcaacttgaatttttcaactttctcgtgtcagagagagagacgatgaacaaaggttc

SEQ ID NO: 53597 - DNA, 346 bp, Arabidopsis thaliana landsberg
gctgtctcggtgactgccaaggtcctgtcaccagaaacccactgtgttaagaccgcgccaacgtaattgctggagttcgagtagtttgacaaagtctccccggtgacgaacaagagcgagagtagtagtcaaacgccaccggtgtgaatcagtagagcgagcatgaagtgagctagttagagggggggctagccaagggcctgcagaggaccacaagacaacggacccagaaagacagttaaggcgtagttggatcgaggagtaaagcggcagcatgggccgtaaggcgtgttaaagtctgtggaacgaagaaattgctcaacgtgcacgagtaaaaaaaaaaaaa

SEQ ID NO: 53598 - DNA, 2403 bp, Arabidopsis thaliana landsberg
gtgttcactgttaacggtcgcatatggggtacactacagctcgcgatgcatcaagtagaaaactggagattagagaagtgggtagaaaaagcagaggacgcagacggaaccttagagaagaccctatcgatatgcgctgccaagaagatgatggttcatacccctcgaaccatagtgactttggttggatcttgcatagatataactcttctatgccatgcctaagactactagtagatgcactactatgggtaatgaatcgtgctctattaactttcatcttgaatcttaaaatataacccaagattgaacattgtattatacatttgctgtttctgtgataattgatttgatacattagactgatcttacgacaatctgaagagttctcacttttgtacctttttgtgatataaacatatacagttggaacgctgaaactgatgactcttgagaatctgatctttaaacatgttcatgagaagaatcaatgagtggttcgttcgattcctcactagtttccggagattttgagactttcttctctgggtataacacatagtgttgacacatgaagaggatgtcgaaaaatattgaaatctgttataaaaaaatcgagacgtttattagagacagagagagaattgaaccaaaaaaaaaaactccataaattttcttacaagtgagagaagagtctttcccatgttcccatagaaattcttccaagaatctggaagaaccaaagcaaatagatagttttagttttctttcaaaatgttattatcagagaaaacaaaagctattgatgtgatagagaagagattgttactttggtcaatcgattgtataaccatttgcagatagttagcaagtcctccagtaaaatcgagaagaatattcccgatgctccacccgactgtgctcttcctagtgaagttcatctttgcctgtgaagcaaacacataaaatctgagtaatgcagattcaatcaataatgaaaaaaattaaggtttggaatcttttctgacctgtgggatgtacttgacgcatgtcatgaagacctgaatcgaactataacaatgaacaaataaaccattatcatcaaaactgttagattaccactaaaagaattggttcagaaggctttgagcaacaacttacttgaagattgaaatgagccatagccaagagtgtgtaggtaatgctatgaagaaacagatagctgcaaatccccacacaacaaccacaatacctatcgcaagtctggatactttttgaggcccacgctgcgagagtaaatcactggaaaccatcaggaaaaaaagaacacttgtatgggataaagagacaaaggcaagcctaagaaacatgattactcacttcatagataaatatctggaacagtgtaacagctgtcattacaactgcatggatcgagaatgcaacatcatttgcagccacaggtatcatctgaaataagcaacaattataacaaaacgtctaaaaactaaaccagctcgaacaatctaaagcttttttttgttgctgaaacttagaaaggaacaaaattttatcttcaatgttgacttcattagctaagaactaaaggtaaacttgtaaccatgaagataagagccaacaagaaccatattagaatccaaacaaaactcatttctagattccgcaatcaaattcattaaatgcttcaatgaataacagagagaaagaggaaacaaacctctttatcgccataagtgtcaaagtattgcttttgaataacaggactaaagtagaggcagacattgtagatcatatacgacgagtgctttgtcaaattcaacatcacgaagtcgaagttcaatccaacaacactttcccaaacacaaccaagatttcatcaatttcaatttcaactacagatatagaaacaaaatctcaagaacaaaaggtagattagattaccttctcctacggaaattcaaaatcagctgtgggtaaaagctaattgaccatgaagcaaacgcgatccatccaacgatttcgtacgagatctccagcggaatcgaattccacgacgccattttcctcgatctcgatcgtctgttcgatttctccaaattttgttctcgacgttgacggagatttttgaagagccttaaaaaaagctaaaagcagaaaatattattgggaagtgaaataaaacagtttcaaaaaattatgggtctcatgatgaagatgctgacgtgtcatgatctgggagagtctagtgatataagattccacgatcttagcgtgatgggtgaagcaggtgattttaatgagccttatctctgaatctggcgctctttatggtttacgttctttctttaaagttttgaaaccggcggctaaaacgatgcccgt

SEQ ID NO: 53599 - DNA, 971 bp, Arabidopsis thaliana landsberg
aacgaacaatctcctccatcaactttctccgattgttttgcttttttttttttctcgtttcttttgtgttttattttgttttttaaaaaatttaacctacaatttgtttttttaaaaaattttattattttttcaaaattttataacttgatttcgtaaactgaatttctattgataagaaaaaaaaaacattaagcagtattgacaaaaaaaatatatttaagtattctatatatacagtaaattaatattgaatgtcacattctccacaataacattcacatatcatgatttccttcacatatataatgagcatcttttgaccacatatatttgaaggctgaagcctcacaaaggttgttaattatgcgttatacaatggtattgaaaatgtttttatgcgtcaataatcattcaacagaatacataaaatgaatacttttttcatgaaggacattatctaatatgtaatatccaatgttaaactcagaatactaaagattcgtataaacacacatcaaactccacaagttacagaccatgaaccgccttgaaaatccgaggaataaaactagacctaaacccgggtttacatttcgagcagcaagcaacacaatatcagtccctttccgattctcaaacgactcaaagcaaagctttttttttttaataaaaacaaaccgacttcttttgaccaacatgagattctatactttgatctcctggtatctctcaccaatggcaccctctttctgcttttggaactccatgaactcaagcgtagttgcaaagaacgattcagcagatggatcagagggcatcgattctttcgtctgatcagttttatcaggctttctactgattcaactgttatctgtggaacccccttcttatagaaatagaggtacctgccataattcacattacataatgctgcttgctgatctgggaaaatgagagtaaacaaacaa

SEQ ID NO: 53600 - DNA, 1075 bp, Arabidopsis thaliana landsberg
atttgatgagatcaacaaaaaacataaaaacatttgatgagagttgtttcttgtcctagtcatcgattcgagttaaaactgaaacaagagacctctattatagatatgtttgatttcagtttctttaatcatactatagtgtaatgagaatttattggcgttattaaacaaaactcttttttttattgacctttgctttggtttcgattcaaacgagtgtggcttctgcatcacccaattcttattttttagaaagaaagtcccaataattgcccaatatgattccatcaacttaaaaatcattaaaactataaataattactattatgagatgctttaaaaacactaaaatgaatggtgaccgttatttattttttgaataaaatcatagaacaatgctaaaacttgagatgctttgtgatacagtgtgatgttgagttacaaatgatctttgaccttccctttttctactaatggatatattagcatttttgggatattttcaatataggtgtatagtttgtagatatagatatttgcgtgatatttagataattagattgttctaacgataacaactaggaaactaaatgacataacccaaaattaatgatctcttaaaagtttgtttaaatgttaggagggtgttacgagtacgaggaggtgatgcgataaggtttgacggtgatgagtttcaacaatatttaaatgctgattcgtattcatcatgaagttgtggttatgttttagattttgctctaaaaatatgtgaggcttaagactgacttggtattttttgtaatattttaacttggataatcatttattcttctccttactaatatatagttgcggctttttcaatggaatcgaaatatgtttcagtaaggttaacgcagaatagtaaaaggtgtacgcagaaaaccgagagaagtacaatggagagagtccgctgacttgacgttgaaccttatgctattttttgggtaagatcagtttttatattctaacttttctgaaacatatcagacaatttttaaatcgcctctcgttggtggacacaattcatgttttt

SEQ ID NO: 53601 - DNA, 1556 bp, Arabidopsis thaliana landsberg
  unsure (1)..(1556): unsure at all n locations
gctatgagtgtgatgtcgagaagagatcaagagatctgagagcttgaacaatggagtacggaaaatcaaagatgaggttcgttacttccatttcactttgtctttctgctgcttttaatttaagatttggactctctttaatgctcaattntgttccgagcttcttcaggacgatcatgacgttgcttctgatatcgagagtgtgaaaggaaaatctcataccggtgagatattcttttctcaaattccacttctcgtgttctttaatgtgctcattggtgctttgatttgacagttgcttcgagtaacattgcaatggctactctgggtgttggatccagtgaacggatcaactggaaacgaaagtaagtttttttcctttgttcattttttttttggaaaattcaagttctttaaatagcttgtgttgaattaggggtgtagtaacatgtgcactgacgattctgacgagttctcaagcgatacttatcgtgtggtcgaaacgagctgggaagtatgagtatagtgttacaaccgccaactttttggtgagtttcatagatgcattaaattgagtgtactgtatgtgttgcaagcgaggccagttttgtgtggtttataatctctgaatcatgatgatatagtgattttgtttactctttggtggacatcaggttgagactctgaaatgtgcgttatctcttcttgctttgacaaggatatggaaaaatgaaggtgttactgacgacaacaggtagcgaattattttgttactcaatctgttgttatcagttttagagaaatttccatgagttttatatctaattcctctttgaacatgaccgtagatagctcactgaatttttcgttactgatacccaaatcctgtctctataacaggttaagcacaacatttgatgaagttaaagtctttccaattcccgcagcattgtatctttttaagaatttgttacaggtggggtgtcctgagtttgttatttttttctgtggctttggtcgatttttcttaacttatgtttttcatgttaatatgtctctaactacttgttgtgtcaccttttacgtggcagtattatatttttgcatatgtagacgccccaggctatcagatattgaagaacttgaacatcataagtaccggtgtcttgtacagaattatactgaagagaaagtaggtttttttaatcatccaaatggatttaacagcttccaatgaatagttgttctggaaatccatcagtgagctgtttcagtttccttcaattcttgcaagtgtgaactgctttgcttactatcttctctaacagattgagcgagattcagtgggcgggtttcattctattgtgttgcggatgcaccactgctcagttgaattcaaagtaaaactttacccttgattntcatatgaattctattaaattgagctttaacgattcttgcatatgatgcgtaacacacaaaagctcatatccggttcctgctctgtgaactttcaggtctctgctgatttttcaatatatgtctcatatttgaaa

SEQ ID NO: 53602 - DNA, 1199 bp, Arabidopsis thaliana landsberg
  unsure (1)..(1199): unsure at all n locations
ttgggtatgatttggctttattacttcaaagaaatgtgatttttataccaccaactcttaataatatatctagtacgtgtaattgaataattttataaatataagagtgaatacatatatataacaaaatattactcatgagattatcttaggaaatttgtattttttttatttcacaaaaatttaatataatgactaaattaaatattcagataacacaacggcaactatgggttttatgtttttgaacttttttgttttgggtgtaaatgttaaattttataccattttcgatttattgtgttgtattataacttattaatcaaccaacgtggaaaggaaagacgttagagatgaaaatgctaaacaaaatgaatacaaccaaaataaaatgcaagcagagaaagagaggaggatggcggaaccagactcggaagagagaggagacgatcgcggagagagcgatcgactgatttgcggatggctgggatcgaaaaagaaaccatgcgtanaaatctctaattcacgatcaaatccataaataagtttgatctaaaaccgagtgatttgagattaaagtgagatccaactgaatgcaactgtaacatcccacccacgttcaagatcatgatgaggtgttagtagtcattcttgctaatgtatcgtcttaattagccttagatttcatttctacttatccattatcatccacaattcatcaccatcaacatacataatatacaagaatcaaccacaaaaacaatacgtagagtaataacgcaacaatcatcagggcaagattcaattcaatgacgaccaccccataaaacgacccaaataaaacccatgcacacatgctcatacaaaaccagaaatcaatcaacctctaagatttttttttcataaatatagagaccgcataaaatttaagaaatattcctcaaaatattaagggtatatatatatataagtctggccaatagatgataatttgataatgtatataatattggaccactactctattatttatcgtactgcatggctgaggtcgatgtcacaattatcaatcacgagagccaaagatttatatgcatggatagaaatatgaggtgggacatgtaacgttcctcgccaccaactcttatttgtactcatttctttgggggtgtggtggggccgtggggggaccaagtaag

SEQ ID NO: 53603 - DNA, 1022 bp, Arabidopsis thaliana landsberg
ttttccgacaaaagcctaataatgtacatgcatcacttccaactcacttcttaatcaaatctttctttaatttctcaccgaatccataaaaaggtattaatatcaaaatctttcctttttgatattttcttctacacaattattatttcacgacattatacatttgttgttttatctctttcggaaacttcaactctttattctctttgtggtaatgtgactagagagagagatccacatctatccataacatactcactgtattatttttattaatctatgcacaatacactcataactcaattaatagagtcgatggacagattgaccaattgacataagcatagactttgttgtttatattgcgaataaagtaagaaatatataagagacagtgcgacgacaccatattatgacaatttcaaacgggtgagtctagaaagtccacaatgctaagaaaatccagtaaacaaacaaaacatgtcaacttcagtgtttggtcttaaggctaaacaatttgtcctgttttttgtactttaaaaattgacaaggaatgcattgatcttatccaatgttggtgaagatgaaagacaaccgtaccctctaaaaacacacaagtttttctttttaaaaagaattggatgctattgttaaaaaataatatggaattctatgtcaaaagtgtaacgaaactattataaatttatagtaacaccaaatcatatgccaatggtaaccaatgaatctctttgcatttcccgatcgccacatacaaaaatcttaatcaccaccacttgcttattttaacaaactctctacctcttttctattttctctccttcttcttcttcactttggcttacttcaaaaagttaactacccaaaaaaggagaaacataagaaaggtcacaccactttcacattgtgtagaacatagaaacgttagaaaacctaattaagaacaatcatcactacttttgcaaatgttatcctcaatctctcttcttctcctccatctctct

SEQ ID NO: 53604 - DNA, 651 bp, Arabidopsis thaliana landsberg
gagataggggaataatgaagcctcatcaaggtcaaccaaggcttagatgagcaacatgggtcaggtgagattcctgtcttagtctcttaggtccactagcttaaacaccgttctatagggcatctctaggataaagaaccagttcctggaggtgtggggggtgtcggagacgttggggtggtcggagtcgttggtgttaatggggtcgttggcgttaatggggtcgttggcgttaatggggtggtcggtgttgttggcgttaatggggttgttggcgttaacggggtgtttggcgttgctggggtggctggagtggccggggtggttggcgtggtcgggttgtttggcgtggctggggtgtttggcgtggctggggtggccggggtgtttggcgtggctgggatggtcgggatatttggcgtggctgggatggtccgcatatttggcgtggctgggatggtcggggtgttttggcgtggctgggatgcccggtatggccggaatcggtggcaattatgcggcagatatgtaagtgaaaaagaggaggttgagagcatggaatagtgtaagatatgttcttgaagtcatttgtatgtcgaaaggaaagctccaacaaaaggtaaagaagttgtagtgtgttttctttttttt

SEQ ID NO: 53605 - DNA, 409 bp, Arabidopsis thaliana landsberg
ttgcaaggaaggcgttcccggtcatcagctgtatgacgtcctccttcgttggggggggggggggggaccagaatggggggctttaggttagaggccaaaagcaaaggtacgaggacaacgccagtggccgtgatgggagaagctgaaaagaaaagacaaaaaaagaagaaggaaccacatttaggcggagggcgcatgcggtattccaaggaatcttttcacagatgtagcacaaaaaacagttctgggaggccatgcggtaggcatgggttgggacgttgaactgcttatagacgttggtggttaggacaatagccgcaaaatctgaaacacaaccgtgcaaaaaaaaggagttgggtattggatgggcctgacgcggaggagggagagagttggcaagtttagatgg

SEQ ID NO: 53606 - DNA, 495 bp, Arabidopsis thaliana landsberg
cgactctatctggtccctaacttggaggctcttgtccactttgcaatgctcaatgggagcttacctctaaggctcaaggtcacaaaaactcctctcttgctgctctaaacacaagtgctctatcacctctcattcaaatggatgctatctctaagcatattacacaatttgaagcacttggaccacttgaggtgttggagatgctactctagcttgtaggctctacttctcagctcctgaacgtcctgacaactggttggagccgtatttataggcctccagtgcccacatggccattggaagtccactacatgaaactggtcgaaacctggtcagaccagattggatcgatggcggacgagacctcaaactattgcacctttccatcaacgatcgttggctaaaactgctagttgtcattaaacatcggaccagtttgttgccacattggatctaccacataagcgccatgtcaggcgaccattggatcttttg

SEQ ID NO: 53607 - DNA, 1309 bp, Arabidopsis thaliana landsberg
ttacacaagttaaaattcgatttctattttaaatgaagcttcttaaaatgaagtttcaaaattttcacatcggaaactttttttctttttcttaaacctcatagtcatatggaaacctattctttgacttgtccaatattttaaacaagtatcttcgccgacctgtatccggtcattcgcatccatgtttagcagctagtgagctaccacgaccacttgccacttcttgccattattgatgaccaccattaacaattatagtaaatcgtctagccgaaactatagaaatatatgtcatcaatagctatatataatatataactaatccgctgattagaaatcaatcaaatgggttcaatgtcttttactgttttagagacataagaaattcatctttacctgaaaactcttttgttgttttgcaatcgaaaacaccaacttctattattaggttaattataggcaatttgcaagaaagaaaaaatgctaattaagtatgtcatacagtaatattcaatgaccatatgttattaaaaccccttgcatgatacattaaattatgctaagatattaattgaataatggaaataattgcatgatacattaaattatgctaagatattaattgaattatggaaataattgcatgatctctgtttcggatgttgttttatagtaacaatttacattagtgtgaagatttataaaaaaaacaaaagtaatggaataatgaaataattgcatgagctctgtttgggtgttgttttatagtaattagattggattcttttttttcgttcataagtcactattgggtttgttttcgtgctaagtgatttggagatatatatttttgtgatgaatttagtatatgaccaaaatctaacccaaaacaagaagagtatgactcaaaaaaactttcaagatttttttttttttcctgttatttttttttttttaaatggctactacctgttataaatacaagagtaaaatcgttaccaaaagaaagtgctcgaagaatggttagttagaaaacaagtctaattaataagcaatgttacaaaacagtaacaaccacgcatggaacaaaccattaactatgaatgagaagcacacgggattacaaataaaaaggaattttgaattttcatatgtcacttgaattggctagaaaaatacatcacctctatttgaggaaatatttctaatttatatgcaacgttacaacttacaaatggtaaccacgagtggaacaaaaaagttgaaatgagagaacagtagaatgaaatattattatcctgtaatt

SEQ ID NO: 53608 - DNA, 1012 bp, Arabidopsis thaliana landsberg
  unsure (1)..(1012): unsure at all n locations
aaaatttgaaacaaataagcatgacaacccaaacaaatttacgcggaccaaacttttccgagagtctttggtctaaagtattttccgcggtattgctctttgtgaatgtgattgacagatacgatcgagaggtcggatacgcgtattagagcggtgggtatgatgatggtattatgatactgacataaatatatgattattagaagaaagaataaacattgttaaccatacatgttttcttaacccagacaaagttttcacactttccgttattttcttaaattttgaacacttttttgacttctaagtataaatagtattttatttaaccaccatcaaattgggtccccaatccctttcacacaagcttgtaggagtattaatgtatgtgatactattgggttgtagaaattgcgtatgagtttcctcgtcggttccatgttgcatgttgcaaaggcattaatgaaaagtgtgatactctttctgacaaccatttaaagattaaaatacatgcatggttattcttttcttttagctgcacatggtataacactattaaactatttagcttctttggtggccaatatgaatctgaaactgattgacattaatgcaacaaacagaaaaattgggaaaccgtctcttttgactttcgacaatctaatggtaatgccttaactcgttgacttatgaatgagacaagcacgcaaaaatgtctttttaattacataaatttttagaagaagaaaatacaaaaactttatttctcaaaaaacaagggggaggcaacatggcaaagtggctaaaacgatgtcgcatcgtgataagcgataattagctactgtgtaatgtggacgaccatgtgcttttggactaatcaaaatatcaatttgctgaaaaaaataaaaattataaaaggagtctaacaattcacacattatcagtctagcaatgacatcttttttcgtagaagatcacanaattagcatnccgatacataatcaattaagcg

SEQ ID NO: 53609 - DNA, 823 bp, Arabidopsis thaliana landsberg
aagaattaataaatcattgtactttctagttcttatattgattgtccagattagtctcttccaccaatatatatatatttttgttgatttatgtttctaatattatccttgaatcttttaattacaattatgtgctaaaatgccgcggtctacgacacgcgagtctcccatacgaccccataccaataaaataaataaaatcttcttaagataggggaagattagtaagtaaccggtttggattcaaatcatcgtcgagactcatactaaaccagttcggatcgaataacattaaccgaagttttaaaatggtaaatacgcataatctgttctttcattttaacattttttccctctgaattagattattacatttccaacgaccatactaaaagaatacatgtataatattacctgaatagaaaaataagaaaaatactcaaactatttaatcagctctttttcttccccagcctgaattaagagctaactaaaatagaaaagaaaaaacaccttaaaatgagaaaaactaaaatagaaaaataaaaagaatacaattacaattaggctatgtaacaattattctaatactactactaattataacactaattattaagacgacgcttgattattcctcctgttgctcaagtcaaccacaacgacgctcacgttatcggagctctgtcttgctagagccaactttgttaagagcaacgccgcatcggagcacgcattgtgcgccgcatctgagtcgtcacccgcaccagcacctcgaaggcacatgcgagccacgccacacgccgtcttgtttggtacaaca

SEQ ID NO: 53610 - DNA, 252 bp, Arabidopsis thaliana landsberg
ttttcaaagaagagtgagatctctggcatgtgcgattaacctaattatagtgaggatggtttgggtggagtcggggctcctttggcatattattatgcgaacttgacatcctacactcttgctagatgtattttaagagaaccgatcgcgaaagattgcatcaaaccagtggattgcgacagttaatctccgacaattttgagtctcccacatccgtccctagcggtctccaaaaccgcgggcccgcgcgaa

SEQ ID NO: 53611 - DNA, 621 bp, Arabidopsis thaliana landsberg
gactctagaggatcccctggtggatgggacacggcggacggtggagcgccaacatcgtcggcatggactgctagtgccgggacagcggtgccgggcagaggctgatgaagtcgcgcgccgacatgggcaggtcggggaagggaaagcggttgacggtgtcacctgaccgtagggcgatgctggtcgcccgggtcagggcggtcagctgatcgtcaccaagtgggatttgccactggatatcggagtcgacgggcttccaactgatgtccacttggcgggacatggtgttatccgggctgacgatgtcgagcgtggcgcgggtattcacctgcgttaccgacccccggctatggtcggtgatgaacagggtaggatcaccatccgtgcggccgatcttgtattgatagcgccgatccgacgaacgcgtgcggacatagcagatgccgcggcggatggggtacatagcccatgcacccagggtgagggggccatccgcgtcgatcgcgccaccggctggccagatagtcgcccgcagcttgagccggaagctctcgaacagctgttccacgcgcggtcggcacggggcaggccaatgcgtttgcgaccacgccccgcagattt

SEQ ID NO: 53612 - DNA, 1147 bp, Arabidopsis thaliana landsberg
gggaaaatccccgtggctatagggaggcgtctataaaaccggccattctcatcatggctatacagttctgagcaaatctttttgtcaggctccattggaatgtatagaagaggaatgctacataacttactattttttctcagctctaaccagaattctgttttctttttttactgtaacactcgacttccacgctatgtatataaagcattaaactatctgggacattgacacgaaggagataattcagctttaaactatgctctctttgaagcgaacataaagcaatgatcattctagtacattaacacatcatttgttggatactgctgccatgaaccagtccgcgtgaggtcacgaacttgtaaattgcaccatgttcacttttaaattaaatctctacatgaattttaatatggtcggtactttattgaactttcttttggcaccattgaatactttgttaaattaattataagtctcatactatgttaaattgattatgcttttatgattgagaactcgtcaacgtgatcaaagtcaactctcttgtggcttatggccccaaacatttcgttgtctataacagtggacatgagaagatagatctgtcattcacatagatgtaattataagtttaatttgagataattataagaaaaaaatttcaagttgtaaattttaacttgcttctgttttgttgatcaatcacaaaaacatagttccaatacaatggaagcttgctgataattaaaaaaaaaacaaagtttatgttagtcttaaatgaagtatcacaaaaatagttaatagatttatacatgatagtattagtgtaatgaagattggccaataattctgatagatactgttaaacatgagtgattaacgaagatccaaaaccaaaagtcccatctccatgttttggtacatacagacaaagctattaacacaggtcattgaaaacaaagtaccactcatatacaaaaaaaaaatacaaataaattaataatgggatcatttgatttcagtatacacatgggaccatgttctttaaaagaaatttatcttctcttcactccatggaaacagagaaaacactctcaaacacacaaacaaacaaattctgcagatgaatttgaatatacca

SEQ ID NO: 53613 - DNA, 647 bp, Arabidopsis thaliana landsberg
  unsure (1)..(647): unsure at all n locations
tgcctgcagtgtcagactcatacgaggatccccgatataaaaaatcggctaacaccccaaaaaccctaatcgcatttgttttcagcgttattgtcatcatatcttatgttcattgtcatacaacaattgcaagtgccccaagcagtggtgaaccaacaacatacgcaacaggtaaactttaccaaccatttagaatttagagcaaaacttttatagtgactgttgttgatttttcagtttccatcctctttcattcttgtttcatttgaagataagaattctatgttccattattatatatttaacttttaatgtgttagtgtattcttataacccattttataattatgaacatatttttgtccttttttttaaatgaatgtctatattgtactgatttttattaataattaggtcctgcactttcgaagcactcgcacgacaacgatgggatttgcttcgtaacaccagcgtgttttgcccaggccaatatgaaataggttgcattgtgtattgtcacgaatcccattataaacattacaaatgtgttaatagatcatgttgttgttataatacagataagaatgcgtccgagctgaaataatccacgacaatgtaaatgtactacttgaanaaataacccacag

SEQ ID NO: 53614 - DNA, 872 bp, Arabidopsis thaliana landsberg
aatgaatattgatataatttagtcataataatttgaaaaatataaaatacaatatccatatctgttttaaaactataaacatgatggccatgatctaataatatgattccatgaagcataaaacttttattaacgtagtcaaccattggatattgtccagcccaaaatatctaattcaatgggccgaacctacccaatacagcccattgttttggattaaaatctttaaaaaaattggaggctaaattaaaaaaagaaggaaatattctaagccctccacgtattacgttgatgacgtgtaccatcgtatataaacaaatgcacaaaactttattatattgttgtaaagtagtacttttattggcgatcctcatccatttcctctctcgtcgttgtctgggaatcggtgacttttgaatctttgcgactctcttgtagtgataaattgatcgttatctactttgatactctccggtcgtttttctccggtgctggagatccgattccttatcttttctgtcttggctcgagatccgagccaagcagtaaagaagacgactttgtttcacgatttggaatttgattcctgcgatcacaggtatgacaggttagattttgttttgtatagttgtatacatacttctttgtgatgttttgtttacttaatcgaatttttggagtgttttaaggtctctcgtttagaaatcgtggaaaatatcactgtgtgtgtgttcttatgattcacagtgtttatgggtttcatgttctttgctttatcattgaatgggaagaaatttcgttgggatacaaatttctcatgttcttactgatcgttattaggagtttgggggaaaaagggaagagtttttttt

SEQ ID NO: 53615 - DNA, 881 bp, Arabidopsis thaliana landsberg
tttatggtcaatgcgatctctctccctcgtcttttcagtttcctaatttccattgtttcttcaacaaacatttcacagtagccaccaccacgacccatttcatttctgacgcagatcctccgcgtgagcaagtttcatgttcttcttcttccgattcataccttttttttttccactaacttggcctgaattagatctcgtccgaagttgaatctctagttcgcgagcttttggacaacttcgaggtaaaattcgttattctctacacaacttccgattaacgcttgtgtagctactctcaactttgctgcttgatcctatctcctcttaagttgattttagctgcgaattggaaccgaattggttttatgtaaaactgttactttttttgtgcgtgtattgttaagaatgatggatctatcttcactaagcttgaaagaagttagtttctttggtaggtcttagctttgcaatgaaattgtacgaacacgatggagttgatttagaagatgggaagacattaaaatccggaggagataaaccaattccaagaaagatacataaccgggctttgttatctggtttagcttattgcatttcttcatgcagtatgatacttgtcaacaaatttgtcctctccagctacaacttcaatgctgggatcttccttatgttataccagaactttgtctcggtgatcattgtggtgggtttgagtttaatgggtctaataactacagaaccactcactttgaggttgatgaaggtctggcttccagagaatgtcatctctgttggtatgcttatcactagcatgtttagggtagaatgtgtttcttcaccttcatttgtgttggttctgtagaattatatatcgatgc

SEQ ID NO: 53616 - DNA, 561 bp, Arabidopsis thaliana landsberg
tatcttttatcttcggaaaataaatggttcaaattgtttgtctaaaaatgcacacatgaatagcttgtggtctcacacaattgtaggaaacaaattaatatttgttgcgaaaataatgttattattttatcatacgaaatcctagagaaaatggtggccaaagaggcaacgaccaaactaatgaatttaaaatatgaaaatgatggaatgactggtttaccactattacagtatattgtaattttataaaaacgaatcctgaagaagagggcaaaccccaagaccacgcaaatcagtctacaaatatgaaaatttccaataactagaaaaacatgtgcatttatctttttccatcattcggatctttacaatggaaattttgactactgagcgcaagtgttatagtattttattattatccaatattaatatcattattcggatccatgcattctatataactatgtccaccatcttacttgtgtctatgttgcaacttcaacgtcgtatatatatagggattgttgtccgaatacaatgctaattaaggaagattgtgac

SEQ ID NO: 53617 - DNA, 913 bp, Arabidopsis thaliana landsberg
acgtcgcgttacttgtgcagcttctacgtgtgcctgtcttcttctctacacgtgttttgacaatggatagtttgggccgtacgtaaaatatcgcccaccaactttattgtaattatgaatttatgaaaagtagaataatggagaatgaaagtcattagattctcgagattaagattaatctaaatgccgttctggatatatgcactgtgatttttaagaaaatctgttatttttcaacctttaaaacaatcagttggtaatttagcatgagaataaaaggataaagagttatcatcctcacattcaactcaaatcacagaataaggaagtgcttttcgaaagaaaagatttggatgacccgaaagctggacaaccaatatggaaaacgatttcgtattattagcatgacttctataattatagttatggcaggttttggcttggttcttaaggaaccgagcactagctagttgcttacacatgttcagaaatagtcgtctgtaatagcatctttatgatagtcttgaggttggatatggtagtgtgaaagaattggtccaaacgagaatgtcggagaatatggggctcttcgttttgttttgtcgaaggaaaaataaaaaatagtagcacaatataagattactggaaaaaagatggtcttgatctcctcgacataactagatagaaaacaagtttatatttcaaaagcaataaactacatagaaaacaacaacaatagacatagaaggtacaattttacaaagaatctatgcttgtgaagttttcgttgtaattttgttctgtttctgtttgtattgcgttgtgtttctgtaacttttagacttatatattctttattctttgaaatttctgttaaaactgcaaaaatagtataaacacttacattgatgtc

SEQ ID NO: 53618 - DNA, 516 bp, Arabidopsis thaliana landsberg
aatcatatgcatatatattttatttaagaactacactaaatgaaataatacttgtgggaggcaaattattttgaatatactcttccataggagcttcaaaggtattcgatctgtggacctatcgatgtggtgtcttctgaaaacacttctacgtacgttagcgttagtagtggattaaaacttactaggatctcgcgggcttgatttatttacgtggatgatatgtggttagtacttagtaagacttaatgacgtgaattgaccttgctatctatggtggcccagtacaacttacacggcttatacatattatggatgtcagacacacatttgacgtttttttagcttttcgaatcgctagatcctgcaacactcaccatatatagtcgaccacgactatctgccagattcatgtcaatgcagaaaaccatactacaaaggtctcggttttcatgaatgatcacgtgaagcgtcataccactgaattttttttttttttgaatatcaagagattct

SEQ ID NO: 53619 - DNA, 950 bp, Arabidopsis thaliana landsberg
  unsure (1)..(950): unsure at all n locations
tcatatgtttaaaatcaaaatttaagacattcccaaattttggacactatatttaacatttatcatcagcttttgtttcacaacataatacattgttagttaattatatgctttcaaaacaaccaacttttcatttattgatttctaacaagaagaaacgactatgaagctgttggttaaatctaaatcgattaaacaaagggcccgcaaatttttaactgtgtactatagtgtttttagaaaataaagaagagagcttaaaaatgtgtaaaagggcaaagcctgtctcccacattcttttatttttctgctgtttagctgacatgacaaccctcacgccactactcattaacgcaaccatcattatgattcttaattttttgtatatctaaaatcatttaattctgaaaatcaaaaaggtaaaaataacaatagaaaaagcacaaaatatatcattatttacgactctattcctcaatttgcactcactatcgtagacattataatggttttagtttgtcctttcctttgatatttattgagcagcatggcattgctactaattattacttgtacagtatagtcttcaggagaataacactcttaattataaatgtacgacatttcgttttaacatcttttatttactttcttttttggtaaatatatttcttgattttatttatgttacataattaattttgtagggacgagccccacgcgcactgccgaaccgtgagacccacagtacctcttatttcgcaggcacacccacacgatcaatatttatgtacacgcttacaccaatattattatctgtatttggcctcaattattttagttttatttttcttgttaatttattttagttctatttttttgtgctcatcgaatagacgtgtgtaattgtnttcgnatagtcaaataccattgtatccctatagaataga

SEQ ID NO: 53620 - DNA, 1013 bp, Arabidopsis thaliana landsberg
cagttttcaaaacctttatttgaataaattaacagttaaaaacttttttcaacatgttcaatggagttaaaatttcaacaggttcagtgcaagtagtgtaagtataaatgtataaagatttaacataaatctgcttgataaatagagcctctagaatggtgagaaaacgataagactcgttaacaaaatgttgacaaaattagtaagagaactagttttcgagaacaaggctatacgatcagagggttttacatattcatggacacatcacttgcatcaatgtatatgatgtgactaaagatcatgagtctagggaagattctaatgagtttaagatcgagagctttttagcattttcatgaaattcagggcaaaggaagagagaaaagagcaaacactaagttcctttcttctagcgacgcaaggaaatcatgttctggattaaatctcagtaacaccttagtaggaaccaaaattaaagtggtggtgcattgagcggattgttaaacatgttttctgattttatttttgatgacattttttgtatataagaaccataatttattactgaaaaactagcttgaacatgttacatgtatatgttgatcattccatatactaatgtctagttagtttttctctttaaaacaaaaacgtgtagttaataacttgatattgaaattcaatatgatcataatgtctacttcatgtcctttttcgagaaaggaaatagtaatcaaattaaactaaacatcaaaaatttaagcaaagaaaaagaataaatacatccatggtttttagagatcactcatatgattatgtgatatctacgatttgtatgtaaaaatgttaataataataaaagaaactatatgcaaactgttacttgacgcacaaaagaaacccgcaaatgtggtgaaaacaaggtcaaaacctttaaaaaaccatggtcgtaagaaatccttcaagaaagtctctgagctctcaattctttttcattgaaaaagacaatc

SEQ ID NO: 53621 - DNA, 1034 bp, Arabidopsis thaliana landsberg
gcttatccttgctcgaggcgtttctggaggacgaatctactcggacgtgcgcgttttgtaaatcttcgatgaccttaattgaagcttctgctggttccagccctcgtttctggtagtgagagattagttccgacggagttgggaatttcttcgatttctgcttttgttctgatttgggttcctccgccgcgtttggtgtcgccggttgcttcatcttctgctccgccgggtaaacaagtacagaatttgaatctcttatctgggaaatcttctaaagtacagctcctgggttggaagatgagacggaagataattatttgattttatttatattttaaaaatcagctttgggtaatttttcttcatggactgtctgttgggcttgggcccacgaatactatgaaactagtaatcttctttaatatggtaaaatgatagcataacaacaatattgcctaatgcgcctaaaaacaatacttaggaggaaattattaaaatctatattattaagtggggcttattaagaaaaaatgctccttgtgatgacgtgtcaaaaactcattagtcaggattgtccaattaacccggcatgagaaataaattaacaaaagagtgtaaactaacctctgaagtctttggatttacggtgacaacagacagagagagtggagaacgcttcttcggctaggacgacaagcttcgagttgatggcggttttcttctgatcattctctgaaactgtaatttttcttcactgtttcgccgatttaggggttttcttactcgcatttcggaaacaaatattattcgtatctgttattttgcctacaatttcgctaattctctgtcgtttacgttttcgttttcgtttagatcatgatagtgagaatttagatctgattggtttatctacaaaatgttggtgttcgacaagtctagctaaatcttacagtagaatttcatggtgtccgattaaaacagagaaattttccggggctcaattcttgtcagttttattcagagtcgtctcctat

SEQ ID NO: 53622 - DNA, 541 bp, Arabidopsis thaliana landsberg
gaatggcctagtcccggtgcttctcttcattccattgaagctgaagtaaaggaaattcttgcctctgctggtgttcagattaacagctgctatccacgtatgtcctgcatcctttcttgtacaacaacttagttaccttagtcatatttattttcaggcttcgtcatcaatgtgccaaatacctttattccacttatattgccatgtaaagtgtacattatattctttcaggtggtgtgccaccaatgcttcctttacctatggctgcacttgtcagcttgacgattacatttaagctagataggagtttggagtacattcaaggggtcattggacaggcgctagagaactgtgcaggggggagttctggccaagcatgcccattattggggcattgtggacacagaaagtgcgaagatggcatgacttcatcgtcctctcttgtatgcgttctccattcggcagagacaaagatgcagttgcgcagtcatccaaagttgcttctcgtcctttctgcagtcttcatccagtggttctgata

SEQ ID NO: 53623 - DNA, 939 bp, Arabidopsis thaliana landsberg
ccgtatatcatgaccacttcccaaatcttttgcaaacttaaacaaaacgaagcacttgtgagttctttaatctggtgtctagttgtacttggctgtttcaatatggtgattccttctccccttgaatatgttacatttattgcttttttttggtcaatcttatctttttccagtcacatgaacaataattctattagcgggcagataccaccagagcttggaagcctaccatccattgttcacatgtgagttggtagcagtagcaggcttaaatgattttacttgaaaaatgctatgttttttacctaaactcagttttcatgtctagaacatgctacacacgctttacctattcaatgtttatgaacatttacttttttttttcttttttcttacagccttcttgataacaacaatttatcaggctatcttccccctgagttatcaaacatgccgcgtttacttatcctgtaagtttatgtcacagtttctgttgatttccctggtcctgtcaccataaggactggttacccatgtgtttcttcttttcttttttttgacctttttcctcatgtttattttggcagacaattagataacaatcactttgacgggactacgattccacaatcttatggaaacatgtctaaacttttgaagatgtaagtgatagtttcattatgtatctgaaatcactgatgtgtgaggctggaagggctgtcatcttctattaatgcattcaacaattcaatacgaaagtcatgcattggatttgaattaacctgtgggaatagtaatcagccatatttgagctaattaggatagtgcattctaaatgtagagatactggttgtcgttttctattttttcctgatctttttgggcataagatacatgtgtatgctatgctaacttatgcatattttgtcgtatgcccac

SEQ ID NO: 53624 - DNA, 1258 bp, Arabidopsis thaliana landsberg
ttttaaaaaaaaaaaataaaggccccaaaggaagcccttttgaaagttaaaattaagaaacccaaacttttgaaaccattaattgctattcaccacaaaatttccaaaactttatgacttttcttttttttcttacaattttgaaaacccacaaaaaaaagcttaccttttttaaaatactagaaaatgaatttttacaaataacctttctcattttattgtatggaatactattctttgttgtaacttgtaaatgaagaagcatttgtcatctaaatcttggtatatatttaaggaatttaggtacaacatgataaaaaaaaaatcgggattagattctagtgggtaagatttgatcaatagtacatatatattcacaaaagagtggaaaagttaaaaataaaataaaatttaggatattattttttgttttataaagagagaaattttaaaaataggtcaacttctcaatagcaccaatagtggaaatggggcccacacttcaactctcttcacatgagaattttttttttgtttagagagagaagagataatagatccggtccaccatgagaagattgagtcaagtttaatttaatttttagtcttcgaagaccattcaatgataaatactaacataattaaagtgttaattatttcttttgaccacgtccattttgtgtaaccaattaaaacacctaatttttgaaagtttccaacaagcctaattttactctaaacaaaaaaacctttgaccaagaaatattcaaaagataaaaatcatatggggccaatttagcatatgcccattacctcaatccatatgccactaagtccaccttcaactatattttaaaacgaaacactcaaaacataattttttaccccaagatattattagacccaatagtgaccacaaccaaaacttgtactctaatgtatccaaaaccacaattttttgttcttgttacggttaaaaacaaacaatatcattatcattcattaggccacaaatataggtaaaagaggtcaaatctctaaaaaccctatcatcaaatcatgaattcaaagaaaatatagtcaaaagattccttaccttttaattaatactctctcttttagacagctaagccccactctttatcttccttctatccaatttactcttttctttctttttttcaatttcgaactctcctttttttaaggagaaaatatgaaaattataattacaagaaaaaaatcttttttattttcc

SEQ ID NO: 53625 - DNA, 983 bp, Arabidopsis thaliana landsberg
ccctaattaagctattaattcaataggattaacacttaaaaggggtttgaaaatatgtttgatttgtcacatttgcacaattgaatattataattattatatttggatatttttccgaaacaaatgaagatattggttttttatttaatatacaaatatatgcttagctgatatttgctcaatattaaaatagcatacacattaaaaaaaaatgtattcaggaaaaaaaacctttttttaaagtagcaattcataagattgattattcttcaggtattttgtaagataaagtaagaacacatttaaaataaatcgtaaaatacaacacagatctcaaccacttataagttataacgtaactataggtggctggcacaacccggcttattgacatggatgaatcgcaaattcgtaaccattatttttattattaaccgaatgtctaattgtcttatactcttatctgatctttcaaataataagtttcttttgagtggcgatccattgaaaatacctggagagtggagactactaaaatcctttttcagacccaaacacttaaatagaagcctagtagcctacacagtttattgtaatagttgaggtcgcttcaagaatgtgtacaccttcctccatgaaatttaagttaggatgtcgttatcttgtaaatataaaataacttatacacgtacgtgtataaataagattatagtcaagtgtagtatattatataactaaatagtaaataatactctcatatttgaaacataagtctcctcaaaaaagcatttgtgaaatggtttatacgaccttgcgtgatgatgtaaggtttgtctccatgatatgcccttgtatattaacccaagatatgagagacgtcgagaaacatacaaataatgcactataatttataacagtaaagttttaaaataatgtttcctaagataaaaaatttaaaataatgttataataggtatcattaa

SEQ ID NO: 53626 - DNA, 822 bp, Arabidopsis thaliana landsberg
tgagaccaacaacgtcaaagacgaactttggagcaaacaaaccccaaacctgcaagagcatgagagcaatgttttagtcacagatacaaaacaagaacctttggcttgagtggatcttgctgtgtttaccatcagatgtcttctctggatggtgacgcagagaattgtagctgtgactgtggttgcagatataactccaaagagcatatacatctgatgcgcttaaaaaagttatgatttaacacattgtcattgaatctactagaataaagtttatgaagatgtcttacttgaaacaactggtggcgcttttcgccatgagcctgaggagtttgagagtgaacaggtatgaggagaggaagtccaaatacagaaaggatgatcgagaatccaaatgtctcgattgtcaaaagaatggcttgtcgtataagcacaaactcatcaaacctgaagaaagtatgtcaacaaaaccaccatattgaattaagactccattgtaggctgagtttatgaaacttggacctaccccacaaatgcagcaccataacgaaggccatcaaaggcgcaccaatgcccgctggcgaagaacatgcatatagaaagaagactccattgcaccacacagagaggatttagttttgagaatttgctctgtccatctgatttggttcttctctctacaccctccagcctcattatacaatagcctacatatatttaactgcatgagttaaaccttaatgacctgaattgccatctttgtcataaagcttgtttgctttgagaatcatcaagtgagaagaaaaaagttaccagccacta

SEQ ID NO: 53627 - DNA, 1560 bp, Arabidopsis thaliana landsberg
cgtgtgatgatttaatagctgataaaccaaagtatgaggaagataagagcactacacactttacttaagttgttaaggtcatatgtgaaacccgtgttcgtcaaccatgcgacttgaaagagcctacaacaaataaagaatgggtggatcagatgagtattttaacagttaaactttctgttggcaaatgtatccatgtaggacaacaagatccaagaagcaacattacaactgagcaagttgttgtaacatgtgagagtttctttctgaattacaaactagcttaatgaaagaaaaggcccacctttctccaaggagtgttaaaccctctccaaaatatgtattgtccattttttcaagaatttcaacctacggaagggaaaaacaaaacaaacaaatttcaccgatgtatgaaaacataaacacgaccaattcaagtaaggctaactccataataacggctgattcaagaaatcaattaacgagaagtttcaattcattctcttttgcaatcacactatcattccccacttggaaattcactaccatggctgattatacaacatgttgaaaccgtcaaaccacaagatgaaacccatacctttcctgttcgtagatccactttcctcactgaagactgtaagaatggggaaaaaagcaaaatggatcatcaaactaaagcatcacattgaaattttcaatgactagagaatgagactcgaatcgaattcaaagacaaagagtaagacaatgccaggcaaatcaatcaccttcccgtatagaccagtggattcgaacagtgtatcgtttcccgcataaagaagaccctgcgccggacaaaaacatgtaagtaattctgaaattcgaaaatgtgagatgatgattatagtcgaaacataaacctgagtaaaggcgtccggatcatgaggaaactcagcaactacttcaatttcattgatcctatgggagagatccagagaagaaccagatgattggccccagctattgaatggcataaagaataggaaaacggcgccggagaggagagcaagaggaatcatcatcgcgaacctcttccgagaaatgaatcggcggcgagatgatgcagaagaagaagctggaagagactgaatcatggatcgcttcgtttgtctcttataaggcgatctagtcgccattaaacttcattcgcagtcgttggattggaaattgcactctgtcaaatttgatttgtagctctgaccagactttggcaacgtaattttgagaaatgcgttaaagtgtgttgttgactcatttgtgtttttgctttttatggaaaaattgaattcttttttagaaaactttttttaaatcgatcgttcaatattggaagcttattaaactactgttctcaatccagatgtgaatattaggaacttccatggtacaagaacattgtcgattacgggaaatttgataaacaagatagattgatccacttaggtttaacttaggacacccccaacacagaatatcagagtaaaacaagtaattcagaagtcaagaattgcccaaact

SEQ ID NO: 53628 - DNA, 815 bp, Arabidopsis thaliana landsberg
tgaaggaactgaccaaaatttactaatcaaaccaattatagaaacctttgttttttcagctctaacaacaacactaaaaaccatgaaaagtaagcagtttatattaaggttgtttctagctttccatgaaattaaaattgccaaaaaagtgaatttgaccaataaacactaagctaaaagcctaaacttacgcagtaggaccctcgctttcctcacagttcatgccgaagccgcacaaacagaaaaagttgcaattaaaaaatttggggcaaaaaagcgatgaaaacagctaaagagcaagcgatgacgtgaaatgaaatcagagaatcataatcgcagagaagcacgaaatggacaattcaaaaaaaaaccaataatcgctactatgtaagaaatcatcgaattatcaccggatttctcagaaacctaacggcatttgataaaattccataagaagacagagaaagagagtacctctcaagtgaatcaaagaagcatcgcagctcagaatccgaaatcgtattgaaaaggtaagagaagagagatagatagatagatagagagatctcagagagagaatcaatcagattgttcgtggatagcgattgtagttaaagagagttttaaatcgaaagtcgcaatttcaattgaatgttgtgtgggtttggttttctcgttaacaaaaacaccataataaaaggtacagctgagagagaaagctagacgagtatacttacatacttacgtttctctgtacgtatctgtttatacgtattttttgccttcacggatacagttaggagagagagtgacga

SEQ ID NO: 53629 - DNA, 659 bp, Arabidopsis thaliana landsberg
agcgctcgactctagaggatccccctcggccgtaagaagctgtgctttcaccgtgcgcaattgatttgggagaaggtggagaggtcagcgcgaattttggattgcgatcggttcgctggtgaagaggaaaatacctcgccgtggaccaccgtgctatttatagccacggcgacccaacagccgacctccgcccacggataacatcgcaagcgcatgcataacacgttggtaggaggcacagtgaggaaatcacggcatgcgtgacagcgcggcgagagctcactgagtcacggtggtcgctggtgaaggctccggcagggctagggcggtggcgcacgtaaggttgttctccccgacgttatccgttccctactgcgcacaaacccggacggcggcggcgtgaattttggcgcaaagaagtcgccggcggtgaggttgccgtgctggcgttctgatctacagagaacactgtaccatggcgcttcttcagtcagttggcctgacagtcaacgtttgaactcgatttttctctcaaatctttgtggcatcctgtccaaagatctgcatcaaagttatagagccacattccagctataattttgctacataggattcctcaaaaagcactggatcatatttagaataagcttgaagtcatg

SEQ ID NO: 53630 - DNA, 639 bp, Arabidopsis thaliana landsberg
cgactctagaggatcccctctcatgtctatgagaccgagacgtttctcaatgtggtcccgagtaaagtagctaagaagtgtttgaaacgaggggatagtatgtggggagcttggtttttctttagcttctacttcagaccggcgttgaatgagaaatccaagtctaaggtcattagggaaagtggtggtggtggaggaggaggaggaggatgttttactgggtttgataaatctgatctcaagctcgatgtttttcttgttcagcatgatatggagaacatgtatatgtgggcttttaaggataaacctgagaatgcgcttgggaaaatgcagttgagaagctatatgaatgggcattctcgtcaaggtgagcgtccgtttccgtttagtgcggagaaagggtttgttcggtctcacagaatgcagaggaagcattacaggggactctctaatcctcagtgtcttcacgggattgagtttgtggcttcgccgagtttgtttggtgtcggtgaagaagatgagaagagatggatggagctcacgggtcgagatttgaagtcacgatccctcctgatgctagtgatttggttcatggagaaactgcccacacagacatcgagctagagagccagctcatgt

SEQ ID NO: 53631 - DNA, 572 bp, Arabidopsis thaliana landsberg
agtcgactctagaggatccctggaaatatttaatgcttcatgttgggatttttgtttgtttgtgcattaagtaatgatcataaatatattaataaaaatataataatagcttgagaggtggattgaaccccaaattaaaattagggtttgaaaataagaaaaaggagagaaaagaaaaaaaacaatggatatacaaatataaataatatatatctataaatatctccaaaattagtatttctaactgcacaaatataatttgtgaatgatgagtcacaaggtttgaaattaaatttgaattcaaattgaatttggaaatagagacaaggaaaataggaaaaaaatctaaaatagatacctgggccggctcaacctcatttcggcccaactccctcaaccgcacgacctagtgtggccagccgatgcactgacatgtgggtcccgccgaacagcctctcttgtgctcgctcctcacacgctcactggtctgcgggcccacgtgacagcaaggcactccctcgcgcgacgtaatctggtgtctcctggtttgcaggccggccggtcgggagcgt

SEQ ID NO: 53632 - DNA, 748 bp, Arabidopsis thaliana landsberg
atcagcatcacaataaacctaatcacagtggtcaaagtgcatgaattaccataaagttgacaacttttaaagcaataaagaagatcagaacacagaaaagatcaaaaaccttcaaaagaagaagcagagtatgaaatcgatcaaacccattatacaaaaacgcatggatcgcaataaagttgacactttggaagaaaaaatcctcaccttgaagaacataagcgaccttagaggaatcagagtaacgagggacagcgaagccattcttctcaagagcaagcttagcggctccaatgttaccctgtttgagcatcggcaactcctctgggcaccaggcagagtaagatccaccatctcctccgtaaaccttcttgggcaacttaggtgtaagatccaactccattttttctcgacgatgaaaaagagtaaagaagaaaagatttggtaaaggaagaagaagaagaagtagtaagttttgatgtgaaatgtgaaagagatgcgacacgtatttatataggagaggcttagggtgaatccgttactaatagagagactgattcggcgttttgattgcgttacgatttacttgtggataattcttgtttaacgtttttaatccaaattttatccatttctttatgcccacgatataatttatattttgcctaccaaataaagattcctttgtgaggagataatttttgttaatccatcacgttcttcgtttttttttcataaacaaatacta

SEQ ID NO: 53633 - DNA, 225 bp, Arabidopsis thaliana landsberg
  unsure (1)..(225): unsure at all n locations
tcnnnnnnnnnnnnnnnnnnnnnnnnnnnnnnnnnnnnnnnnnnnnnnnnnnnnnnnnnnnnnnnnnnnnnnnnnnnnnnnnnnnnnnnnnnnnnnnnnnncctcaaccccccttttaatttatttttattttctattttttcttcttattttttttttttattttattttattattttattttacttatttttttttttctttttttattttttttattttttt

SEQ ID NO: 53634 - DNA, 1600 bp, Arabidopsis thaliana landsberg
  unsure (1)..(1600): unsure at all n locations
tctctacccttcccttctctctctctttttgccacacacatcattctctctttagatcttttttttctttttctctgtaacaacaaaacaaaaaaaccactctttcgaatttgatcagattcttctaaagctttagtttttacgcatcaccgattcatttgatccaaagggttttttatttcttctacggtatgaatgttttctgcttctttctttctttataccgccgcaatttctgacttattaggacttatatgttttttctttgtcttgtaattagtactttgatggtatctcataaatagctattttatggtttatcagatgattgctgaatttgatttttctattgaatgttctgtcttatttatgtttggttgtgttattcttaataaactattcatgatcgcgtaaagattctttcttttaacaagtccaattcttttgttgaggttttgtttcctctatgtgttctgttttgaagcagagttgttaagttattttgattttggtttgtgatcatgaaatcgaaaaacatttattctggatccgatgttaatgtctttagtcatgatcctatctttttgtttgttgtacgcagatgcctaaagttgtgcttttttattatctgaatcaggaattagaaatttcccatttttttgtttctctgttttgttttgccagtagttattttaggattctacctcgaagttagtgcctttcaacttcctatactgaaaatatattagtatttgaatagcgttggtcctaatttttgtttgtttgtgcagagtttgtgagaagaggaacggtatttaatacacttacaaatttgatattggaagaaccaaagatgccctggacagcattcttcatgtttttcaacagaacttgcactcgtctggttgtctttttcctcgttattctgtaaatttgttcctttcaggtgagccagcctctcatttcacatcttgtgtttttgtcttacattggtaccttgtggaagcaaattttgttgttgccaccttatatacagcttcttgtgttaaaactattggcatctcttccttgttttgatggtgttgtttccggaattcggaataggggtttgttgttgtgcttattatactggttagtttgtgagaatgtgcattgttggaaacaagaagggaaaccgatcattgaaggaaataggaacttttatgatgactacatgtttcattgctaattaccaatccgttcaagtttgccaggtacatgcctctctttgatttagtatttcctaacacttctatcgcttaggcaacactgatttatgtcattaaaagaactctatcctcttgatgacatgtggatagctatttgttagagtattaaccatagtttttctgatattcaacctttcttataaatcattgcaggctgaatatntcagacagttgcttaagcctgtaacgtagtctagcgtctggagttttcggaaattggggttttgagcggctatctacttttgatttcgaaaaatttactgtgaagttgtaaagagtctggtattctgaagagctgtctgtgggggagcttctggtttggggggtaaggg

SEQ ID NO: 53635 - DNA, 538 bp, Arabidopsis thaliana landsberg
gtgtgcagttcgactctagaggatccccgaaatttgttgtcaacatcccaatagaagcttctctcaaccaatctgctcggctcgcaacagatttctgagatattataaccagcttcacgaagccatgttgtctgccagtcataccaggccatgacgccgtcggagtcccagcacaaaccgaagagtcgagactcgagctcgaagcctgactcggcgacgaaagactcgtcgaagcaatcttccaattcaccacccgccacgtcgttgaaagcggcgtgagtaactcatggagcatggtattggctatgtggaagtcgacctttgcattgtacgcatcatcgcactctttgttctgcgctgccgcatacaggtctgtgctcaaaaggatcacactcttgcaaccagttacagcacggactggcgtgaagcagtaacattgaccaaatgcgtttccggtgtcgaagaactcaaattccactttatccgccaagagaatcaattcttcgcgtgttgcctcgatgtcttccggtgtcaaagt

SEQ ID NO: 53636 - DNA, 605 bp, Arabidopsis thaliana landsberg
agtaatttctgtttttgcagtatgggagtaatgtttccaatagtcttgcactctcccttcattgatattttcatgttgccgttgcacaacctcccttttgtatgcctgagaatatctggtagggtattgttattgaagactgccatccagcgatttctcatttctataccgttttcccttttctggatgtgctttaacatttttatgatgcaaccttttatttgttctcatatataacatcgccatgtctgacatgctgcgtcttacttcatacccagagggatacaactggtctaactgctgactatagggagctcaagcttcggctgcagtccatggaagagcaggctaaactgcgcgacggtatgatgtgctctttcctctgaatcattttggttcactggtctgcatcatcgattgctcttatagctcaaaatttcactgccaaggtctctcgttttacagacgaatttatttatctgttactagatgaaatagatagttctaatgagctcacgggaacatttcatttgctactcacctcacacagctttgtacgaagaccctgcggaagaagtgcacgacttaagatagctgcaggcaag

SEQ ID NO: 53637 - DNA, 646 bp, Arabidopsis thaliana landsberg
ctgcaggtcgactctagaggatccccgactacatatattaatatcatgtactagatctagctactatatatttgaacactataaattcgcaagtcaactattaaccctggactttgagaagctgaaactagaattaatctctcacgtgagaatctgttgctttgttatcaatttgccatccctatgactttcagatgcacttaaaaaggagcaaattataaaaacatgtggaataattaacgaaccattaaaaaaaaaaatcgaaggtggttcttaggaaattagattcagatcaccaagtaaccagtatggcctccaggttaagccagtcccaaaacaaaaacactagtttatttttacagaatataacaatagcataaaatgttacccaaaggctaatacatccttaataatgttgtcatatgtacgatgaatttcatgacggttagaaatgatcggatcatatgtgatctataacattatccctcttcttttttctttgttttggttgttacatcaatcacaagcctcgtttggtccgctagtagtctatttcttttctttaaacttaataagaaagatgtaatgactgatgatcaagagactatgtttcgtgttatatcatgtatctagctagtgtgaaata

SEQ ID NO: 53638 - DNA, 793 bp, Arabidopsis thaliana landsberg
ttcgggagaccaccaccaacaacaattgtcactttatgtttttggattcgtatttatatttttatcataggaaaaagggaattaacacgtttaccaatatttatttgcaaggcactttttagtaaaatgtgagttttataaaatttgagttctgttgtgtggaaagaggaggaaatgcttttgacccaaaatctagactaatgcgagactctgcctcgtcctcttggaccatctattactttatcaaacttttaatttcaaacgtataagacccccaactttattattgcaacgatacaatgtgacaatgtgacattgcatatatattatatccatccacgtgatgtgaatgctagcttatatatagcatatgagagtaacatatggtacaatttatacgaacataagatgggtttgaattactgtgccttagggtttgggcagagtcaactttcaaactgaaaataaccctatttgtttaaacacaagacagaaaaatatatgatcttgtggggttaacttatggggggcaatgctctaagattttgctttatctaacttttcaagattataaaatcgagtgttcacttttaagacattgtttgatgaatttatgcgatataattttgtaaggtaaagttaaaatgacacatgctgcatgtgggagaccgtgtctgtgtttgttcagtccaatacttgggtttagtaaattgtggttttttttaatttcaaaatgtacattttgtacatttcaacagccattttctttttattttgtaattaaaaaagcttt

SEQ ID NO: 53639 - DNA, 609 bp, Arabidopsis thaliana landsberg
  unsure (1)..(609): unsure at all n locations
atcccttgatctaataaactctgtatagatgcaattacatctgcttttagcatcatatctagctgtaaatacaccgggtggtccctgaaatgcttctgaataaggcacatcgccccataaatcggtagctatgcccaggttaagcgccattaaannnnnnnnnnnnnnnnnnnnnnnnnnnnnnnnnnnnnnnnnnnnnnntatcattattttgcaatcgcccattgtggtagcatataaaccaacccagtgattatcaaaatccaatgttttcagatcataattctgtatgaagagatattgagagttaatcccggctacctgatcggaatacatagcagcaacgcgggccaagtcaccttccgtattttgaatggtattaacctcaattgaagttaacattacctggggcgtcaccttttacggagcatccggacttgagtatagcacctcaccttttttacaactgcttactaaaattaaagcaaacaggattaaatatatgttatttttcatttcaataatggttacaagattaacatccaactcttacagaaaccgattctgatttaatgcccggattgtataataatcataacctatagcata

SEQ ID NO: 53640 - DNA, 602 bp, Arabidopsis thaliana landsberg
ggatcccctgcatttaatgcggtctgaagccttgctatcataggaaagtttgcactatgcgtccagcagccatgtgtcgtcatcggacccctgtctgggtccagactccagagtagggcttaggggcatgttatgccctggagcactaggagccctcgttggcggtctggatccaaaaggagacccatgatggagcactaggagccctcgttggtggccccgaccccaaaggagaccgatgaaatgtcttatatattggtaggtgtgaaatgaaagcaagtatatttgggttggttatatatatgagacatggggtcttgcatatggaatacagaacttgcttagggaaatcaatatcggtaaagatacttttcactgaatcttatagccgctggtagtctgggagtatcgtgcgtacagtaccgatcgagggaacagtaaaaagaaaagtttcagggctgctgtcataaatagcagaaccaatgtggagtgtctactcgttgtaactgtgcattgactttgtcagggataaaataggccgctctagtacgcaggaatggcacggcccagtccagtactacctcctgggaaacgaatagaga

SEQ ID NO: 53641 - DNA, 625 bp, Arabidopsis thaliana landsberg
gttcgcccttgatggattttactagcttttcctgctcgcttatttgctggttcagagcattgagttgaccgatgcttgacttctttttggtcgatgtttcattaatgatcttttccacctctttgatcttctcgaggttttgttgtttctccttctgcagctgcgccttgttcttctgcgcggcagcgggaatcaccgaaatgagtacaagaaagaaacaaagcaaggatctacctgcgaacataccgcttggggatattgaaagggaacttcaactctttgtctttaacttctgccttattgtattcaaagataacggtcgtattcagcaggccgctcaccgctttatagaacaggttgattgttccgttgtatggaagaagtttggagcccaatggctggaagttggaatagttgatcacgagcgaattgttgctgctggctttcttcaactccactttttcaatcttcatactcgcggcgtttacaaagttgtcaaccgttatgttgttcgacacttgtttcagcacaaaaatcgaactttcctgcctcacctcgtcggtttcctttctgggcatgatgaggctgcccaaaatggccgcttcgatgacatcgtagttgatct

SEQ ID NO: 53642 - DNA, 472 bp, Arabidopsis thaliana landsberg
ctatcggtgtaagattctggagccatgggcttatattcaacattttgttccattctactcctggttttggtaggggtagctctggtaaacttccaaacggtagcttcagtgatgaagaaggttctttggtttctgtttctctttgttcctcttcggttttcgcattttcttgatgcatttggatcttgtttgcttcttccatagctattacttgaggagcacggaacgaagtcatcatgttttcttctttaccaacgaaagaaatcgtctcggaagacgaaagaggagagttaggacatgtttgattcatcttagcttccatctctgccctttgctccaatactttcaatgaagtagcttttctatatatcttacaaagcacaacattctacaaaattgatcacaagatgagcaacaagttttcttgattcacataatggtttcaagacaaagcctcttggtttttaaggta

SEQ ID NO: 53643 - DNA, 286 bp, Arabidopsis thaliana landsberg
gtgagctttggaaataacaattacagcatgataaaaaccactaattaatacctatgtgcccttcggcgtctgtactttttgcggcagcttccgctactgttctagcatcgtggatgccattttcactcctttgaataatctcatgcgccagttctcggacgacgttatcgcagatatcggtgtcgaatttaccgacgaccatgcttgcttcgagtgagaggccatcaatgtcttcagtagacacagtagcatcggtatgcgcgaaagagtctagatgctcgcagcc

SEQ ID NO: 53644 - DNA, 536 bp, Arabidopsis thaliana landsberg
atcctctagtaacggccggttaaaagtgtcggccagtaccgtggccgtcactcttactgcgcgcacgcagtaagctacctgggcgcatataagagtgtgggggccgacactcttagtgaataattttttttaatatccaattttatttttctcgctccccgggatgggaagcctccataacagcacaatataagcacaacattcaatatatcacaacacaagcaccatattcaacataacataacacaagcaccatattcaatattcatacaagttcaagtccatacgaaagaagttcaaatccatctaaaacaagttaaagtccatacaaaacgcaatcatagtaagttccacacaagcctccatattaattcattctgttggtgggtcattggagccgccgccacttgtgttcatcaataagtccataaacgtgctctgatccggaggcggactagcatgatgtgagccgaaccctttaaaagaaacaacatttgttagtttactgagtaactaattagacatatacatagact

SEQ ID NO: 53645 - DNA, 774 bp, Arabidopsis thaliana landsberg
tatagctggtctaatgtctatctagaaacctaatattatttttttttaatgattttcttacatgtatagattaaaaagttatttatttggtctagtgtcaatcttgtaatctatttttttaatttgttcatggtctttttacattttttatatacatatatagatactaaaattagctagttccacttgtaagcatatgtgtggagccgtatctagttatagttaatttaaatcttcatattgtacttttgtgtggtttcctatctttggtatacacagattagttataatatatgatgatttaatataattagctaaaaataactagatagaagaaactgacaaactttttttcatggtctaatataatttaatataacttcctatcatgtaacctattttcttaatttggtcatgtctttttacattttttgatacagaaataacacgtgtaagcatatgtgtggagccatatctagttatagttaatataaatcttcatgttgtacttttgtgtggttttctatcttcggtatacacaaattagttataatatatgatgatttaatataattagctaaaaataagtaaagaactaattagaagaaactaacaaacagaaaataataaatacaaaagatctggtatgaataaagatgaaaataaaaatacagatatcaaaataaaaggaaatagtctcacaaaagattgacacaatacatgtatgtatatatttgtatatctatataaatagctagagttaccccaagtcta

SEQ ID NO: 53646 - DNA, 163 bp, Arabidopsis thaliana landsberg
agaggatcccctaggtgccgtaatatagcccgaatcatgaaaatgtatgaaagagtgcatgtaggtctgaatgtggggtcgacaaaaagacgttggagtagttccaatgacctgcttcgcccgtctgagggctgtctctgagttgatagaggatgtatcacat

SEQ ID NO: 53647 - DNA, 618 bp, Arabidopsis thaliana landsberg
ctctagaggatcccccaccaaactatgatcaatacatgtatgatcaatttatgatgatatcaaaccctgagaatgtgaatgtgactatgccaggatatccaaaatagcaagttgagtccaagcatgaaagcaaggctctccgccggtggatgcacaccccaagaggtggaacctccacgccacaaagatcaagaaagcgtcgacagcaattctcaagacgacttgctctatgacgagtgatggaaaagggtgaaggcccgtgcatctccttaaatgtagagaagcacgagcacaacccaatggaggagtatgacactttcgccatcggagtatttgaagatgatgatgaaccactttacttccccgaggaagaagtgccagaagttgatgaaatacagcttagatcaggccgccaactgcctagtttgtctcagccacgaaatccccaaaatgagaatgtaactccgagaagtgtgactggccatgtatcaaatgtgtcggtcaagtatgatgtagttgccacttgaagaaaatacagctatgctttctgtgtatgatgccttgtgtcttttctccgatttgcgtaaacatttgttactgcattatctttccagaaga

SEQ ID NO: 53648 - DNA, 377 bp, Arabidopsis thaliana landsberg
agtgtgctctatagaggaaatatatcaatggactacgatagacatcgtgaaatctaacacacgaggccacaaacgaaggtatacgtgatgcatgaacaccgtgaagtgcgaagcttcccatataatctacaagatgatgaacgcgcgataataattataaaccacgaattactagtgcctagaaattctacgaaccattcactatctcataacagagacatagtgagaaaatgagtccgtaagtatgtaggcgctctaaatgaaaacatcagtcgcagaatctcaaacacacctaaactatgcaagagaaactgtggatatactactaccgaaagccattgacacatcctaaatttattgattagttcatgagtgat

SEQ ID NO: 53649 - DNA, 644 bp, Arabidopsis thaliana landsberg
atggtggctcacggccctgacattttcctacggcttttggtgggatatgtgattaccttagaatgactctcaagatgccaaactaatgatgtttctaaaacttgccatgaagagggaagattagaacttatataattaatcttagtgggttttatgggtcgtcctggtttagttttactccatgggctatgttaatgttacagaagataaacagaaaaatgaaaacaattttttaacttaagaaatggaaaccgctgtcatggaaaattcaaaagaaggcaaattaagcaaccaacgcagccacatgctttggtctcccttactcacttctccttcttatttcttcctcttctttcttatcctctttggaccattcctacttatatatactccttcttacatgtctatattcgaacatatacttttcaaacaaacaaaaaaaaacctcaaaaaaaggaaaatatcactttatcttttagcatgacgaggcaaagaatgattacaattgagtcgccgaagaagaaaatgggtggaattgtgaagctcaagaatgttgtagagaggctggtgcaaatcaaaggcttttcctcggccaagaaaccgtgtcctgaagaatacggccgagattgtgtcacagaagacgt

SEQ ID NO: 53650 - DNA, 439 bp, Arabidopsis thaliana landsberg
tgcgcgtgcgcgcacaatagttctcatcgccggccggtgcggtcagcctgcctcggaagccggaagcccctttccattacctgttgcttcacggctaaataacctcgccatcaactcctactcccagctattctcaaagctgcacgttgcctcccatggcttgggaccacgagttcagtttgatcaatattcgcagcgcgcactccatatgtcagcccacgagttcgtctcatacatatgtgtcatctctactgtattctcctcgaacaagcagagctgtagacaccacgccgggccggacaccacatcatgcatcgcgaggacatcaactcagtagcgcggccggcggcgacaccgactactagatcagtggatcgccagcgctgtagcgatgttccatctactctgttactcaagacctaccaatgccaccacggtg

SEQ ID NO: 53651 - DNA, 515 bp, Arabidopsis thaliana landsberg
atatggtatgaaacagtagaagaacaatatccagaaacatcaattgcctataatctatcactcagtctcaatcatatatgacttttaacatgccacataactgagtctcaagctcgttcttatggattgattcaaatcaaagacctttcgtatcaaaacaagataacattttttcaggtttatcttaactcaaactaatcataaagctgaacttgactgcagaagatacaaaacattgttcaaacaagttaaatgtcaaactaaaaaaaacattaattccagacctaatcaaagttttcgaattttatttaataagaccaaagaataagtaaaacggattaggaaaaatcctgtcacaggagagaaatcactgaaccgaattaagcataattttagcacaatgttgtaccggctgggtctaagcgacgatgttgaagaatatctaaagaagaagaggaatagctttgaaagcatcgaaagagaacttacggtgatagagaagacgaatacaggca

SEQ ID NO: 53652 - DNA, 601 bp, Arabidopsis thaliana landsberg
cgactctagaggatcccccttggtctgccaagataaaaggatcggacttgtaccaaaatgactgcacattgatggatttgaaatggctgtcatctcgaatgcccacagtctttcctacttggttgtaccaatcgcatcgaaatacaaccaccgaccgacgaacttgataattcgagttatattgtaactcaattacctctttaaggacaccataaaaatctatgttctccccattatgttcaccttcagtcattacaccactattttgtgtctgcatgaacttctcacgatccactgtgctaaaccgcactccattaatcttgcaagttgtactagtcttaactcgccgagctgggccacatgacagtgcccacagtccttcgctaaccaattctggattctcattacacttcttctcaacctgttgcaacaaaattactcagctgagcaattacatatgcatacccaaaactttagtaaacctataacataaaagtttagtgacttacatgggacataaaccactttgcaaatccttgttgaaccattcgatcaacatcatttggacgtgcaccttgctgcgatagtcctccctgtacag

SEQ ID NO: 53653 - DNA, 561 bp, Arabidopsis thaliana landsberg
gtgcgtgcttactggttagcttgtcaccagtacgaacacgttgtaactctctaaccttgtgagatcccacgccagattcctacgatacattagcgcaaggcggtcgaaaccctaatcgaactcactatctagatcccatagatggtcatcatcgccgcaatttcccgagccgctggcggtcctaatccattacagtattagtcctagttgtatccgctttaattaacgccatgcagcatcatgctttgaagcactggtgtcttccatttcggcagccaatcatcctctatgggtgtcgaattccataaataagataactatccagcacggaagtgattagatgacattactggcgcagtcaagcacgtcgagtgatccactatggctactgggatcgaccgcgacatcgaatcgctaacacgtgtagtaccgctgatgccttatacctctattaatgtaaacctcaccacccggatggatactgaaatctgagtagcgattcaatcagatcggagatatctcgtgtcttggcggcccaagtagcagcagagatagtgacga

SEQ ID NO: 53654 - DNA, 605 bp, Arabidopsis thaliana landsberg
agatgtaagacccatttaagccgttccatcagttagcttcaaaaacattatacaaatactaactttgcgagcatcttggctgagagttccctaggatcaatgacatcaacagcccatccaagtgacttgtcaagctttaagctttcatataactcttctcttttctcctcttttagagtcttcgaatctacaagcagagcagcaaaaggcttcaggggaacaaaaaaagacaaaagacagtgaatgcaatcaaaagttccatgctttacttatgctctcctaaattggaacgtcagagtagcatgcttacactcacaatatacaaagcattgtgtagcaaaaaacttcaggggtacaaaaaatggcaagagacgaatgtgatcaaaaggtccatgctttacttgtgccctctcaaattgaaatgtcacaatgccatgcttatactcacaatatacaagcactatgcggcaaaagacttaacgggaacaaaaagagtcaagagaatataaatatgatcaaaagtctcatgctttacctacgccctctcaaatttgaaaacgtcgcagaacaatatgattacagtaagtcactaacaagtgaaggtt

SEQ ID NO: 53655 - DNA, 729 bp, Arabidopsis thaliana landsberg
atctgacgaacataagctcttttcgcaaaacacacatcacacacctttttcacaacatcgtacttatcgccttcctctctctctcaatacctctctcaatttctggatccaccatgcaagctcttcaatcttcatctctccgtgcttctcctccaaacccacttcgcttaccatcaaatcgtcaatcacatcagctaattaccaatgcgagacctttgggaagacaacaacgttccttcatctccgcatcagcatccactgtctccgctcctaaacgcgaaacagatccgaagaaacgagttgtcattactggtatgggtctcgtctctgtgtttggtaacgatgttgatgcttactacgagaaattgttgtctggtgagagtggaatcagtttgattgatcgtttcgatgcttccaagttccctactcgattcggtggtcagatccgtgggtttagctctgaaggttatattgatggcaagaatgagcgtaggcttgatgattgtttgaaatattgcattgttgctggtaaaaaagctcttgaaagtgccaatcttggtggtgataagcttaacacggtaacatttgaattgaaattgatcataaaggtttgattttgaagagtttaagagtcaaagttttgatttttggttattgggtttgttgcagattgataagaggaaagctggagtactagttgggactggaatgggagggttaactgtgttt

SEQ ID NO: 53656 - DNA, 364 bp, Arabidopsis thaliana landsberg
agcttgaaccaaacttttttggcttagctgcaaatgatgttcgtctttcacctcccctcacaaaaccagatgcatcaccagattcacgctctgatacatgatccctgtgttgagaagataaaccgaatacaaccaacttgtaagaaaagctgttttaagcacaattttcacttaaaactccccacaaatcaaaacgagcaatgataagagtgatgcaaacctgtccccaatgtcaattgtagatgaagtttccacaacacctcttccatggtttccctgttatatcgccaaaggcatactttatttgcctgcacgagagctttcaatccagcagtggctagtttttgaagtacccatgatccag

SEQ ID NO: 53657 - DNA, 1307 bp, Arabidopsis thaliana landsberg
  unsure (1)..(1307): unsure at all n locations
aaacaatataaggttcattccgcaacatgtgcaataatataattgatagtttaccacattgacattgcgcatagtgtttgccgcagtgacattacacaaaacacttaaaattataatagttaaatcttacccactctcaccaatctccaaaaaaaaaaaactcttttacaccactagcaaatacttgaaagttcattaaagccccacaaatctccaatacaaaccctaaatctttttgttttttgtaataaagacaaaccctaaatcttagatgaagagaaaagttcggatgtcgacaggtggcaactcaacggagcaaacagggcatcgaggagtgtgcaacaagtaacgagagatacaagttccgtaaaaaatatgattgcgttttgttttatgaacaatctcgtcttctttcggataccctttttgacagagacaacaagattccgaactttggtaacaatctacgatctccgtcgttggtggagcaattggtacaggtctgtacgatcttgaccaaaccctctaatttgaaagtgaaagacgaggacaggacacgcgggaggtacgatatcaagatccttgaatgaaaaattggagacaatatagtcgaagatctgattacttatgttggactcgcgttgcatcatgaaagaccaaccgaccaaatctacgaatgctttggacaatccagcttttgaacctcttcctcgtccttgtcctgtgtatcgcgtcaatcgaaaccgttcacatgtgtgccaaccattagtacctccataacttactaatacaacaccgacatcagactcacaaggcacatcaaacttgtaaagcctgagattaccgagaagagatttcataattactctccttattgtttttttttttcttttgttcaaactatacaagtctaattgactctttttgtgcccttttataataatagccatgcctaagtttaattactttcctaaagaataataattatatataatagtataataaatcattgtagctattattataaataaagtatatacaagtaataaatttattatttgtttatcttttaattcaattagattaatcacaaaaagtaaaactaaaaagtgttgatatagaatgaattgcttgtctctnggatngatgattctatcaactaaattatgaccagcatatataatataccaatctaagtgacaaaaattaattcttatgtattacatttgtcacagatttttttatactattattttacatttgtcaacaaataaaaagtgttgagattntttttttcacagtttttt

SEQ ID NO: 53658 - DNA, 469 bp, Arabidopsis thaliana landsberg
  unsure (1)..(469): unsure at all n locations
tcatagtatagtccaacttcaataatcttaatcgcaatttgacacgttcagatatcatcacgccctaggctaataaggacattactatacaaataaaaataaatatcagtagagattactcgtggtctataagaagaggaagacactcaagtacttcatcacttccttgtcacaaaccaaaccctaaaccatctttctcaacatggcgcttcttcacaagcaaaacatgtccttggtgatactcctcctcctcggtctccttgccgtctctgatgcttgtgcaagtagtgacccacctaaacgnnnnnnnnnnnnnnnnnnnnnnnnnnnnnnnnnnnnnnnnnaaccacgtaagccccctaccggatcaaccactactgcacacccaaagcctcccactgtgaaggctccgactccatacattccatgccctcctccgccctatactccaaaagctccaagcgtgaag

SEQ ID NO: 53659 - DNA, 619 bp, Arabidopsis thaliana landsberg
ggtcaagatccccagctccgccgctactatttctacagagggcaacattctcaacgaaagatagaaaccaatgtgattccaggttcagcgagttacagtctctggagagagtttcagagatatgtgagtttgtgtttgactaatgtgactctcttatgtgatggtgtgtgtctctctagaagacgcaaagacgttcttagctttcttcttcctttcccttagacttttatatttggtatttttaggttttatatttggtgtttttgagtttaattcatgaaaacagagctgttcatgtttgagtttaattcatgaaaaaaattacacttatatgttattctccttatcttttgatttggccttactgaaatgtcatagtttgggagaaataagtttttaacttgactaagtctatttaatcacacattcaaccaaaaccttgtacattacataaaaaaggaagaacacaatgaataataaaatctcattcaacttttatagtcaagtaatagtctttagagacacattacacaatatcatgtatcttatcatatcatataccacatgaaaatgcagagaagagggctacttatctaggtagttacaggtggtccagagt

SEQ ID NO: 53660 - DNA, 861 bp, Arabidopsis thaliana landsberg
ttacagatggagtaaacagtgaattgactgtgtttagatagctgtttctcatgttctctagtttatgtaagaaataggaaacagctttgcacttatttgatagattttttcgctccacaggcagtggttgtaagtattgatcctcgtagagtttatgtgaaccatccggatgatgtgccatacaaagtcatcagagtaactaatccaggtatgctggtattctcacctctcttatatttgctttctcatttgttcaaaggaaaattatgtaggctggctatatatcatgcattaaatggattaatttgagctttctaatacattaaaattacaaggcaaatgttattaacttattattgctatgttaactcagaactctattttcctaacggacattatataattcatcttgcgtcaatcttagtttagctttcgttgaaaagccttgagctgcttgaactacacaagcagcacagtcacattgtatagagtttctccataaatttgcatacatgtaataaccgggatgaaatcttgctggtgttaggcccaaatggagaagaatatgcctggtatcagtgcacggtaaaatttcggccacccttttcattttaagatcgatttgtatcatttcttaactattggtttctcaactaaaaggtcagtggaggacgagaaggtcgacctattggagcatttgagcttgcgaaagcggttgaagaattaggtgctggtgaaatactattgaactgcatagactgtgatggtacactcaaaacttcaatctttgaattagtttcatgtctgaaaatttggaccacctttacacacgatgagaactagatatgatccacgaaaaac

SEQ ID NO: 53661 - DNA, 1075 bp, Arabidopsis thaliana landsberg
tgggagctcctacatgtcaaaaaaatggattttcaaaggcccaactgaaacatgatgcaaatgaataaggtgcatctctgagactttgattccaaaacttgctgttcaaaagtttgatgaatttacttcttataattgtttcatgctttgaagaattctaacgattcatgcacaaaaatagttaccatggaatgaaaacccaaacattgcatctacaataacatcaaagtcctttgacaagtcatccggcagatcctcaacggaaacaaaagggactgagagtgaatccaactacaaaaataggcaacttttagcaggcattaaagaaacggagaaagctaacaaagatcccccataaaattaagcactggttacaaacctgagtgaccagtccagtataaagtggcttggctgtacgtttgggataacaaataaacggtttatatccaaagtggtgcaaatgcctcgccgccaccaaaccatcaccaccattgttcccaggaccacagatagctagaacccggctatattcttccggtttataaacctggaaaaacattgtagacttcaaatccaatgtacataacaaaaacaaaactctgtaatgctaagataaacagtgatacccatgtttgggttcaataaagtcagattatttcactgaagttcttaacttgtgagactcatccaaggaaaagagagagctttagaggtttatcggttcaaaggttaaagctttgagctttacattcagatacctacaatgaaacgtctcacacatatgtctagatctaaagtgatcgaattacctcagcaattgaagctgccacactaagaccagccaattcctacaatcagaagaagaagagcaaaatcaatcacgaacaggtagcaaaccatgggagagaagaagaaggagaagaagagaaaaatggaggaccatgagctgatcaatggagaaaccaagaggacccatcaaggtctcatcaatctcagcggcttctcgctgagtaagataagagagtggtggtgatcctgaatcttgcatgtttggtatgatgactttggtacacaa

SEQ ID NO: 53662 - DNA, 731 bp, Arabidopsis thaliana landsberg
tactgtgtactgtatgtaaatttgttcgttggccaaccgtttttatttgaaattcagtctttcggtttaaccattggtaaaataagcaaactttgtgagatcgatctcatggatcatattcttaaactttatttcagactaaattggatataaaaatctgtgctaacccgtgaaccaagatctctttcaatatgcatttttacacaactgataaaagaaatacaaattatcgcaaggaaacgattgcgaagcttcaagagctacgtaaatgtatttaaccattttgaagtttcggggttgtcttggagcttcttagaacacaaacaccagcgtcgcaggtgtaatctccagatccagaggagtcctttgcgaaacagctgaaaatattagacaagaaacccatcaatctctgattctatatcaactttttcttcacagacgcatgggctttacaggttctctgcatttgcttacattgtctaaatatataagattcacacaccagaggtaaagatagaaaggagtcaatggtggtgtgccaaaacaaatacatatcgtatgtttttttaagactgaaattgaaacacgttgctaatataactaagtcttcctaaagaacacacgttgctaatgaagttgttggtgggttacaataatgtttaactaagacaaataatacatgtgtgaaagagacttaagttcggagtatcctacctgagttcttacaagga

SEQ ID NO: 53663 - DNA, 1222 bp, Arabidopsis thaliana landsberg
cgacgctattcttacgccttcttcgattgtcgatttgaatttttcccttccttcttatttttctcggtaatttactacgtttcgcaattaccggagatttttctctcttcttccttccgattttttcgcatttatttccgccgaattttccggcgaagccttgccgtcttttgacggacatcggaggcttttgatgatcatcctttgtttcttcaattgtcgaccgctttcgcttttctattttttagcgatttctttttttaattggaccaccgatctgatgaaacattaattactttccattgatgaagaatcatcgagtgaaaatttaaaaaagaaaaaattgagatcttcgttgtgtttatcctgaaatttcattgaaaattgaaattgagaagaaaaaatttctgttttaatcataaaatctcgtgtttgatattatgttgatgagttaatgtaatctaatcgatcacatcataaacagtattaatggataagagattttctctattggcatctgaaatttgtgttaaagtctttgtgtttggtcagtgtcatcattatgttgacattatgattgttttattgatggttgattttatttttaaattgtcaacaggttgaagtagaagataaagcatcgatacatgatggctgattgataagagttttctccggagaggttcggagttttttttttagaaaggaaacagtaaaaaagatggcagtctcttttcctcgtcttccgaggtggttgtgtggtggtagtaacacttaagatagagagaagaaagagtcaattcctaaaggatcttcttcacttagtccttcactgaagaagactactactagtaagactggttcttcctcttcatcagtgaagaagaccaagagaggatggattggaagaggaggatcaggatcaggaggggaagaggataagattgggaatgtggtgtttcctgaacctgatgatccagagtggtcaattggttgggttgagccacatggaccaggttttaaagctgaggatgatgattgtggtggctttgtggttttggttcctctttacaagaaagttatggatggttcaggaaatcagattccgaatggcttcttctctcctgctgctcctggtaatgtttcgtttccattatcatcatcattcattaatagctatcatgtaaattatctgcatgttcttttaagaaactaagtaatt

SEQ ID NO: 53664 - DNA, 660 bp, Arabidopsis thaliana landsberg
tcgactctagaggatccccccatttggaagccaaacaaatccctgttcaatttgcctcaaagcaacatataagaaattacataattagcttctgaatatgtgcactgctcttggaatacattctaagagttttgaaaagccttttcttgagtgcatttctgaatttgatggtacagaaggtgttaaatatatacaacaatctgatattctagactacctgaagcatgtagaatcaaggttgcaagaacatgaaaggtgtacgtgaaggatcctgacttcctatgtgtgctgagttgctatacactcttgttacttatttatggcatattcatggtgtggtttaccatggtatatataagacaaatgaacctaaaggcttaaggcaggtgaaagttgatgtgaggacagacgattgggctacctcaaatggagtaggatgggaaaataaacttgattcattctggcaaggcagaactcaaggtgaagatgcttgcacatcagcatcacctctaaaaaagcaatagtagggaaaaacaagtgtcactaaccgctgactaatcatagcagcaattcttgagatagaaataagtgcatagtgaagtcactagaagacataaagacttcaggtccatatactagtgcttaaatcatctactgctg

SEQ ID NO: 53665 - DNA, 1165 bp, Arabidopsis thaliana landsberg
taatctctctacagacgcaggaaaggaccattccaaccatgttctcgaatattatttgttcgttccaacgaacatggtcacaagttttctttatcaatttaatttgttaaaagctaaacggacaaatagaaaacacatactactaaaaccaaagaatattgaaacaaacaaattaatcaaaaccagctttagtggtgttagattgataggtctttagattcgtgcttcttacttattattgctaagatagtcgacacacacaaaaagaaaaatccattctcttttgttagaaaacatgaatacttgccactataccgattttgatttaaaaaaacaaaaagattgttaatggacaaattttgtctttctagtgcatatttacttaaaaattgaaattattaatttttttttaaaacgtatggattatatttgactatttgttttggaatttaatccaaaacatatgaaaattttgaccgtttatgaaatgttgatttttattttactctttaactcacacacaaaccacatactttaaaattcgaattagagaattcactaggttaatgccctgattagttaagtttgttgtaaaatgtattgatatttgatttaatatatatatgatgatgtaacacataaaataaaataaaaacacgtaaaatgaattaaaaataaactaacaaataaaataaaaacccttggtatgatgggccttggaaagcccaaaaaaaaaggaagagtgcgcgtgaaaaccactctaatttctctggattccaagattccccaattcgtctcctccaacagttttcttcttctcttcttctttgggtgttccttccaccaacggcagaaatcgatttggcttaaatctccccctcctttcgatctctctgatcgccgccgggaacattcaatttcccgggagttcaacaaaaaaaaaactctccgtttttatttttccccctttttcaccggtggaagtttccggagatggtgtcaccctaaaacgctaattggatttgtgacttgatcgatgctgattacggaagtttcacaatccaaggtcctggtttctcttggcctgttcagcaacctattggtgtttcttctaactccaggtttttcttcttacttcccctttctctcttaagcgcttcaaatt

SEQ ID NO: 53666 - DNA, 323 bp, Arabidopsis thaliana landsberg
tcaggtcgactctagaggatcccctacacatagctgttcactgagatgcacatagtataggatagcttgagcagtgtactcgagactctttgctgtgagcgagtctacgcacacaagtcactgtacgagctctcctcacacctctgagcgctctctactcgaatggtcgcctaggtgctaacacgtagcatcatctgcgcggatatgtggtccaggtgcatatggacgcgtagagtctgcgtagtgtacgcatccatgggcctaggggtctcgtttatagctcctgggcatgtatgagccattgtgatcattcccggagggca

SEQ ID NO: 53667 - DNA, 784 bp, Arabidopsis thaliana landsberg
  unsure (1)..(784): unsure at all n locations
tatgatgtatgaaccaccaaaacggatctcaacatccggaacttacaggtccggttccagatagattgaaacattgcctatatctaccacatacacattggctccacttttgactataccggaataataaatccatatttccggttcacattctccctggctggccacgaggttttctttttcccgtgggtttaataattaactaggatccctcgggttctttccttttcttgccagatcttctaactctgctgcttctttcttgagaatccgaaaccggctgtgacttttggtccggtaagctgatgatcggctttgtttcatcgataggatttgatggagttatgggtttatcataaatgatagcagcgtcgagggagaagatacggacggataacgctgagagagttgagattttagcagccgctgaaagagaagaccagtaccaccattcatttttcaagtactctgtcttaatcatatcttctaccacaattgttgcctgaaccaactgaaataaatacgaaaagcgtagatattagaaaaacagcttgttatctgtttctatagatagagagcagaaaaggttaaggattaaaacaaacctcgtatatactttgcgacgatttaacaaatacacgccaagctcttctacggtttggatgtgatttcgatggtcttaaagcttcttcaggcagtgctacatccatatcaagcaagttggttttcagccacctcaaacccggcaaagctttgccagttactaaaataaaaacngcctgtg

SEQ ID NO: 53668 - DNA, 1181 bp, Arabidopsis thaliana landsberg
agagagtcatgtgtcgttcccatgtgctttttgttcgctattgctcttttctattgcattcgctttaggtttttagaaattgcaaagtcacaaagagcttccacactcaaacctcaaataagcaaattctcgaactatgcgtcgtgtatgaatgataattcataaaacttggtttgttattgaaagacttttaaattctataatcctctttggactctgttcttgtttcttctctgcttgtgtattttttatggtatttttgtgtaatttttagcttttggctaatggctactacattttcttcgacaaagttcgtccaccaacaacagatactagtagagcccgccacaaatcgcttttgctccattgtatatgggcctacttacggacccacaagccgtgcttcacaacactaacgttgagataaaaaagacatgcgtatacaaataaaacatgtctattgtttaatctgtgcttgctcaagtcatattcaagatgttagcttaacttgtcgaaaggtttttttacaaaagtaactgaaactaaaccaatgaagtcactgaaatttgttaaccaaagtccaatttaacgacccttttagttgataagaaacagctttgaaaaacctagacctttgcggcttgaaagcagaagataataacctaattctttttacttttcttacatcaatctttttacctttataatactgttagttaaaatgaaaaaagacagaaaagttgcaggcgacatgcaggtgacaagtagcagaagacagttgtcgacgtgtcacattcaccatttcagccaaagccattgatctgattctagacggtggagatgaggacacactcttcgatacgtaactgccgatacatgacgtcatcgtgtctgtgggtcccataagtgagatatcgttttactctctcttttttttcataacgtcaactcttttttttacccatattaatagagtggtaataattatttaacaaaaaaaaacctatgtattttttattttttggtcaaaaggtttctgaataaatttgtaagattctacgaaactacaaatgcatgagatatagaaaatattcaattgatattttgataaaatacatttctattattaaattcttgaaaataattaaattcaaaactgagttttttagaaaactatgata

SEQ ID NO: 53669 - DNA, 1105 bp, Arabidopsis thaliana landsberg
ttcttgaccacatcttctggagtgctaaaaaaaccattttgcttaccctctttatgttcaatattgacaatggaatggggcacagagttgataacttcagaatctggtgaagtttcagcgtccagggactgcgttccagtggccctctcgcactcctcaaccattctaatagaggaaaggtgtgggtcatcatctaaaacatcaccacccaccttcctacataaacccccagcgtcttggttatatttcttatccctcatagaatcagatgactgaagatatgaaactttctccacagggttgcttttctctaccaagtcctctttagtttccacagtttgcattttatcctcaccaaaatgtgctgatcctggcaattctaaacatgttcctgcttttacaataccattaccaggtaaggagttaccactgaccttagagactgtaatgttcagaggattttggccacctgatttaccaaatttaactttcaaacgaaggcaagagccacttgatgcttggatgtttctgttagatccttctacattcccgttatgagaacttctattatgctctccattattaagatttccctgagatctctgtggttcatgatgcggaggtccatcatagggaatattattgctctgtaagaagatttcagtggtcttgcttggtaatccccactcagatgaacgacttgtttttaaaagagagctcctcttctgctttgagcacttgaaaattgactcaatgtctctttctgattgtttctttctagaggattttctcagatggcgagcactcgtttttgtctgcaccactttacattgtttcccgtctcgggccttccttcgggaaaaagacaagccagcttcacaaaaatcactccctgatgcagaagcaacttcaccacctattctgccattgtcatctactattctgagtggctcaactgcattttcaggattacagacttcgattcctccacttccaaagttcaatggaaaattccatatcaaagaagagtcagtaataggggaattggcttccatatctaaagttttttcgtctatgggtgagctctgactgaagttttcagctc

SEQ ID NO: 53670 - DNA, 1416 bp, Arabidopsis thaliana landsberg
attggataaggagtcaaatctaataaacatcatgccggtatattttagagtaatatgtgagttcaaacaatactatatgttcaatagcatgtaaatgtatgtttgtctactaaaggaaacagttgtaggtaataagagatagaaccttctgcaggataggataaatcttcagcttggagcaacgctcatcctgttaatagaaagatattgagaaataaaaaacaataaataagcaagcaggaaagtattctatttgtaatccaaaagggaattactttgtataaagttgcaagaacacgagaacgctgaggaccagctccagctaatatggtacatgtgacagcagctgatagggcctgctctaaagcattctcatcaatctctctgaaaagattagaaaacacattataaccgtttcagaatatgagatatcacaaaggtattggagagagaaaagaggaacactattcaatcacagagaggggaaaagtaggaaactagctttaaatacagagtctccaaagatggatagaagattaattaatcattattccatccgaacaagaaaccaacagaggagaatttgaagaaaagatgtagcagaaagataagtcagttcacttactcatcccctatttggcgttgctcaatctgagatatgccgtaataccgaagtgcagcctctaaaaactttcttttcatgtccaaaattctagcatagcagacctgaaacagaaatatattaaaacttgaaaacgaatgctccttaatcacccagcacataaattcttagtttactttaaggtggtccaaccttgtactgcaaattcaaaacttcattctgactattgctcactaagaaagaagctttatttataaaagcctctgcatttacagcatcatcatcctgaaaatttcaaaacacaaaagtattagagaacaataaaaatttaactaaatgtatttatacaactctgctagcctcaatttactctcacaagcaataaataaaaaagtgatgtagtgaagcagaataatgctcttaacagtcgatattcctaatttcatgacacttagatttggtcaagagacttaactttaaataaaatctctctagaaaaatgtccaaatatttgaagattgaatcaacattcaacaacgggtttcttttgtgcttttaagatctaacttctgtaactgattgacacgcagccacagaaggaaacaagacaaactagctataaatcattactgcgatgcgtaaattcatctcataaacagagataaccgatttacatgcttaaaaactaatgaaaaggacacagaatctattgtgcattatgtacatgaaagggaaagacaaacctcgaaatacaaacgagcaatttggatacactttgaaaagcttgaagttgt

SEQ ID NO: 53671 - DNA, 986 bp, Arabidopsis thaliana landsberg
gtactaagatgtatttagacataaaactgactttgaatatgagaactggcccacctcctttgattatagatccacccctgtatatatgttttttgaataaagcaaccacgtctccgttccatgcatgtaaaacactcatctacaaatgttttaaatacaagacctttttcttacaataataaaacacatatcttatgattggtaacccttagaaaaaggaaaattaatggtgccaaaaaaaggtatgccaaaaacgttttagtgatatgaaaaagaaaaaaaaaatgcaaattctatcaaatttggttaaaaaataattggaatttctaatgcaataaaaatcatgtcattgttattacttcaaatattccaaattcagaaattattcatccttatatttaattatttcgtaaaaaataatctatagtaataagttcatcatagaaatagtctgatatccaagacagaagatcaatacaatcatagtaaaacttagagtgtatacttaaaatttagagagtcaaaattcatcactgtttaataataataatattaaccatgtaatcatctagttggtattcattgacgaaaaaacaaaagtaattgaaatcaaaatcaagaccgatacagaacatggagacacggaagaaaaaatgatgaatccattgttggtgtctattttcctttgttccctcaaaatattctaatgttggtggggttttttccgccatgcaaaaaacgtattgcattttataataaaaaaaatccctttttttttctctttactaacccgaaaatttatgtttggatagcaaaaacattccttttttacagttagaaataaataaataaaatcgtcaaatttgttaggaatttttcttctaaaaaaacaagcatacaattccgggtaatgagaaaatgtcacagatcttcggctataaatagaggagtagctagagagcatcttcttatatcaactaaacttt

SEQ ID NO: 53672 - DNA, 1066 bp, Arabidopsis thaliana landsberg
tcttctccaaaccaagtaggatttgaggtttgtctctatcagtaatgaaattcaatcaagtcaactaaatatgatagatgattaacatcgttcaagaatataaacatctgtggaaatagtgcagacctgaaaaatcgacatcatcatctgcatcagatttgtatgaagaactagaatcatggcgatactcctcttcataggaatcatcttcaggttcatggtcgctgtatttcccatcatcgctggtatcctcatcaccatctgaaacaaatccatcatcttcatctgcttcatgtgcagtgatgggcgtgtgctcatggttttcctgatcatcagctttggggatatcgtctgcctcagttggcttatcagatttctctcctgtccaacgagaggcaacaagacgccccaactcttcctttgacaactcttccttcttctcggttacaaaatcctcctatcgatagaatgtagagtactctaacgttaggaaaaagtcaggaattcaataatctccgagatataactcagaaggggtagagttattgaaaaaatgcaatagacaagtctcaaaaagaaagagttattctcatcacggaagttcagagaactatactcagatttgtaagcacttggccagaaattgaaagtaaattaccactttcttaacctcgtctgattcctccttttcagcactaccatcattttgagattcatctgtgggggaagaggaatcctcagatgaggtagattcctcttttctctccacaacatgctgcattgtaggcaaacctcgtatcatcatcccatttcaagtaacagattgcaccacttttggaaaagcatatgtgtgaaataatttttcaaacctcgtctgctggattagtgtgagtagcctcatccaatatacttgttggttcaccttcagctgctggctcctgaagtcaaattctaattcagtactcggttgaattacacaacccgaaagcaaaacaagaggactcaagaaatataaaaagcactgaatgtattgatgaggggtcgtagtcatgtcaatgagttcaag

SEQ ID NO: 53673 - DNA, 495 bp, Arabidopsis thaliana landsberg
ttgtgccgtcacttcccccaattgtatcaaacaacacttcacagccgacgtacgttaatcatttttttttcttaacgcgtatcatatgcataacttttttattcatatgttttgttttgttttctctgaaaatctacaattttgtttgtgtaactcattaggcgaatgataattcagcaaaacatccatgccaagaaaaaaacctgatgaaacttagagcaaaaatgaactgttaatcagcaaaaattggccaatctcaagagagtagtggtaagtcaatcaaatgcagcaatacaaagaagacaagaaaacactagaatcctacgatagtgtaaagacaagtttgaaggttaaaccctaactaagatgcaatgaatctgctctggagatatggaacgtgaatggttcttcactgctttacttttaagaaagttatgtgaacctgataagttatagtggagagattccttcattgatgcttggtcataatcagct

SEQ ID NO: 53674 - DNA, 548 bp, Arabidopsis thaliana landsberg
tggtggtttatatcgcctatgtaatatgatatcataatctgccatcttggggctcctcgaccctccttttatagtccaaggaggagcggtgtttacaatgtttgcattcgagttggttataaactcgatatagagttggttatctactacaagtcatgaccaagttggccctgaactatgtataagttgaagcctatcctttatatgcttcttccttatcctcctagaattttaccatatctacatggatattgatcctatctcctgatctagtatgatcgttgtcatctttatcttcctagaacttccttgcaaatagaatattttcctgactgtgtggctcgagtccatgatcacttggtcgagcgcccggactcacttgtcatgatcttcttcatggactcgcacgtgatacctctgatatgtcccttacaatactcctccataagatgcatataactcatgttttctacatcccctcagatagtttacataataattctttagcgattgatttggatgtaaatacaatatcaaaaaccatattg

SEQ ID NO: 53675 - DNA, 901 bp, Arabidopsis thaliana landsberg
ttccctattatctatcaaagctctcagtgtttctccataacttgatgagatttagtcactctcaagctaattcagtctggtcctaatttcaatcagatttggtaaaggaacaactgcaattgctaagtacaaatcgatccagatttcaaacaagttccaggtttaatccaaatcatcacattcaatcaaagaccaaactagaattcaaaacatataatctctgattcagattcaagaaagacaaagcatgagacatcattctgcaagttaaccaattccggttattctcgaatcctactgaattaagcatcaatcatctaaaggaacttcataagaaaatagatttcagattgagattgagcaaaacatatgataccttcttttcgaaatccatgcacacaaaagtgattgagcggtgaaaacgttctggagacttggggaaccgagattttgccgcctcagcttttaaatccttgttttgtttttgcttgaattatatattgtttcatgatgggctgtgaattcacagcccatttataaacatgaagggctaaatcacaaagcccatagctcttaaaaaagagtcacgtgttcataaatggatggatggtaaaaatgtctattggcctcctttatcttctttgaatcacgactatttggatactttaaaacaatggtatcagattgcttttcacatgttaatcattgatcccgtctcacttttcttctaggtatttttttctttgttaaagggcttttataatcttgtagatatataagaacatgagtcatacaacaattagggtccaatattgaacatgatacatgtaacatttagcatccgctatagtttactctttgatttgggaaaaatcatgggaactcccgatgaccgagcgtt

SEQ ID NO: 53676 - DNA, 625 bp, Arabidopsis thaliana landsberg
  unsure (1)..(625): unsure at all n locations
tggggcaccaccaaccaaaacagtgacaacaacaaatcaaattagtccaaatgaagaggtggtattggtagatcaacatcaacatccacagccctgtaataagggaaaggccgccatgggaacaaggaggttcttcaaccgtccatggacaaagggaaagaagtggtgatggaatataatacatcatcctctaaaaatgagtcacatactagaactcagctatgagttgaggctcctgagttcatcccatctccggtctataatcccggtttggttgaacatggacgtgtgcttaggtggcaaggaattggtctcaccaatgatgacatcaggaaaggtcatgtcgacccaactgcaaccctttctgatcccatatcatcagaaattatggtttcaaaacctcctgtccaaggttccatgtcaccgaaaaggcatcgctgccaccgtcaaaataatcgtcgtgcgcgggctaacctcattgnnnnnnnnnnnnnnnnnnnnnnnnnnnnnnnnnnnnnnnnnnnnnnnnnnnnnnnnnnnnnnnnnnnnnnnnnnnnnnnnatagaatcaagatgcggcaagacgaccatgcagcgttccttggaaagactatatgcaagatttg

SEQ ID NO: 53677 - DNA, 697 bp, Arabidopsis thaliana landsberg
acttattaccaagctatgttactattgacgtgaacatcatcacccgtaaattccagagtattgtacttgattttacgaagcaaaataataacagagtcacaaaataagtactagtataattcaaaaatcttctatgctggaaaaagtgagccttaaaaagtaataaaattgctgaaaggcataattgcatgcagtggtctctgtgagtgccattgttaaaagttcctttacacgcataccatacacactactcttgtcgttgtaactcccaaattgttttggccttatttctctaccatgcctaacatttaaataattataactggagtgtcatgctcttctcaatttactattcttttattctaaactttttaagtttattgtaataaataagttaattaggtatataatcctctttagggtcccatgatttaaataagattatttatgtttgcaacttgatttttgtctattatgctaaatcactttattcatctctgaagaaacttaccataaaatatattttggaattttaaacactactgtaaagccctaacggatagtgttgcaaaatgtttgtaggaatttgctgtgttttttagttagcaaacactaatcactaatgcaatcacaatatctgttttcgaagcaatcgaaatgttagtttcagactttcagtattttgttattgtagtag

SEQ ID NO: 53678 - DNA, 1304 bp, Arabidopsis thaliana landsberg
acctgaaattgccgtatagaaaccaagcaaaagcaatattagcttaaattcacatacacgtggcttctaagtattatcctatttggtttcccaaggaacctttaacatcatcatctctcaggacttaactcttgcagcaatgcaaactaatttagccaatcaccgcctacattgaaccgggttttcctaaatacgtcactacaatcttgtagtttgtaaagtttttttatttctttttaaacgatttatggaccaccaacgacttatccaataaagtagaaatttagacggaaaatatcttccaatatttagcaataaatattcttacaaaaatcttccaaccatatagtacacttttgttagtatatttatatttattgtataaacaatttaagtataaaatattttgttgtctcatttgctgaggtttattccaccaacgacttgctcaattgaagataggagaaataaaataacactacaaagaaatttaaaaaaaagaagacaaatcaagatactgaaaccaacttttctgttatagtatgggtatgattataaccaacaacaaaagaaaatacacgtacacaaccacttaagtagcacctgtttagtgtttactactgagatcagcgatttaaatcccttggtatgtaaaatttggttaagaaactgattttaaaaaaacataataatagaggacgattaaatatcctcaaaaataaaaagatactgaaaagagaaaaggaacaagtgatatatgtattagtaatttgtgtatgaatgaatttgtagtgaaattcttggtcgtggcaatctggatctccatattggccaaagtgatcacatgaatgtggtttatgcatggcaagactgctaattcatgaaattaatacaactggatttcgattgatgttgaatccatgacttgagttaacttaactaatgatcaatctaaagtcagaaggcaaagaattacatgattgattgtaactgaataaaaataatagttgcataaataatgaccgtatatggtatcattgtaagcaattgggactacaaataaaattgaatcataatagtagtggtatgatagattgataggctaattaaaattgatccttgcatgtattggcattatagtaagtgcagaaagaatgaaattcagcatgaatagttatatgatattgcatgaaagtttcaccttaatgcattgcaaagcgtttaaactagatcatgttaatttacgtgtaaaaggggtttctttttatttcctttttaaaaacatttattaataattcgctttc

SEQ ID NO: 53679 - DNA, 500 bp, Arabidopsis thaliana landsberg
gttgggctcccggagttcgatcgggcagaccgcatgcgcaaggcactccgcgcctcgggcgtcggcgtgcaggagatggctgactatctcggagtcagcagaggcaccatcagcacctggatcaacggcaggatcgagcccggcaagcagtcggtccgactgtgggcgatcagaacaggagtgccgtacgagtggctggaaaccggaaccgtaggcggttctccgtcaccaacaaggcggactacagccggctataacggcctgtttgtaacggacagcgaccgttccccgattggattgttacaaccgctgcgtggagtagcggcatgacaaccgtagggaggcctgcaccatggggggcgcgcagcagctcgaggattggtcagcgtggctgcgagctgggggcgcgagcgaaaagacgatcacgacgcgcgtgtccggcattgccgcagcctgtagctacctcaagcacgacgatccggtgtcgttcaccagtcgta

SEQ ID NO: 53680 - DNA, 177 bp, Arabidopsis thaliana landsberg
  unsure (1)..(177): unsure at all n locations
cccccccccccccccccccccccnccccccccccccccccccccccccccccccccggcgtccccccccccccgccgcccccccccccccctncnttcccccccgcccccccccccctcccccccccgccccccgccccctccccccccccccccccctgccccccccgcccccccc

SEQ ID NO: 53681 - DNA, 691 bp, Arabidopsis thaliana landsberg
tataattacaaactaaccttgttaaagccaacatggacatattttagtgttaaaagatagttacacttatctcccaaaaaaaaaaaaagtagggacgaaagaatggccaaacacaaacccttacatttaaaagaatagagactctctcatgagaagaaattctatgaagaacaggttactactccataagtttggaacagaatatacgcaattatggtttaagactcttagcaatgagagaagctcctctatttcctgttgagctttccagtaataatctccatgtcttataaatcttttccaaaaataatgaattcagaagttcgatatccaaaggatggccgggctttggatctgtgaaagcagcctccgaggcaaaaactattctatatacataaacctatatcagaccataaggccatgcttgaccggttgacccccttgtgcttaggacctgttctgctcataacctaatcacaacctcccaccatcttcttcttagaccaagaaccttaagtgtcactttcatggacactcctaatattctcctctatttcattactttgatggagcattggagaagtaaaccatattcatccgcatcttcgcaaattttttcaaccgactcaaatcgacaaaaagcttgtatcctcaaaggatttgaagttcctattttttttccataatatcc

SEQ ID NO: 53682 - DNA, 608 bp, Arabidopsis thaliana landsberg
tcgtgttcgtgatcgtgttccggctgcgttgaacggccgtgcaccgcgtcgcgcggctggatcggcgtcatgcggctcggctgccggccgcgctagcgtcagcacgatgaattgcgccgcgaggatcgatgacgctgcatctccgcagtgcccgctgtcgacgcgcccgctgttgcgcgcgggcttgcctgaggtttccgcgccagggcggcggcgtatatgcggcctatatggcgcgcgccgcccgcaagtctcgaattcctacgtcgcgccgcgttgcaatgtcgccgccgcaagtgcggtgttttcgggagtcggccgatggacaacctcttgtttctcgggctgggtcttgccgggctcgttctgctgctgatctacgcgcgcgttcgcgcacgccgctaggagccgacgatgctcgactacgtgctcggcggcgccgtcgccgccttcctgttcgcctgtctcgtctacgtgctcgcacgtcccgagaagttctagacccgggcccgttcaatgaaacccgcacaaaactcgatgagcgccgagctctggctgcaggccggcctcggcgcgctgcgcagcttcgaccgcgcgtgctgatccgc

SEQ ID NO: 53683 - DNA, 374 bp, Arabidopsis thaliana landsberg
gctgcggcacggcggcgctgtagccgaagctgtcgggcagccaggctgtctgtggtctcggcgacccccagctcttcggcgaagaactcggcaccctcgacgagctgtcgcaccagactctcgccgctcggcatgttgatgtccgactcgacccacatgcctccgaccgggacgaagcgcccggcgtcgacgtacgggcggatgcgctcgtagagctcgggcgcatcctctttcagccaggcgtactgctgcgccgacgacatggcgtagacgaactgcgggtcgtggtcgagcaaccagagcacgttcgagacggtgcgcaccaccttgcgccgggtctcgcggaacggccacagccaggccgagtcgatgtg

SEQ ID NO: 53684 - DNA, 542 bp, Arabidopsis thaliana landsberg
gcaagactttcatgcacacaacatatatggacaatatagcaaggataaggtacacagatctactaatggaaaacagcaacctcacacagctaccaggatcatcatgctcaactacacacatacacaccttgaagcaggagatgcgaccagagcatcaataaggggtcctgaaagtcgagaccctttcataaagtttaaccaaggggattcttggggcaaagatgtatcttttaaagtcccagatggtacaacataaccagtccataaataagcagatgtatcgatcaactttctcgagatacaggattcgataataagatggagcatgttcctagctgaaaaatggttgagtaaaagtaagaaaaaataatagaacgatgaagagttaaaatgcatttattatgagcaacagtatactgaagcaataaggacaaaaaaatgtttcgagaatagctagcaaacaatagtgatacaaggattggttatgatggggagtcaactagtggaagccatggaatgccttcagaaataaacagatagtg

SEQ ID NO: 53685 - DNA, 193 bp, Arabidopsis thaliana landsberg
tcaaagtttcaaaactgaagacaaccaatactgcgcgctctccaatatctaaaccagccctgcatgtgtatttggataaaacaaaggcagcaggatctctgacaacaaaatgacgagtggccccaaatgggcctagctaacccagagaggattggaatctcctgtaaactgatgcgaagaaactcgacccaaa

SEQ ID NO: 53686 - DNA, 401 bp, Arabidopsis thaliana landsberg
tatacattctttttttttttttttgacatcccaatcttattttagaaaagtgcagaatgaagaaaaacagccccattaattattatttgttttccatcatccatttgtaattttgaatcaatcaacaagttgcacctcttggtcactttcacagtttcacccaatttttatgttccttttgggcttgtattagatgtacaaagtccattaacttcacttgtgcttgtcttcccgggcctattcaacaagaattggtaaaaaaatctctacgcttaacagatgaattagtttcattacatgtggagcaaaagatcaaatggaaaatgataacctataatcatgaattgttttattacgccaccaatccataattacagatttaaaaaaataaatgcaccagc

SEQ ID NO: 53687 - DNA, 1293 bp, Arabidopsis thaliana landsberg
aattaatcctctattctccatacaagttacagccaaacacaattagaatagtcttacattatcaaataatttaatgaattctctatttctgctaccatgcttcatgtagaatttctgtacaattcttctcaactaatatttatattcttttttttttcaatttctatttgttcagctggtaattttttagagtaatgtagtgaaaggtagaaaatagacggaaaaataaaagtgtaaaaatatagataaaggtaaaacctaaactcatcaatgacttgaacaaaaaatttagttttttttttcaaataatattttcagcgaaagatgtaaattagtcaaattttaaggttattagcgtgaccataattaagacattaatcaaactccataattaaaacacttatcagataaaggtagaacacataaattctataaataaaacactttaaattgcgattgttagttgctgtgattcgtcgctgcatccaacggcagacaaacgaacaaatttttgataactgtcgatggtcgttgtcgcctaagtatccgtacatgatctcccaatacttagactatgtgacaaagtaaacatgctgctccttccagtaatcaatcttctcttcaatacctcacaccttaccatcatctacctcatccttaacctctttcttcttagcccatatttccatctcctcgtctattatcatcaatgctttctccaactcagaatcttcttcacctcgccgtttcatcttccacttcttgtaaccgtaatctgaatcaatattcatttctattgtattcttcaaaaaatttaggcgttcatcttttctttacgactgagttttccttcccacttcttcacgtatttcatcgcactgtatagtgacaatggagacataagtttcgacggcgatgatgacggcagaatctccgtcaagttgctacaaactcttctacaacactcttaatgacgtcatcaatccgccccctttctttgcttcttacctctgttttgcaactctccagtgatgaagcttacttagtggcttttaaattatgtaacttgggtgtcataattaggtccgttctaaaggagtgctggaggtgcaaaagtacatggtccaacaaattctttttaaattttagagtaaaaaaattgtagaaatataatttttaagaaaaaagtttagaacaaaacggcaaagattacgtttagaagatataggtgaacacatacataatttacatgagttaactaatactagacttaattaaaactagatgtcatgt

SEQ ID NO: 53688 - DNA, 896 bp, Arabidopsis thaliana landsberg
actatatgatctacttgctccctgttgattgtatccgccttaacaacaaaaataattagtagagcgacacataaaaccgatattgccttcaacatcgccatattttcaaaacgaacaaagtaaactaaatggatttacacttacttttgattatttattactttcttatagatttctaatttctaatttctaattttgcgttgatgctttataaaaatagttggttgcgtttgctaaataaagttaattgttttggaggttccttagttatccaattccaacaagactttctttcacaaatgtaattattgttattagttccaacttccaacagtacatatataagatctatgttagctaataacaactaaatgtcgatccaaaattgattcttaaaatgtcaatcaaagttagttctttttagttttgtgtagtgtaaaattagataaatgaattaactctattttattttattttgccttttttcctgattttatctactcagattttattttcctttttgcttactcaaactttttttttatataattataaatagtacatggtctacttctataattaagttacaaaactatctatattcccagttgagtagttgacctttaaatatttcttttcttttatttaaaaacgaattttttcattttatattattattattattattggtaaaagacgattaaaaaagaaaattatttgtgggtaattttttattgtgtttcctttacccttgtgacttgggttctcttcgtctccctctctctttgtccgagtaagatactgaatatatatagtctctctcgactctgttactctcgacaaccgtggcaaaaaaagttaagaaaaaaatacgacttttgtgagttgtgacaaaa

SEQ ID NO: 53689 - DNA, 379 bp, Arabidopsis thaliana landsberg
tctcatcaacttaagtagtttgtgctaatttcgtcgatatcaacattcacatttaaatccgtatgatacatgttctagacaaaagaaactagaaacacataattgtctatatataaccattaaaatatagattgattgatatgatcattttcatcaacgattgtagagaaagattacaatatgaatatatatatatatatataataatcataataaatatatcttaatccatataaaagaatacattttcccattaccaaaaaaaaaagaatacatttgccgccctcttgtttccataatacgttttgttgatttcttttttgagatattttgatatatatgactccgaatcgtgttttcatatcacaaaaattccaac

SEQ ID NO: 53690 - DNA, 835 bp, Arabidopsis thaliana landsberg
gctggtgcggcaggagtgaatttcttctctatctctgcttttcagtttgtggaaatatatgttggtgttggtgcttctcgtgtccgagcattataccaagaagctagagaaaatgtaagtctaataactttctatacctgtgttgatcgtagaacttaattctcacttttggatgcttctgagatcattcaagcagtacctcttggcttcttttctgttgattctcattgttatagtgaggatttagtctattactggatgttaattttaaggtggtctcactgcaggctccatctgtggtcttcattgatgaattggatgctgttggaagggagcgtgggttaataaagggttctggaggacaagaaagggatgccactcttaatcaggttccagacatttcagattgtgtaatagttttcttcgttatataacgggatggtaattttattcatttttttgtgtcccagctacttgtttctttagatggttttgaaggaaggggagaggtcatcaccattgcttccacaaacagaccagacattctcgatcctgcgcttgtgaggcctggacggttcgaccgcaaaatctttatccctaaacctggtcttattggacggatggaaattctgcaggtaacggcgtggtatctgtgtttatgtattcttaaacttgtaaatttgcaacaagaaaaaaagaggttaaaagtagagttttgtcctcggtccaaatttatatttttgttttggatttgctgttaaggtcaatgctcgtaaaaaccgatggtgaagatttaactatatggcagttgctacatcacagatgcatgggtgga

SEQ ID NO: 53691 - DNA, 474 bp, Arabidopsis thaliana landsberg
aggtcgactctagaggatccccgataagtaatgagtcagtcattagtgctaaaatcactcctacttctacatcaggaggtgttgataggagtatcgttatcgacctcagtcagctacggcacaagagttgaagcttcacgtctctccaaagcagacgccttcggctctggacatggattttctcagctttggagttatctcatctaccttcaccgtacagtaagctaggctacgtagatcacgaacaatccgttaccatgacgactgtacgacacccctgctgagttgctcggaatgagggaattcggatgcatagagcgtcgatcgaccagggtaaactctcgatttggccgggcgacgcacgtgctgtgatctgattagtctactgatttgtgtgtagtccccaagatgtcattgcacgtagattcgatcagagccaggcagacgaggcaaggctgcaagaacgtaggtaca

SEQ ID NO: 53692 - DNA, 608 bp, Arabidopsis thaliana landsberg
  unsure (1)..(608): unsure at all n locations
nnnnnnnnnnnnnnnnnnnnnnnnnnnnnnnnnnnnnnnnnnnnnnnnnnnnnnnnnnnnnnnnnnnnnnnnnnnnnnnnnnnnnnnnnnnnnnnnnnnnnnnnnnnnnnnnnnnnnnnnnnnnnnnnnnnnnnnnnnnnnnnnnnnnnnnnnnnnnnnnnnnnnnnnnnnnnnnnnnnnnnnnnnnnnnnnnnnnnnnnnnnnnnnnnnnnnnnnnnnnnnnnnnnnnnnnnnnnnnnnnnnnnnnnnnnnnnnnnnnnnnnnnnnnnnnnnnnnnnnnnnnnnnnnnnnnnnnnnnnnnnnnnnnnnnnnnnnnnnnnnnnnnnnnnnnnnnnnnnnnnnnnnnnnnnnnnnnnnnnnnnnnnnnnnnnnnnnnnnnnnnnnnnnnnnnnnnnnnnnnnnnnnnnnnnnnnnnnnnnnnnnnnnnnnnnnnnnnnnnnnnnnnnnnnnnnnnnnnnnnnnnnnnnnnnnnnnnnnnnnnnnnnnnnnnnnnnnnnnnnnnnnnnnnnnnnnnnnnnntttaacccttttgggcccaaaattttgggggaaaaaaaaaaaaaaaatttttttttaaagggaaaggggggggggggaaaaaaaagggg

SEQ ID NO: 53693 - DNA, 1204 bp, Arabidopsis thaliana landsberg
  unsure (1)..(1204): unsure at all n locations
caaaaacaaggctatgagttaatccacttatagtaatatcaattttgagtttaaaattgataaatgttttttttttggtttttttttttgggcactcaaagattgatgaatgttaacataggaaatttcaagagtaattttttattttgtaatttgcaatttgggtaattttggcgtatttttaaagttttttactacataatgttccattgagaactatactacatggtttactgtttatgacgacataaggtaaacggtaagcaatgtatagactaaagaggattgctaatcatctccactaaatattatattgactactgcgaataatggatactgtgaacatgacgatggacggtaaaaattgtatttaagttaaccaccgtaataatggatcatccactgcaaatagtaagtgtatcgttcaccgtgtacattgtttaacaatgtaactgataaattaggaaactcatattactctcatcttattttaggaatatcacatattatgtaatcatgttaattgattcattgtactctttactgtagataattgaatacacggagaagggaaccaaatattgtgcttctcagttctcatcattcaacaaggatcagaaacttttctcaaaacgtaattttctctaagccgccatactaaaacttaattgctctccctttgttttttaattctacgtctctcaccctctgtttttttcctctaaattcttttcttcttccatcaacagtaacatccaccgtaaaacaatgtatcggtcactgtgaaccgtgtgttgctcactaaaacagtgtggaagtgcatcattccacgcaaaaagtgtatcgtccacctgttttctttctgttgtatttgtttatattattttgatgtttgtttttaccacaaccactttgacccctttatgattttaatttagaggaaagactttttgtacatgtgaattgttatgcaattattttattttagtcgtcaatctgtccacccaagagcccaccacancaaacatcctttttcaattgtatttcaactcttttgatttttctcacgtganattatatccacttgcaaatcttcatgtgactcaatatccctctctctatagnctatatacatatatatatatatatatgaatataagggacttgttgaataaactccagtttttgcttggttggcaaattc

SEQ ID NO: 53694 - DNA, 565 bp, Arabidopsis thaliana landsberg
gtcgactctagaggatcccaatcaaagatcaaacaattgaccaatttttccaaatttactcttttatatttgattgattactttgatagtacatatcatagaatcatcatatttaagtttttcttttgcttcacatgaatactagttcttctcacgagcatgatttaacgatattacatatttttgcttcatcatgattcttcattcatcatcggtggcggtggcgggtgggggaggaaatccataaccgggtttcgttggatcgtgtttcgggtctggacctggttccggataatccatgatcgttggaatactctcttcaaccttgtatccatataacaaatactttttgggtcttaacaaagaagataaccatattaatttttggtttggtaaaaaaatcacccaataattatcatatgctaatttctttcaaatgagtgaaaaaatgtagtgattaaatttatttggcaataaaaatatggggggaactaaaatctatgaaaataaagtgtttactagatgagattgctgaccttgtttaaggaattttggtcggtgtgaa

SEQ ID NO: 53695 - DNA, 547 bp, Arabidopsis thaliana landsberg
aggacccctttaaaattatgaatttgaaaattaaaaggaaaagaaaagggaaaggaaaatataaaagaaaagggaaaagcaattcagttgggccgccagatcaattcggcccactaccaccattcctcactccgtgcggcccatcgtcgtgtccacacacccacgcggtgtcatggcaccgacacgcgggcccgacatgtcagtctctcaaccgcgcgcgcctgcttaagctcggtcgctgctcagtgccccccttgactagctcctccgctcaaatgaattacaatgagatccgccgcaatgaccggggtcatgcgatcgggggccgggattgacttcgccaccatgaaccccatttcttcgcctctatataatcggttgtggggccctccttatcccctcagccgtgactccaaacccgagaaccgttgtcgccggggcgcatcaagccgacattgtgctcggggtgccacgtggggggggggaatcctcgcgtggcgttgtcgcgcctcggtggtgcttgggctttccagacgtggggaagcga

SEQ ID NO: 53696 - DNA, 160 bp, Arabidopsis thaliana landsberg
  unsure (1)..(160): unsure at all n locations
cccccccccccccccccccccccctcccccccctccccccccccccccccccccccccccccctcccctcccccgcctttccccctcccacgcccccccccccccccccccccccccccccccccccccnccccccccccccccccccccnccccccccc

SEQ ID NO: 53697 - DNA, 405 bp, Arabidopsis thaliana landsberg
  unsure (1)..(405): unsure at all n locations
gccggcgatannnnnnnnnnnnnnnnnnnnnnnnnncaagtggcaattgaactaattgcggtaagcactttcatattatgtgattataggtaataattttgaagattcaaccctctaaacaggccatgttggttagatgcgtcctatgttcacatgattctttggcaggtattgacaaattctggaaaagaaacaacattagcagcaactgatgccgctactccagcattgaggcgcaccgagcgagctgggatagctgctgctactcctatctcctaccactcaaagtttaatttctgcatgattgtatgattgcatcatcttgctgctttgagttctcatcttctttgtcagagcgtaagccgattttatgggccgtataggggactgatgcagttgatacat

SEQ ID NO: 53698 - DNA, 510 bp, Arabidopsis thaliana landsberg
atacgaaatcccagaagcgtgtagaccgtcctcaagagcaccatgcacacttttcattaagcgacattgttggtatgacaagaagaaagagcggaaatcataccgtacttacatgctcacgtattcagtgattggcggaagcggtaaatctacaatatactacctggtatccgtactatacgggtacggatacaaacacaccggcctgacctgtgtatgcatgaagaataacgagttacttgcgccaaacatgcgtgcgctgtagcgcactacgctttcgacgtagttgatagtctcgctagtgagaaaattgtggtcagaccacgctgggcggcaggttagcatagaagaaaggaaaaaaaggcgccgcaccacgtggttgttacctttcaggtgtgggcgccgaccctgagtacctgacgtacgatgcgccggcgcgtatgagggcaaccgccatggtgacatcgagggcgacatgaagacggagggacggaagcgcccacgatgcac

SEQ ID NO: 53699 - DNA, 554 bp, Arabidopsis thaliana landsberg
acagctcacctgaggtatacactatatacaatgtggatgtggttcacaggatttttgagtatttcttgatgcatgagcaacaacaagttctaggaaagccaagcatatccaagctcttggacaattatttagccgagattgcaaacgatccatatcttcccatcacaaagtttcaggttctagcagaaatgttgccggaaaatgcttggaaatgtcatgatggtctctatagagcaattgatatgtttctcaaggtaataaactcttttcttgttatttcatcacaaaactacaactaatgataaaattccctgttgcagactcatccttcattgtcagatcacgatagaagaagattatgcaaaacaatgaactgtgagaaactatcacttgatgcatgcctacacgctgcacaaaatgatcggttgcctctaagaactatcgtccaggtatgcgataaaacagaacagtttttatcctataagcttttcttgaagtcaaagagtaatacaagtgactgaccaaagctaaaacattttatcataaacaagatc

SEQ ID NO: 53700 - DNA, 303 bp, Arabidopsis thaliana landsberg
tgtgtcaacagtcttcagaacaatgtgaatacataactgggcattaagctgacatttttttggcagagactatgattgattggtttaattccgtaaaacacaagttagggcttatgacattgacattaagctgacattttttggcagagactatgattgattggtttaattccgtaaaacacaagttagggcttatgacattgacattctcctcctgaaactagttctttgtcccgtggaacttcttcttcgtgtcctctctcttgtttcctcatcttctcgttttgtctggagcgatttctt

SEQ ID NO: 53701 - DNA, 950 bp, Arabidopsis thaliana landsberg
ctgaatgctgtcacccctgtgctcgataaagatgtaattataaataacgtgatcacacacacccaaataccaataatccgggattgaaatttccaacctctataaatgctctttcctgtatggtcgtactgtccttttttacaccttcgtcgagcatgtcatgtaagggttcaagtactttcagcatgccttcaatgttatgttcaccaaaatacaagcgactagcttcttctagtgcttcatgccacatttcatgccaaagtatggcaaccctgataagttcatgtgatacaagttgcgcctgtttttttgttgttatgggtgtagaggaagggggtcactaattagctcaggtaaaaatatataattcaataaaatcgacaaacacaagagatgacttttaacctgatccacgagtgcaccactgtgctggcgaactttatcaaccacctcttgagccgcagctctccgaagattgcttattgatttacatgcaacgagaaggggatacatcagagcctgaaaacatttgaaaaataaatagtcaaggagaaattatgcatccaaaatcgaagtacatatgcaatcaaaatggcagagtaaaactttatgtatgtcttaattcccaccatagaattgtaatactgatgaagatttataaaatttctagaaggctgcaaacctgtgggtggttttcgcctatgcggatgagaagagactgaatcagttccctgacagcacgattattagaatgtatcctagcaatgatttgaggtagcacaacaagccatgtgttaatgttgacatgactgaatcctgtcttcaatgcggtttggacatcagctgtagctccatggttgaaccacaatgtcagaagacgcagtatgtcctatggaaatgagacagcagaggaaaataatttaacagaccaccatttttgtaaaacaaca

SEQ ID NO: 53702 - DNA, 457 bp, Arabidopsis thaliana landsberg
cgactctagaggatccccatttctcaacaaactctagcattgttctcgttttgattttggtttattaatcggttcttgaattgtgtaacggttcttgaaataaacaggttttaggaaagagcagcttaaggtgcaagtaaccaccacgaggaagctgagagtgatgggagatcgtccagcaggagccaacaaatggatccgtttccgcaaagagtttcctagtccgccaaacatcgacgtcgactccgtctctgccaaattcgaaggcgcaaatctcgttgttaggcttcctagaaccgagccaatgggcaaacaaccttcacctattggtacagccacgaaacctcctccagtttctaaaggaaaccccaccccttcctagcccggcagcgagagaaaaggtccaaccaccaaaggagacaagagagaatgtagacgggctagaaaaacagggccg

SEQ ID NO: 53703 - DNA, 99 bp, Arabidopsis thaliana landsberg
ggaggacaaggcagaccgagcaagcacaaccagagacggcagggaagaagagcgggacgcggagacagaagacggaagagcagacgagagagcaagggg

SEQ ID NO: 53704 - DNA, 601 bp, Arabidopsis thaliana landsberg
tcctatgcagacatgaatcataagatcatccctgcctgccttgtttttttttgtcttactcatgctacacgcgcggagaagggaccgaagggaaagtatgcttactccggaggattcaccggggaaagcctgaccataaaaccaggcaacaggtttgtatatacaagctggtcctgcaccgggggatcccggggctcgggccggtatctgctggaagacaacagtctttacctgcggtttgacgatacaaagcctgaaactgacttcctcccaagggtctcctatcaatcatctaccggtgactcgacagagctctgccttagtgtctgggatcaggatgacaaaacctatgtagatgaggatgtcgttttttatatcatacgaaaacaagatcaacaattaataacgggtacagtaagcaattcacgtacaacatgccttaaaatccccaacactgcttttcctgcaactatccgcgttcattgcatgcttacaaaagatgtccatatccctatcgatagcgcggggaagtactccatctggtgccccggacgctctgatttcttatcttcttatacaaaaggagattcactccactttt

SEQ ID NO: 53705 - DNA, 791 bp, Arabidopsis thaliana landsberg
aagcttgtatggaggtaatgcaaatcctcatcttaatttctagacattaaccgttaatatttcaaaccattgacatcatgaaccactaaaagtacagttccaaagtcagagtctaaataatgctgtcaacatccatggaaaatttcatgcatatatatcatgatctcattatccactttgttcactacactacaatacaaaaattgatcaaaactcatgtaccaaaaattctagctattaattaaaaaaaaactacctaaaatctgtttataaattttagtgagtaaaagaatagcacaatgggtttttgatatagaaatgcagaaagcctaatatgaactgatagtaataattctacaagttatacagagacatgttaaatgataaaaatactggaaattaaggaacctaaaaccaaaatctgtagcaatttgggcccttcttcaaaagctatgtaccacacttaatagctcagctttatgactatataatatatacatttagtgacaaagaacaaactcaaaccaagccgattacaaaactctgggataatctatataactatcatcacttatacataaaattacaacaacaataatcagatcacttcgactctcgccggaaactgttgtatccctgtagtctcctcttcagccggagactctctagaggcaacaagtttcacagaaaaaggagcagcgggaacacacttttgtctcgctttagcaaagcttggagcaagaacagtttgcagccactgatcaaatgttttctcttcatgctgatgacca

SEQ ID NO: 53706 - DNA, 323 bp, Arabidopsis thaliana landsberg
  unsure (1)..(323): unsure at all n locations
acaggcaagctttttcttcttgaagacancancgcccgcacacggcaagatgtgctggacatcacgaacaccacccgcccgggctccaagaaagngcgnacgaaccggaaagaaaagggcatcgaaagcgaaggcgaactggaatatgcctgcaacgaaaaccgcctggcttcctttaagggcctcggacagaaaacgcatgaagccgtgctgcaaaatatcgcgtttatccgctccagccagggctttcatctatgggccaacgttgagcaaagtgcgcaaggctgcatcgaacgcctgtgcaaagcattgtccgcatacac

SEQ ID NO: 53707 - DNA, 1352 bp, Arabidopsis thaliana landsberg
gaaagcaaaactccagcaccaattagaaatccacattaccaagtcaaagaaaaaaattactttttaaacatcaaaccgagtagactaacaaagtatccccaatcctgcacagaacacatccaagtggtagcgataacaagaagtaaaatatgagatgcaagaactgtcctatattttaaacgattttgaacccactaaaaaaaggaaatttcacaacagttcattttccgggaacatacgacaagagcaacaacgaaagatctaaatccatagtctcatagaaaaaagatacacacacatatatgattgtgactccactcacctcatgaatgtacaagtccgacattcctcccaacttcagactctttaatcaccactaaaatcatgcacattaccccgatatgtcatctctattgcaaaacatgtaactcccacaaacactatttctggttctggataggaaatataaatatattaaacagcttccaataatagagaaatcgaacccagcatataagaaaacttgacttttcttatccagaatcaaatcccatgaaacccgaaatacatgtaatccaaaccctaagagttaacccattctttcaactattcatgaattccagaaattagactcaaattctacagccaaaaagtcaaatctcatagcaagtagcacaaaaacaaagtaggaaaaaaaatcagatagtaggattccaccattttatgctcgtaatttctagcaaaatcgagttaaactatcattattaaaccgcgagtttacataaacaactaaaatccagtgaaatgaggcattcaatgaaactaactgcaaccaaaaaaaaaacaatcaaatctgagaaatcctcagctaccgctgctatggaaacactgaggataagaaccaaattttctaattaaattcaatcgaaatagattccatcaaagccgaacgaaataagctcacctgtgagacagattcttccactagcaactccagaaaactccacagataaaattgtttaccagaaaacaaaaaactcagcagatagaagagattgtatcaattcatcgaagctagatcgaaaaaaaaaactgtgtaggactttctagagatgttcggcagaagacgatgaaggcttcctatttttttttttttgacaaacattttaaattttaattaaactattgtttttgtttcgggagaatcaaaagacaagtgaccatgatatcaacacgtggcaactaaatcaaaaggtttaacaggcttgggtttttaatatcagaaatcgtggacgagagagcagtgtgagatcctatcaatttcagttttattattggtacacgtcattagt

SEQ ID NO: 53708 - DNA, 766 bp, Arabidopsis thaliana landsberg
tatcgtattatatccgaatacgttacttttctttccctactaggctactaagtaatatttatgtttccttttgcattgattatttgtaagtgaagttatgattatacataatcttgcaacttgaaactctttttgttttttcttgaatcttggtatgaatcagaagttgacgagcttaaacaatgaaaatgcgatagttagatgggattcgagaaaaacaagatcaacaacaataaaagtggttcgacgagttatataactttttgggtcaaataagtgattattattatataatttgtcttgtaatggagtaaaacgcatcaagaccattcaatcaaacgtttactagtagacaaacacacgtggcgcttatctagaacttaattattggattaagcaaagcaggtgcaactgtggacccccctctgattacattcgttttttatccacaaactgtttataaaatatttagtagtatagattaacatgtacattattcactgattattgttcctacatttttaaataacgtcactgattctttgattaataaaacaagaaacccaaatgaaagtgaattatgatttgagaaagacaaacgaaataatgacaaaatgccgtattatataataatggatacaaattgtaagaaataaataactcacagttttttttacaaaaatgaaaaatagtagtataaaataaaaggagagcctgtgtttcagaggcccaaacatcaatgcgcaaataatgaatgaatcgccgt

SEQ ID NO: 53709 - DNA, 529 bp, Arabidopsis thaliana landsberg
cactgctttttttctttgtccatggcgccgcgccggttgggggattggagcacgaggcaaggtgtgcggcgcctgggttatagtaaagggtttggggcgagtttgttagcatcctaacaacctaccagagtcacacaacgacggctgcatgcccacgacgaggagggtgtcgtggatttcaggaagacgatgacccagtacgtgggcccaatcagtcagtggcgtggaggaaaaactaaaggcttaaggccaaaatgggccagcgggatggagagtttggcccagctgaagaattgagcccaagcggtccccctctcccatttttttattctgttggctattctctttatttattgatttcacatttaaattcaaatttttgttgtgagtttcatacttagattaaccgtgcaataaataaaattccaatatgaaaggttaaatttatttatatacatattttctttatattgcatagggttccttttctttcctatgtcattttaaatttctagagttcaatttgagc

SEQ ID NO: 53710 - DNA, 1248 bp, Arabidopsis thaliana landsberg
atatcaatcatatcattaagctaagtagctcgcaataacagatccgtaacacaaacatcatttgaagaacaatagaaaagctaaatcgatctaagaaacgagaggatttgatctagacgaagggatggagaagaaggatttacccattttcgaagattcgcagagccgcacaacactggcgcagtgaagggtttgttcctgatttaaagtggaagattagggttttatctccaatggacctttatattatacgaaattgggctacttgaattaataaataaaggcccataaaagacttccactattgggctttgaaattcggattaaggccccttaatttctttttaagacgaacagagagacacacacacacaaaacaaaacttgtattgagtagaagaaatatttcatcatttgacaaaattatgaaaacatcattatgtataaatagcaaactattttctgcacaaaaaggtaaactatttgttcatatgatgatcgattaaaagttcactaattttatcctctttttttagagtgatgcaaaaaatcattgtcccaacgactatagttggtcgttggctttgacacaaacaagtataaatgaatacaacgatcactagcaaaaaaaacatgtttattgtgaacaacgagagttaccgaaactaagacgtaagtaacaagtaacaactcgacaagtatgttttagacttttctagttgaatatgcaaaacagagtatacgctttttgtttttttttgtcatggagaatcaaataaatacgaaaccatctggttcaaacttcaaaggttgtaatcttaaaaagaatttggcccgtattttgtcatatttccgaatcatttatttttcgttttttgcattggtataatcatgaagtaattttgtccactgaagtcttaatcttcttaaagtctgttatccttcatagttattgtagtgaccaatcgaattcatatttggtgatggatgtgatgctttcagctattaaaattggttaatggagatatactttgttttcttaattatatcgatttatgacctaattttcaatgtaataaacaaaataggcatgatcatgttttaaacgtgtttcaaattatgatgtgtatgtgtgtattttcttattaatataattttcattgctaaatatgatgaacataaattttaatattgtttggccaaaaaaaaaaaattaaattaaaaaaatctaattttggtaaatttgatg

SEQ ID NO: 53711 - DNA, 897 bp, Arabidopsis thaliana landsberg
gatatgctggtatccttctctggaaaatgacgggttttatctggtcagccgagagaaaaacaaagcagtcgaaacttgagaagattcagaatagtctgattcacgctgcaaaggatggggacatagagactgtaaggagacttgtggaggagatagaggtaagctctagggtggagaagcagagtaaagtcatctcgaaccggacaatgactgtgtttgcgtgtgccacagtgatcacaactctcactatagtgattctggcattgactttgacaagcgacggctaaaagagaccttcgagggtttagtcataagcttaactaaatggattgttgtctttccacgtttttctactatcttcttttcgtggtttattgtttgtaatgtactaaagtgtcataaaagtttttgtgctacttcaatttcaaccgatccgagagcaccaaaagctccaaaccacctaacgaaagccagtgaacgatgagacgctatgtatgcacctcctaatatggtacatgtgcatggctcatgcaaaaggtcgataaatggttgatttgtcgacttaaagatgcagtaacctgacatccagatccgaagaagttaacttgataaataccactacgaactcaacatgtaaaatggataccaaactgatataatccatattcctccaaaacaaaaatccaaaaatgatgcgagaaatatgttaaagagcaaaactcactaaacacaaaaaggttaaaacatcaaaactttgtaaaaaaaaaaatatcgtataaatttaacgtttttttaaattttttttaattatttcaagttaagagatttaaagtccaaatttagtggactgaccgacccggtggatctttttagggttaaagacccttaaataaaaaa

SEQ ID NO: 53712 - DNA, 464 bp, Arabidopsis thaliana landsberg
  unsure (1)..(464): unsure at all n locations
tcaaagactttatgantctnattttttttttggccgcganacaccatnngagaggaagattatttttaacatctttgattctttcctcaaagcatgttttcttttgttatccatgcaactttgaataaattgttttttttttttgcaaatgaaatcccatatatatattaaccgattttagattcaaagaaataatatttttataagcatggcgtttgatttttggttgaaggagtaattattagtatagttagtacataagtcaatggtaattaacaaaacatttgataaagtaaacataattagaccgtttgaagatttcttcaagtataattaattaattttttaaattgtttataataagaatagttaatgactaattaaagaaggcgcactctttggaaaataaaaaattttaaaatagtactttgcttgttatttaactaatacagaatatacttttt

SEQ ID NO: 53713 - DNA, 968 bp, Arabidopsis thaliana landsberg
tctcttgccatagagaaagagttggttcctcaaatgtgagtgcatagttaatatgagaataataatcaccaccttcaatctcaagaacaccactatctaccacaccatccatgtaagaaagttccgtacaccaattcatcatctcatcatcattttgcaacgaaatcataccaatatcaaagtcgttaagccacccaaaatcatcttcaagaccggatatcgtctgttgcatattcattttcctagcttctatggttggagaactcatgttgatctccacttctagcgacctaatcacacggtttagtttctcttcttcctctttgttgatgctactatgattttcgacgggcgattcttcttccaaaaacgacaagataagctcatcgttgataatctccatgccgccttgatgttcaaaaccatattgcgtagacgccatttgtgagaagagagaaaaagagttaaagacgatcaaatatagtatataactttggaaatatgttatggcttgagccaaaactaacgtcttatatatagagaaaggttaattaattaattaggcatattggcgtatgagagaagatgtccccccacactacacgaccaatcatgtgatcatatgtaatgtgatatgatgatattgatgatgataataattgttaacaataaaatataagaataggataatatagcttttggcctaacaactgataatggaccatcgatgagacatgactgaatgaaattaattcttgagcatatacatataataataaagttagttgaatgtcaaattccaaatgtacaagtggaatatgcgtagaggcaagatctttcaagtttggtaaaatgcataacccacttatagatatggttttaggacagacgaagaaacaaagtcgagacatctactttactcgtgtttgcaattaatttaggaacaaatcaacggacgttgatttatt

SEQ ID NO: 53714 - DNA, 1146 bp, Arabidopsis thaliana landsberg
ttctcagaaaaccgagcttgccatggatgttgacggagaaggtgatcgtggtcaaaaccctagaattatggagagggactcagattctatcaaagatccgatctcagagccttcatggtttacccccaaaaagtaatttctcttgtttctccattgtatacgtttctctcaggtcaaaattaccgtaacttttggcaaaattgggcggaatgtcgaagcttttagttcacagtgtgaatgaagtggaaaaaatttctttgttcgcttgaaatctgctaattggttctatttatggaagttttatacatttttgttgaatcgaagttgtttacatttgatttgatgatcttattcttgtggttatttttttggctatctctacaggcttctctttgtgttttgtgttgtcaacttaatcaattatatagatcgaggagctatagcaagtaatggtatcaatgggagtcgtggttcttgcacttcgagtggtacatgttcatctggcagcggaatacagtaagtttccatttgttttccctctatccattaaagaactaggtattgaaattctccattcgaggtatagtgtgtgacgtctattatattatgtgaaaacatgagaatctgttttaacttacacaggggagatttcaacttgagcaattttgaagatggagttctgtcatctgctttcatggttgggcttcttgttgcctctcctatatttgcttccctagctaagaggtgtggactggattctccaaaattctgagtacaaagcatcaattttattgaatatgaatctatatttcattatcgttaaggttatttatctcacttactgttctgtgatgcagagttaatccgtttagacttatcggagttgggttgccaatctggactctcgctgtgattggctgcggcctttcgtttgatttttggtccatcacaatctgtcgcatgtaagtgtttagatcttccattatttcttttcatattttattttcaaaatctatacatcttcgctttacatttctcaccttattcaggtttgttggtgttggtgaggcatcatttgtaagtcttgctgccccattcatcgacgataatgccccacatgatcagggagctgcttcctggaatgca

SEQ ID NO: 53715 - DNA, 621 bp, Arabidopsis thaliana landsberg
taggcgtttgttatcagaggaaatcaagttgatagtttttgacaagataaatgctatattctacaaattcgtttattgagtgtgctatggcaatgaccccgaaaaacataatcaggcaaacatttgtgaaagcaagggaagatatgccagaatttcttacatgtaaaattgccacaaggtttcctgtaatcatcatcctttcgcaagatagtaacgtgatttccagaagtgacagccacaagttctcctcttggtgaaataaataacgacaccggcttattagtttttctaggattccagtattcactccacttttccttgagttgactaacaccttgatacgataagagcacagagatgaagaagcatgtatcaaccaatgagctatactgctaatttaacgaaaagagatgaacacaaacatgattcctacaagctcataaaaccaaagattcaaaaatcacagatctctgagttaaccatctgcgactgacctttgatggagacaagtgaccgaagtcctcctttcgaattagttccatctgcctaaacttcgacagcagatcaaagcgcaatgtaagatataaataaaacactatattgtataagcaatgatgaatc

SEQ ID NO: 53716 - DNA, 575 bp, Arabidopsis thaliana landsberg
  unsure (1)..(575): unsure at all n locations
accattctttcacaaaattggctatgcagaattgcttttttttgttttgtcccagctccgcccnncggatggggaagggtgctaattttttattttttttacggcatattataatttatgacattgtacggtttcatagtttattcacatacataattagtaataaaaaatgttttactaaaaatgatattcaaaccaaaacatctaaacgtttattttggaaatcggtcattttatactcgacctaaatttaagtggtcaattcatacaatatttttcttttcttatgtgctaatatattcaaattatatatccaaatttaccaaatcatacaagattatacattctagttcattctactgatgtacatgccacatttttgattattttgatgacgtacttaccacgctcttgacgatgtccgtgtcacgtcctcatcaccttatttttttttgcttcttcacccttttcttcttatattccntattctcctttcttctttatcactattgctcgaggaagctgtaaaaatattatgtgtttgatgcatgtaaaaagactagaaaacatatttt

SEQ ID NO: 53717 - DNA, 1009 bp, Arabidopsis thaliana landsberg
ttcttcactactgatacccccttttatcaaaaaccaaaaaacattcttccaatgcattgactaatctgtattaccctgaagctagattaagattcaaagggactgaaaagttttactgaattgatttagaacttataaaactaacactgcacatttcattaatgtaaaattaactagaccaggattcttctaaccaaaagattacttccaaagcatattgacaaatctgtattcccctaaagcctaggttaaacatccaagtaaatagtagcaataaataaggttcttttaactataataaggttcttcaaaccataagatcaaggagttgcagaattagtatttcaatgcatagaaaactgatctcacctgcatatttgaaggctaaatctgccacacatgccacaacaggtccacctatttccattccatttttcttcgctgctcaaacaaaaactcaaatcaatcaaaatccaactcttctccatctattacttaattccaggaagaatctaaatttcaacactgtagaactaacacttcaagcagcttcgttactatgttgattcatcaattctagaaattgaaaatccccaaatctaattcgagctccaagaatctcaatgaaaacatttaagctaatttcatcgttcaccagaagaaactaatcggaagccaaatacgaaggacaattgaatcaacgattcaatatccttaatcaaatcaacacaaattccaaaatcaaatcgaaatacagacgaagcttcatcgaatgtattcataaacccgttgattataccagaaattttgagaatcgattgaaatgggaagagagggagggagagagtctaaccctcggcttcggcgatagagatcgcggagagtctgaatcggtctctaatgagatcgtccatagaatattcttcaacgatttggtctacctggagatcgcttatgtcttctcctccgacgtccatggcgaagcaatagctaggtttcaacgcctgtg

SEQ ID NO: 53718 - DNA, 785 bp, Arabidopsis thaliana landsberg
acttgaacctgtaacaagtaaatcgtcgacgtatactgccacaataagaagattctcaccttcttctttccggtagagagaagtagagctgtcaattagggctaaggaccgcgggctggagcccaatccgctttaaattatagcggtctagggttttagttttgttgtgcgcggtcaagcgggctgagcccgccgaggcctaaaatcattggcgggctaattgttggggtcagcgggttaaaccgcgggtcaactaagacctaattttctaatctctagtctctagtactctctagtctctacttacgtatttaacctaaatagtaaatagtaaatactttgagacggttctaattattctacacgaaccccacgtttccactccaccacaactcaacgagatcacaattccaatttccaacacaagtattttgtctttttctttgacggctattgctagtttccaaattttccatttgtcatttgtgtagttgtgtaagtaattcttaaccttctaatagaactctcttatatctatggatacatatataattatgttaatctccttcaatgacagacaaagatgcttatatattgatatttgatagatagtagacgatttctggttgatacttttgtgatggtgtgtgttaatttgttattatatatattgatggcaccaatgtcatgaaattatgaaatcaagtttgattttttgagaacttgttttttttgttaacgaaagactatatatgtagctttagcttgtgtgtagtgtatatata

SEQ ID NO: 53719 - DNA, 269 bp, Arabidopsis thaliana landsberg
aactatactatttaatccaccaatcccatacatattgttttaacatcaaaactcacaaattttataatattataaataatcattttatatattacccattcaccaacagaaactattaacaatttaaaaaaattccaaaacctttacaaaactatatatactataatacctaactttacatacaaaattttaccttcaaccttttaaccaacaaaaaataatttttctttaaaaaactatcctaattaaaataattttttattacttag

SEQ ID NO: 53720 - DNA, 320 bp, Arabidopsis thaliana landsberg
gcacctcctacctccgctctaatcctgcccgctagtggtcgatccaatggccaggaggcattgccttccacggtccgaagacagcggcgcacgcagcacccacggcggcgcccgccctgcgaccgaacctcgccggtgcagcccacccggcgattaatcgccctaatccccgattaaactgatacagagcgaagaggaatgttgcgcgaacacggtggacggatactcaccggagatggcagtacggtcgaggtcggtccgcggtgagcagtggattggcggggccgtagaactccgataagggcatcactaacgctata

SEQ ID NO: 53721 - DNA, 541 bp, Arabidopsis thaliana landsberg
ttactgtctcttctctcccaatcttccgtagatacagttgtagtagtcgtcgttgttgttgttgtgctcgatgtcattgatttctccgacggtgaaactaaaatctttcctttcatggtttctctgtttatcatctgattttcgttggccctagatttcatcaatctctatttttcattttgtaattttatcgttttgaaatttaaatgtcaagtcccaacggtcctctgatctcggcagtttttgttttatgtaaatgactaacatacccttacttaacacgtgtctttctctttccttttaatgggccggattctagtttgggtccagttataatttcctttgtgtttcgaattaggtttaaattttactttattagaattaagcccaataacgagttttgttgcaaattttcttacttgctatatatgtcgtcaacatgcatactatataatctcataacaaagtcttttctttttttcgaaattgtaatatcatataaatgaaaaaccagtttacaaatttgatacctaaaccattg

SEQ ID NO: 53722 - DNA, 907 bp, Arabidopsis thaliana landsberg
  unsure (1)..(907): unsure at all n locations
tggttctacttgtttcaggacatgtcagggaaacgggtcatagcaatatgtatgtctggtggggagttccagacagagaaaggcgggtcgctgtcttacaaaggcggcgatgctcacgcgatagatgtggacgagcagatgaaattcatagactttatctcagaaattggtgagatgtttaattgcgatgtcaggacagtttctctaaaatactttctcccggataacaagaaaacgctcatctccatatctaacgataaagatttgaaacggatgatcaaatttcatgagaactccaacactgctgatgtctatctcttacccgaagaagctactcccgacatttcaaacatgccagctagcaggttagcaaagcctttacataaatcattatatcaccttatcttttttaagtttctaagagtttttttcgtccagatcaagcagaacaacattgtctgaagcgattcccccggttcctatggacgacatgattgacgacacaatgggaccagaagagcttcccatctcaatctcagtctcagctcctcccgctgtgactatggaggaagtcatgaaccgagctgaagatgcacagattattattaatccatccgaattgatgtcatcgattgttgaagtcccgaatccgaaaggagatattctcacaaaggcaagaacacagcagtggcagaacacaatcacaggagtgggtcaacggtttaaaaatgttggggannnnnnnnnnnnnnnnnggaaatacgccatagcaaatcagtttggattccgctacaaaaagaacgatagccaccgagtgacagntatatgtaaagccgaaggttgcccttggaggatccatgcttcaggctatcaacaactcagctgatctgtattagaaaatgaatcc

SEQ ID NO: 53723 - DNA, 292 bp, Arabidopsis thaliana landsberg
actggttcatacaaacataacgaaacagaccaaaacacctacaaccccagtggtaatgtttttttattacttgtattttcattgaagggttgtattcatcgtttgctttaaattagcatataaccattacaatttttccagggtaaacatggtgacgttggcaagaacatgacgaccaacacaaacgtcactcctcaagcaacaccacatacagaatcttgccaaccgatatttgatgcgacgcgcaaataaaggtatgagtacacagctcgtttttctatagattattagt

SEQ ID NO: 53724 - DNA, 320 bp, Arabidopsis thaliana landsberg
  unsure (1)..(320): unsure at all n locations
acaaaangaattaatnntctaatnncatcatcaatgaattttttttttattagcaaaaaaaaaaattaaggttaagaaattattaaaaaacaatatgtacacaaatataaagttcattcaagttcagtaatactaatattttgataaattataatgtttatgtatcatgtaaaattaacttatgaaaattatattgaaaagctttaaaatacctgtttaacaattagactagcacgtgattggaaacacattgttggtttgaatgaactttctaaaattctttcaactaccagtttttaaagtactttgtatcaaaaatg

SEQ ID NO: 53725 - DNA, 474 bp, Arabidopsis thaliana landsberg
gtcgactctatagctctggggaggagttccatttttaacctttaacaacagtttcattatcttgcgttctttctgctcttcaggagacagctcttcttcgttctcttcatttaacagagaaccaaaatactgataatcctctggtttcataaacggcaaaccaccaggaacttctgggggcacatcatactgttgcccacggttttcctcaggaataacatagccaggagttgccatgggtgtcggggtttgttgaagtttcctcgcaggggttctgatgggaacatacgtagcaggcggatccaaaaccttgtatccatctttaggaaacatggcatcaagctcttcatcactcaatggtctgtttctttcctcgatatccttctcccagctttgcatattgagctgctcgggggtcataggaccacggaaaataagctgacccggagtcggagtagccatatcaatcccacc

SEQ ID NO: 53726 - DNA, 667 bp, Arabidopsis thaliana landsberg
acgctgccctcacatgtcctggagggtctgaatacgattctcggactgcaccgttctcatgaggtgggtgagttggactttggcctccgtctcactgcctcgaacaagtgtcttaattaagcttacccaaatgaaagctagagtcaccacgaaggtagaaacaggagattgattctcagactgctctgtaacccaactcttgagattgtctatctgcttccggctcaatgtaaaagtggctctgaccatgttctcaggcgtaacatgtgaactgtgttttgcagagttttggctccaaaaccgctccaaatgtcctgcggctacctctcctgggtccttgattatgtttctgcagctgtgaataggcagagagggtagaagaaccgtggccggatctttgccgctggatttggtcaatgacatccaatacttcatgaaatgactgaaggtgactccatctgctacaacatgtgtagctgagttgcctatacagattccagctccagggaagatggtgacttgcattgccattattggtcgcatctgaattccttccggagagacgtgaggaggaggtaacttgggcaagacgccatgcaacacactgatatctttaagggaatcagacttcagttggtcgaagtcggtttcagtagactttgctacg

SEQ ID NO: 53727 - DNA, 1238 bp, Arabidopsis thaliana landsberg
tcctttcctcataagcgatccaaaaccacataatattgtttttttacgaggttcttgttgctgctccctctttgtcaattcaccaggtgcttgttgcttctctttctttgtcaatttatcaggtccttgttgctcagtagtaaaactgagatgatctacgttgccatcaagccaaaacatctgaatatgtatgtttcctccaatagatagatttgcaatggacctcgtttccacttctttacccgagaaatacaaagcaatttgacggccgctcctattcaattcccttatagtgatataactagcaagctcctcacagtatgagacatcaagcgtcgtcaatctagtaaggtagctgatggactctggaattttcttcagcctcttgcagccttgagttatcaattcctccaaattaacggccattgaaagatctggaagttgttccagattttcagaatctgacaagtccaatcttctcaagtttggcatcccctgagcatattcaacaaagaataggaaaattgcgagaatgttaagtaccagaagatacattgttataagcatagatctgttaagagcttttaccacggtttctttccagaagcttgtgagattgctgcgatgtagaatgatttcaacaagatcttgcggctggaatcggcaagggaaggttgtcaagggaaatgcgtcccaatgtagtaacctaagccttgatgaaagtagatttgtatcgtcaccgctgaaaagcagcttggacttaatatggttcgagtgcttgtagatcttcaggaatttgatagcatcgtggtccgctgtataccctcccagatgcaatgcataagccatgtcacacatatgtagtgccatgcaattggttggttcgcttgtctgtgggattaaatacgataaaattagttggcctacgaacaagcttagtgcagaaacaaccatgaacaacaacgatgttacagatagacactgtaagtgcttaccgtgttacgtttcagtaattcataaatttcataaggattccacaaaactcctcgtccatggcgcctctgcatggattcttgattaacaattgctcttgcagtttggtctaccaaattatgcatctttatatacccactggctgtctattccaatgagagacttctcagccaatatttttaatcccagacaaccctgtagtacaccatcatcgagaagggtagtggcacgccggagaggttctc

SEQ ID NO: 53728 - DNA, 377 bp, Arabidopsis thaliana landsberg
gacgagaggtggtatctttttcctgcggctgcctctaccacaccctataattcaaaagaatacaaacctttcatgtaactaaaaaaatgtttgcttcacctcaacccaaagccaaagatgtcacaaattggcataaacatgtactatgtagtgtggatcatcatgcaacccgtgctctaacttgaactaaaaaaggatcaaacctgagcatcgacacatcggccacttccttagtggacgtgggcatttaacatcctgccaatctattggtccaactcaggcaaaagtccttgaataaaaaccagatgacctaacattatttgttttaaaaaaaataccatgccaactctcctagaaaatgctacaagatttttttt

SEQ ID NO: 53729 - DNA, 549 bp, Arabidopsis thaliana landsberg
aacgtgacaaatctgtgtttcactttcataagaaacccgcattttcttttgttacacacgaaagaaaggcatagggtatgggaatgtccgatattggaaaggcctctttgctctttttgtatttgtatatgatgaaaaaggagagacaaataagaaaaaataaaattaaaaatgctgcacatcttttttccttaactcaaaagctcgacacttttctacaaaactagcatcatgaggaactcagaggaatcacaaacctgtttcctctgtgatgccacttcttcctccaccataggtctttatatggaggctactcaacaatttcctagcaaaataggaaccgaacgagaaacaaacacgtaaaggtggattcatgcaggattaaagaacaaagtttgagatcagagagccctagaatgaccaaaagtcgcaaattgactagagctacaagttacctgcttgattgcaattccaacttccaagctctgcaatgaactcgtggtcagacaacctgtatggacgataggaccactggcctcactgttggct

SEQ ID NO: 53730 - DNA, 200 bp, Arabidopsis thaliana landsberg
  unsure (1)..(200): unsure at all n locations
cccccctttttccccccccccccccctcccccccctctctcctccccccccctcccccccccccccctcctccccctccccctccctctccccctccccctccccccntcccccccccctcccccccctctcccccccccccccccccccccccccctctccccccccctcccccccccctccccccccccccccccccc

SEQ ID NO: 53731 - DNA, 1115 bp, Arabidopsis thaliana landsberg
atttgctttgtaacagtacgttaggtacttctgaaaaggcccgttgtacaaaagctggaagaagacgatatcaagtccctgttcgcataaccaaatcttgtagatgaagaacatgatagaaaatttgtatagatagaaaaaagagtcttgacaggacaaaattaggctcaagctaaaagatttgatacatacttgtgtaatatgatgagcaccggatagattgtatatgaatcggatcacaaacttttccttctcccgaagaatattgagcatgaggccatggccggtatgagccataccgtgagaacttagttacaatgtcggtcgactagtgtacgggtttctggtttagattatgggctggtttaatatgaatgggcctatttattaagcccaattacttcgtatgtaatgcaatgtgcttcttctacgagagagagagagatcagtgaacaagtccccgtttcttcgttctcatcatcttcatcgccgattttgcaacgaccacctctgctactcccgtcgatcaatctacggtgagctctctgctctcactatccccttttcaaatttcattccttttccatgacgacaaatatttggataaagaaccttattcgatttaactccgttggttgttgtactgtaccggaatacaactttccggtagctctctggttttgattcggtagaaatctagaatttaggctcggaatttcattttctagttgaggttacactgttttttcttttttgaaaattttcccctagggttagtatttgactcaattggattttgtcggtagaggaatttcacttatttttctattattttgctctcctggattttgattatcagaagaagaagaagagatgagtaacacaccagcagcggcggcgtcatcatcgtctaaatcgaaagctgcgggaacttctcatcccacagggaaaagcgcaaaactctctttcaaaaagaatgtaaagtctttagttaaaaccagatttttgtattcttcatttcgtgattcttctggtaacaatggttttggtgcttttgttgatttttcagtgcagcatatgatgtatggatttggcgacgagcaaaacgtaagccg

SEQ ID NO: 53732 - DNA, 516 bp, Arabidopsis thaliana landsberg
tcctctctcttcttctctatgccaacgaagcaatagctatgaaaagctaaaccctttccttcttcttcttcttcttcttcttcttcttcttcttcttcgattgtttagattacttgggtttgacccaagtttgcttctttctatgattcatcaatctagatcttgctatctgggtccagaaacgattcacgcgcttcattcatgatataaagttactaccttttttttattttaccttctgggtcatggttttgtctgcttttcgtcttttgcttttgtctggatgattcataatctctcgagatctattatgttcacaagagttgttcttatgcgtggtgagatgatcttaggagtgtttcactatccttcttcaattcgggtttttagtttctgagatctgtttttgaagaatctgatctgagtttgaggaagtttgactaatagatcgaagaagatgtttaagcagatacttgggaagcttcctaagaaaacttctgctaagttttgggataa

SEQ ID NO: 53733 - DNA, 758 bp, Arabidopsis thaliana landsberg
tcatatggcatgtgaggtagcacgcaatatgtgattaaaaaataataattattcctttgattaggactgcctaattatggttaattatgtagtttattttattctttaaataatgtaggatcctttcatgcattcatgaaaggggaatttcatgtgttcacatttatttaaaacgagaacattaaaaagaaaaatattgtaggccaaaaaaatgttagaattgttaatcaaatagtagtaacttccactgactcggaagactcataatgagtcacgttataactaaagagactctttcaagaaaggaatcaataagggtttgatccacggcatatactaacgtgggaatatctcatggagattggaaatttcgttggaggtctatttatgaaagaatatgcttaaaatatgctcatatcaaataaatattccatatattacctttgtgggttttgatcttttttgaaagattccaatatataattggtgcagacaaagaataatatacggagatgctagaaaattgagaggattattcttataatttgactttgcaacaaaagtgctgtagttttgaaaatttggaatgtggggaattttaagaaacagaagaaacgtacctaactagcccaccaccgtacatcgtgtttttccctcaacgtacttgttttcaacatcaaatagtcatgagtgaaaaaagttgatctattacgaaaagtgtgcattaactttaaatcggtggaatgttgttatctaaa

SEQ ID NO: 53734 - DNA, 637 bp, Arabidopsis thaliana landsberg
  unsure (1)..(637): unsure at all n locations
agtacctttcgtctaatttcggccgttggatgagatccaatgatccgagcgtcttttccatcctcccgatggccagagacgagggcgaagtggtaggcgacggcgcgccatggccatgaccgagcgaggagaccggccacacctagccgaccacctaggactccgcgacaacccacacccgagctcaatggtggcggcggatcccgcggtagagtaggtactccggcgagcagttctgtgatctcccaccgttgaagccacccacagagatctcggccattccccaggcgccatagggagcacttctggttgtcgtaggggtcatgccgttggagtatgcgcacaccaacggcgacagatttctctaccatggcgacggcgagcagaaccaccgcggcggtacccctcgtacgttgtttgcccatggcgatggtggcccagaggtgcggcacatggctttatacaggggcggttagagcccgtgcttaagaatcgtgaannnnnnnnnnnnnnnnnnnnnnnnnnnnnnnnnnnnnnnnnnnnnnnnnnnnnnnnnnnnnnnnnnnnnnnnnnnnnnnnnnnnnnnnnnnacctacgactgattggtccacacatcagtgggagtgagggtttgggt

SEQ ID NO: 53735 - DNA, 279 bp, Arabidopsis thaliana landsberg
tatgtataacctttattaactagttaaactattggggtgtactaaaattgtagaccatatttcatttcttagcactcagctgacagagaagggacggacattaccttaccggaaaacaatcactctaagcagtttaaagaaaacaccatatggtgaatgagtatttattgttcagtcatccaccacattcatatggtcctataccttgcttcatgagatgaattaaagattgttggctgtttattgacaatttgaacaattgttgaattgctattgatg

SEQ ID NO: 53736 - DNA, 1056 bp, Arabidopsis thaliana landsberg
caaaaaatgagtttagttacagttccttatagcatgttcagggggtctttgtatctaggaaccatcttcttttagcaatactggtctttttcttctctctagtggttgttgatctcttaaaaaattgcttgtctgataggcatgtgcaatcagtgcctgtggaaactttgcagtagtcggaacagctggtggatggattgagagattcaacctccaatctggaatcagccggggtagttacttcgatatgtcagagaaaagaaggtacgcccatgatggagaagttattggagttgcttgcgactccacaaacacactcatgattagtgcaggatatcatggggacttaaaggtttggaatgttttcttgttctttctttaagttattaattacttagttgatatggttaccttcaacattaactctagtttatgagtcaaatagactctaatatttcatttgtgtaatacaggtttgggatttcaaaaagcgggaattaaagtcccagtgggatgtcggatgttcgttggttaaaattgtctaccaccgtgtaaatggtaaattttcctaatctaaccctacattttcacttgtacgatctcacaaatgtatcattttccgtcattttctcctagggtaccaccgtattgactctgactttgctaatttcttatcaattggtaggtcttttggctacagtggcggatgattttgttatccgtttatatgatgttgtgacactaaagatggttcgtgaatttagaggtcatacagaccgtataacggatttgtgctttagtgaggatggcaaatgggtcatctcatctagcatggatggaagtcttagaatatgggatgtcatattggctaagcagattgatggtgtgcatgtcgatgtgccaataacagcattgtctttatcaccaaatatggacgttttggcaactgcccactctgatcagaacggggtctacttgtggtaaattctcaaatcaatcttcagttctctcatttactattacaatttctctgtgattgtttgatgagttcactct

SEQ ID NO: 53737 - DNA, 593 bp, Arabidopsis thaliana landsberg
cagcttcttccattgagacatcggaaaatcgaaaacaaacttttggttccacaatgcattgtcattatcaccttttttcataaaagagccaaaaatgttttctaatatacatttggctaagaggaaaaacaaaattactaaagagtaacaaaacttgaaccttttgacattttgctacggtattcctttgtcccacattgtaagagcacataatacacaggagttcctacaaaccaaaatgattaaaaataacgattttagtttgatatataacatatatgaagaaggttttgtcttttcataatcaccgataaaatttgtgtgtgtgattccatgagcatcaatgagaaatacttccaatatccctctcttcatatgtgacatccaagaaaatcaaatactcaaaagactttaagaaattaagaagtagtgtatggtaattagcgtgaaggctgcatcaattggagatatatactgcaagtgaaacaatcaaattttataacgcaccataacatttactacttcttttggaggctctatgagttacaagagaacaccattaattatgcattcaagaaagaatcaacagtttt

SEQ ID NO: 53738 - DNA, 913 bp, Arabidopsis thaliana landsberg
aaaagtgttggctattacattctgttatgtaatctgtatgctgattgtggaaaatggagagaagttgcaaaagtgttattaatgatgaaagaaaacgggctaacagttgatgcaggatgcagttgggttgaagtaaagggtaaagttcacgcctttcttagcgatgacaagtaccatcctcaaacaaaagagatcaacactgttttagaggggttctatgagaaaatgagtgaagttgggcttactaaaagttcagaatcgagttctatggatgagacagagatttcgagatatgagatattctgtggacatagcgagagaaaggccattgcatttggtctgatcaacacggtcccaggaatgccaatttgggtaacaaagaatctcagtatgtgtgaaaattgccatgatacactaaagttcatctccaaaacagtaagaagagaaatctcagtaagagatgctgagcatttccaccactttaaagatggagaatgttcatgtggagattagaatggatacaaaaggaatatagacacatcaaggtattgttaagtttattacacaggaaacttggattatatgtggctttgttttgtctgtaacgtttatcatacaataggagttgctctgtatgtaacatcattagctagaggattcattctaatccagtgttgttgatcatccttttattaatatcaatacggcattacaaaaatagaaagaatagcatataaacaaaaagtctctttttatttgtgttacatgaaatagaatgcaaaactataaactgtctatcgtttttggaaattgaaactcttgattccgatagcaaagataacggcaaagagcaaaggaaagatgacgttcatggcggcaacaacacccaagaaaccttctctatattcataga

SEQ ID NO: 53739 - DNA, 646 bp, Arabidopsis thaliana landsberg
agctttagtcggtagcaaaccggaacaaagctgcaagaatgactgcaatactcctagagttctcaatgatgtgaaagacaatggttgtgggaaggatttgcaggtgatgatggacaatgtcaagaagaaaagtgatactccggattgggaaactttgattgctgctacaacagaactgatttatggctcaccgagagagtcagaggcttttagttgcttgttgaagaaaacttcaaactctgaagcacgtctacgtggtagtataactgcaacatcggtggctgttacgaataccgatgtagtcaacaatgaatctgaatctgttgatgtgagtataaggctttgtgaattactactttagcttttggttcttgactgttcattgtctctgaaatgtttctttttgtgggtgtgtgtgtgtgtggcaggctctttcgatattgcaccgtggtgtgagaagacggtgtttagactttgaggttaaggggaataatcagcaaacattaggagaatcttcatctagttgtgtagtacctagcattggtctgcatcttaacaccattgcaatgtcctctaaggacaagaatgttgctaatgagttttcattttccggtaacataaaagtcggtgtgcaaagttctctgac

SEQ ID NO: 53740 - DNA, 1123 bp, Arabidopsis thaliana landsberg
aacactttcaaagtttaatgatcaaactcatctagggtcttaatgtttgttttttaaacttagaacttaaaaattaccaatcaagagttgaatttcatattctcaggttgcttgacatcgttgccaaaattttctttatacactgaatacctataaactaaggtttttagtttcaaaaccttcttagatgccatgggaggagttgcgtcttagacgtttatgaccttttaatcattttttttgaatttaatgttaaattaattaaaaaacaaaagacgtaacatttgtagaacggttgcaacagtgttctaaatactttcagaccgaaatttttttgaaaaaaaactatttaagagtttatttctagaagcaaacccaaagttggagacctttttatcatcttcaccaggcttcaaactcagttcctgtcaattgtttcgaactgcaggataaaagacatttttgtcgatcttggtgaaagagattcgcttgttaggaaaatccaccaaagctccaacaacggctaggaactcataaccaaggaccaacggcttgtgcttgttttttctcatctcgacaatgtgaaagtcaataggaaaaaaacagtttcctatttgaagtaatacgccaggcaagaatcctattgtagatgatgaatctgcatattctatggaagcttttgaaggcggtaagtacataaatcttttctcatctgctgtgatcttggacatgaaattgactttagcacctgtatcacaaacaaactcattgaacttaaatccatcgatggagtatggcacaaggaaactttcccagattttccagtttaggaagtgtatatatctccgatttgctcgtttgagctctcattaattccctcggagagagctcgtcgtgtagcttaggttgtatcatcacatgcttcaacttgagagtttgctttgagataggtacacaatctttctcttcttggattgatgcggtgttgtaaaacgtttttacctctgtctagcttgtttcttcacatcttctatagttttgagtcacctgactttcgagtttttaacatgtgcgacaagtgattcaaactttccattcaatcattgtaaattccctccatttt

SEQ ID NO: 53741 - DNA, 511 bp, Arabidopsis thaliana landsberg
  unsure (1)..(511): unsure at all n locations
aataaaggccttataagctttctctgtatggaaaaaggaagaagatgctgcttcggcttccgtttctagctctgcttgagctgcttcgtctgtttctcttgatgtggatgtcggtgagtcagatctcttctctcactttcggagcacagttggtccacaatttgaaaaccgacaaaggtgacttcttccttattcacgccttgatgcaccgcacctttttcgtgttcaatctcgcctgagagcagtgcatcgataccattcnnnnnnnnnnnnnnnnnnnnnnnnnnnnnnnnnnnaatcctttgatatccgtcttgccttctcagtcctccttctcatcccataggtctcagggtcccctccaccgacccgttgtactataggtatccgggcgtgacgaaacctagggcttggatcgaaatatagctttgctcctttttttctttagtcagaaagagttccagcttatagtaaaggctatagtagtcctagttttctttctcattaggga

SEQ ID NO: 53742 - DNA, 455 bp, Arabidopsis thaliana landsberg
agtatccctctacagttgcccacattttggcagcaagctagcagatatgccgtggagaatgggtcttgtgttacgcccggctccatctgttagtaaacactattactttattgagctggcttaatcctttaaaccatcaccaaatctctctgtaactaatgagccttatgggatgttaaatggttatagataggagagctacgagatggttctccatgactagttgagctcaatgacttgcttcgccagctccataagaaaggggttgttgaagtccttagtttctgtgaggttgtggattgattctattacactaatgaggctctttctatagatgtgtatcattacatgactctgttcgcataaatgtgtggtgaatgtttactgctctaattgcagacagaagtaacccgaattcgtggaaggctaacgtggatgggcatttcggatgaaaa

SEQ ID NO: 53743 - DNA, 628 bp, Arabidopsis thaliana landsberg
tcctttcttcttcttcgcttgatgagtagtcagtagcgtaaggatcattcacaacgaaacggagttttctcatagtcttcaaatcttcagataaacctgggaggtgatttagctgaaaaggtttcttcttcatgggttttttgttgggtttattggtttgaatagaagagcgtttctttcgttcagccattttatcgaacacttggtgtgcgaaattcaaaaccaaacccccttaaaccctaaaaaacctctcaaaattcccagaaaagcctcaaaatgaactctctcaagaacaagaaaagtcctttaccccagaacaagtcctgtttcaataaccagcaaaaacacaacaacccacttcagattcgaacagagaaactataaaaaccattcaaagtaacaaactttagcaaacccagttaccttttaggtcttaaacgcatggaaatcgatgaaactgtgagaaatcaatcactgagagagctagtagatgtagcttgatgaacgagaaaaacagagcagaaagcgattaagaagacgaagaaggaagaagaagagagagaagcgtagagtcaaagacagagctccggttaaacaaagtattcgggcgacttcaaagatccttttc

SEQ ID NO: 53744 - DNA, 592 bp, Arabidopsis thaliana landsberg
acttcccttcctttttgctgacacatatggacacacgtagcttcgtcacaatctcttttcattataagatcatggcacgtttcttgtcctcgcgtctccttcgttccaatccctaataaaaatttgaaaagcttacgaatgttaatttatcatccctttaatataaacttattataatatgatgttaagagaatggtaaaaacttaaaagtaaagcaaacctagaacaaggataatcatgaagatagcaagaatggtggctttgtaagtcatctttgatgaatatacaaactgaaataaagattttcaaagtaaaaaccatatatataggcaatttagctaggtcacatacacaataatgacgaaaatcatttatactagaaagaaatctgtgaacagtggaaaataaatattggagatcgggaaaataatatcaaaattaagaaatatatatttactaaataaactaaaaacggaaataaataacaacgcaataaatatagatactgtatgacacaaaatctaaaattcatgcaaaataatttacatggttagcccttgtatccgttcttgacccataatgatctttcgct

SEQ ID NO: 53745 - DNA, 554 bp, Arabidopsis thaliana landsberg
  unsure (1)..(554): unsure at all n locations
tcggtacgtatacaaaaccatagcttcgcatagaaaatttatttttttcaaaaattaatatttttaattagcggagggaaatgaaataaaacagagaccacaatcccattgtcccatgaccagaagaagaagaagaaactaaatggcgacgacgacgagttgttcgcttctcctttcttccactctcttccttcactctcctccttcttctcacctctccttcttcaatctctcttcttcacgatcctctccaatttctctttacccaatccgatccaaacgctatttccgaatcctctcgaagctttcactaaacgacaacaacagagacgacgatgatgatactcttcattttactccgntctccgccgttaaacctttcttcctcctctgtacctccgtcgcgttatcgttttcactcttcgccgcttctcccgccgttgaatctgcttcggcgtttgtagttagtactccgaagaacttcaaactgatgagctcgcgacggttcgtttgtttcaagagaacactcctttcgntgttacatcactaatctc

SEQ ID NO: 53746 - DNA, 544 bp, Arabidopsis thaliana landsberg
  unsure (1)..(544): unsure at all n locations
ccaacccatataattaaagaaatctatacgtactgttcttgcttttaatatggnaccggatgttctgggggccagggaatcagcaaaagttatcagatcaagaaaattaaacattttaaaaatcaactatagccaagaaatagaaaaaatggctcaatccatcacatatcatgtttacacgaaagtacatcatctcctaaaagacatatagaattaggaatatccatatacgtttttctttgacattgaaaattcattatatgcaaaggtatacacgtgtgcatgcacggacagcattattcccccgaaactatcgggtgtagacaacacaccgctaaaaacatgtagtacatcagtctagcctatagaactaataatggagttcgatatgaaatatgtaaacatataattctgtatgtatatgatcatattgtagtttaatcgtatttgacgagtttcatttttgcataatatatacgaggtaacaattttcaagaaaaagtgtaacgccagagaatacttagatttaaaaggattccattaa

SEQ ID NO: 53747 - DNA, 504 bp, Arabidopsis thaliana landsberg
aatggaaacatatcatataccaacaaatccaagataatctatatccaacctacaaatattcatatttggatatgtagcttccggatatccatccaaaatttagaatcaaattcgttaaagacaaaagaatttaacataattaaataacatactgaaataattttaaaaatctaatatatcataaaataacaaacattgattactatatatgtatctttataaataaaagatactatatatgtatcttcacaaaacatatgtaagaaataatttacttattatatatacatatatatatatatatataataacatgatttttatgtctagatgttaaattagaatactcaaatccgaacctaattttgagggatccaaatttactttcgggattttggacctctcagattttgaaattttgaataggatttgggatcataaataatgattcatccatatacacatttataagtactatcaccgtacaagataaggcgatagaaaa

SEQ ID NO: 53748 - DNA, 499 bp, Arabidopsis thaliana landsberg
  unsure (1)..(499): unsure at all n locations
tgtagtcatatatgacaaatttctatagttcgaatctggaaatataacgttaaacggaaataaaagattaattagttaatccaaaaccttggagggatgagagcgaaggttttcttgttattgttccaactataaaatccatagtctttggcaacaatggaacacgagtctttgcagtgatctttgtctgatgaatcgtacaaaacgaaccacatcccgtaagctgcggaatttttcttattgtaaaacgttcctacacatagcgtatgtgatgactgtctagatcccgccactttttcattatcgccggcaatgcttgggatctctatcataatcttttgacccaaaggtacggatttggacagttcaggggttgggcggcacgtgacgaaaacgggaacatttggaagtgtttgcatctcgttggatacataagtgtggcggcacgtgcagatccagacctagcanagagcattaggaaccatgatcgataccatat

SEQ ID NO: 53749 - DNA, 1028 bp, Arabidopsis thaliana landsberg
  unsure (1)..(1028): unsure at all n locations
atttgacatttcaattaaactcattaacttactaacttataagaaatttcataaaaggttcaactcaacgtctctgacccatttatcatatatcgaaatgcgacaaatctttgttccaagtaaaaagcaagccaagcatgacttcaagatctttcatacattcaaaacaatggcttcaaaattatagactcctctattttcatatatcttaagttgatttctttcttctaccaataaaccttaaacccgggttttgtctacgccccgcttcgggtagcaaactgaggaacacggccaagtggtaacaggatatccttcattgtctcatactcttcatttccaattccacttccttccaaaatctgatatttttcaccaacatttatcaacagattaaattcagttagagttcgccatttattatgttcaagttgactggaacaaaccttgtctctgttggatatataaggtgcaatccgagggatacgtgatacagacaacgcatccaagaaaagaagaacaatcactagccattcttttaccctaaatgatggaactgctcctgtcaacgacattgtctccaacaagctttcctgctcaacaacaaaacacaaccaatatcactgagaaactatatataagcttcccagcgtaagtttgagacaagattctcatgaggaacttttaaagagtttataatttcaaatatgattccatacttatatactaaggtttcgttctaggagtacttgctacatttttacaaagatagacgggaccaatcactaatttgactaggatgggctatttggtttataagtagaccgacgataacagactaatgagaagaaaaaagtattggaaagcgtaccaggtccctctttctaacgtcgagatatcgctatgtggcaagcctgagataaaagtgccgcactatacggtacccgctctggcaaaggcacccaaacaattagtcngaaatgatctctgacggataagcaccatcctaccatgaggttatcctccgg

SEQ ID NO: 53750 - DNA, 553 bp, Arabidopsis thaliana landsberg
gcgggcgaaagctgcaggcgtgcagcgatgctcagcaccaccggaatgaaaatggccaccacgccggttgagctcattatcgaacccagccccgccacggctaccatcagcaacaccagcaggcgtgcctcgctgttgccggcccgctcgctcatccattcgccgatacggtaggcaatgccggtgcgcaccaggccttcaccgatcacgaacaaggcggcgatcaacaccacgttggggtcactgaaaccggccagcgcctgctccacggtgaggatgcccgacagcggcagggcgaggatcaccagtagcgcgaccacgtccatgcgtgggcggttgatgacgaacagggtgatgacgatggccagcaggccgaggacccatagcagtcttggtatggggagggggtgttccttcacacgggggcacgatagacagtagcagccagtgtgccggattgtgctgaagggggtgttgatgtactgcaaggtttgcaaaacaaaaggggccgcattgcggcccctttgtcactggaatcagtgacggtgacggt

SEQ ID NO: 53751 - DNA, 1228 bp, Arabidopsis thaliana landsberg
taggatgagcaaattatagcctcacatctcctgtccgcatacgtgtgtcatgctacctataccttagttctaggcactttactaggatcataactgacttttttttcctgctaatagaaatcattgtttatcaaaaccatatgaactcataatttttctcaacaactatacaaattcaatacataaatgatagatatatatcatctcatgaggtaaatgactcactcctttgcaactggtgtgtaaggaatctgagccttctcaattccatgaatatgacacttttcacctgaataataactccactaaaatttataatctccaaaaacaagaactttaaaaggaacaagtaaatctacaaatatataacttcaaaactcatggtggctttgctcgttaaataacaccttctcttccaatcttccttattgtatattgagaaactgttaggaatgtccttctttgttttggtgatcactggaatttcattcaaactataagagttttgcctctatgagaagaggatacaaaaggctactaagagccaaacaaatcaaactaacgactaatacgttagtcgagcaattgaaaaagcttaagcaaaagcaataacttaaagagagaaataatgattgaggggagctaacaagctcaacccgagaaacaactaaaccaagacaaccgattctagcaccatcctttgcttccaaggaggccttcaagctacgttctttcgctagcaatgcgaatgcgacattacgacagacaattccatcgaaaaggggaacttcaatgacgatcgagaaccaccaacccatatcacatagagatgcgaaagtgagcctagcttcaccgcagaagatcttcttccctacaataaatctttccaccaaaaggggcatttgagagttcatatatatctgcataaaggagtaaacatgacaaagaatgtcaaaccacaaccaaggcaatctaaccatagaagccttatatactaccatcacattcataaaggaaagggtgaccaaaacatggacacaaatacatcgagtaaggctaatgatttcattatctaaccaacaaatcaaatagaatgtagagatagagcttaaaaacccagaatcaaacctggtagggacgtgagctggatcaaaaccggaatatcgcctgcatactgcaataaaggagtgcctaaaggcaaaaagagcaccccaagaagacccaacga

SEQ ID NO: 53752 - DNA, 874 bp, Arabidopsis thaliana landsberg
acattttcttttttggtttttgttaatgaacatatttagtcttttcttaattccactcaaatagaaaatacaaagagaactttatttaatagatatgaacataatctcacatcctcctcctaccttcaccaaacacttttacatacactttgtggtctttctttacctaccaccatcaacaacaacaccaagccccactcacacacacgcaatcacgttaaatctaacgccgtttattatctcatcattcaccaactcccacgtacctaacgccggttaccttttgccgttggtcctcatttctcaaaccaaccaaacctctccctcttataaaatcctctctcccttctttatttcttcctcagcagcttcttctgctttcaattactctcgccgacgattttctcaccggaaaaaaacaatatcattgcggatacacaaactataatggacctcctcttgctggagaagtctctaatcgccgtcttcgtggcggtgattctcgccacggtgatttcaaagctccgcggcaagaaattgaagctacctccaggtcctataccaattccgatcttcggaaactggcttcaagtaggagatgatctcaaccaccgtaatctcgtcgattacgctaagaaattcggcgatctcttcctcctccgtatgggtcagcgtaacctagtcgtcgtctcttcaccggatctaaccaaggaagtgctccacacacaaggcgttgagtttggatctagaacgagaaacgtcgtgttcgacattttcaccgggaaaggtcaagatatggtgttcactgtttacggcgagcattggaggaagatgagaagaatcatgacggttcctttcttcaccaacaaagttg

SEQ ID NO: 53753 - DNA, 1058 bp, Arabidopsis thaliana landsberg
ccgtgaattgagtattctcttctaatgggccacggtagatgtgctgcacaacaatttatatatgttagctaagaaagtaagacctaatcaaatactacactgcttaaattattcttacttctccaatacgccacaactcagggaaagtaattaaagctgcaccaacaggctgaatgtgaaggtgggctaaagccttgtccaaagtgtcgaaactaaggacagactttatcttgtgctttctcttatgagcacttggaggataacgacggcatttatactgacgaaactgtgggatctcttttgggatcccttctctttcaatatgttccaaggcttcagcaattgaattaccgtagcacacatatatgtcccttttccgcatgtttatccttgccgagcatctctggttcaacatggttgcttaggtaccaagcacacagtggaatatatgtatcttcccagtggcggataatccttatggcactggttagatcgtaagaagcgtacgcccaacaattgatgtgcctgagctgatctcgaataaaaccagcaatcacgatccatgacgagcttttcaaaagctcagtgaatgcctaaacaagacaaacaacaaaagttctgatattttggaaaattatggacatgttaaagtttaagaattagattctgtaccggtcttgcaactctccagcacaagaaagcaacgcgaccatcatctgaaaggtgaaaggacctcttcgggctgttcttcttgcttgttgaacataccaatcagtcaggatcaaacacagatttccaggctgtataatactcaatcccttctttctcaggcgcttcaaacagtttggtggaagcccttttagaccatcaggccttgagggtataaactgatccatatccataggtaccaccacctttttgttttttcttttacccatctctgaaaaacaaatacaaaaacacaaacatatcagtgtctcaaacattattgaagtgtttcaatattttttgcaatggcattatccaaaaaacgaaatacaagtaaacatacgaacatc

SEQ ID NO: 53754 - DNA, 392 bp, Arabidopsis thaliana landsberg
tactgacatttatatatacacatcatataccaaaagatgcatctcactccttcctgaatactgatttgcataatactccttttcttgcacatttaatatgtcaacaaaacctatggtaaggagcgaaaagttaacgtgactattgcaacaggctgacatttaaatgtaactattgtaacaggctgcttctcagtatcagtcactttatgactacttaagaattatggacgcatatgtggatcttatgttgcagaacaagatggtgagaccgatgtgatttttttatttgtactcatgagaattctctgatctcgtttctttagatttatttatcagttttaatggtttcaggaaaatcatctggatgctctcttggatgatattgtaagcct

SEQ ID NO: 53755 - DNA, 598 bp, Arabidopsis thaliana landsberg
tcttgactgactaaaacttttggctcacctttttttcccatttacaatgagcttgagttagttgtgcattacatttactgaggcaaaaaatgtctgtcagaccttgtttatcatttccgtggtttgttataaattgattgttgtcctaaaaatttcgttagtgtacaggagaacaatgtcttgggcatacttgaggagcttggatttggacggaacaaatttcagtcatcttacaactcttcgcatgtgtccattttacttcattatctactcaaggaacttccgtctgaattagttagttcactagcaatggagatcttggatatgattagatgcagcaatgattgttcctttagtcaggttatttcttcatctcagattatataaaatagacaatccagtgagtctaacccttcctgttatgttgtactgtttcatcaagcaggttttgaattataggttacttggaaatagattgtctgaagggaaatctcaagaaggttttctcagttcactcattgatgaagttattcaggtttggtgtttcgtctttcgttcaacaaaattaggaattcattctcatggattttcaatcttt

SEQ ID NO: 53756 - DNA, 397 bp, Arabidopsis thaliana landsberg
  unsure (1)..(397): unsure at all n locations
ccccccccttttttccccttttcaaaatctccccttttccctccccccccccccctcccttctttctttccttccccccttccctctcccctcccccccccccccccccctttccctctttccctccccatcccttttaccggtggtggcccccccccccttttcccccccaaaaaatattcccccctcccccnccccccccccccccccccctctcccccctccccccccccccttcccccccccccccttcctctcctccccccccccccccttctccccttttttctttccccccctccccccccccccccccctctcccccccctncccccccccctctcccccccccctctcccctctctcccccccctcctcctccccccccccccccccc

SEQ ID NO: 53757 - DNA, 1137 bp, Arabidopsis thaliana landsberg
tagcatttctccctctctctttttttttttttgtctgagatttgtttgtgttttttgtcacgtttcttattatgtggttccatttctggataatgcagacaattttgttcttgcataatctaattatttgagcggttatattagatattgttcgatatattcgttattcattttttttttgaaaatgtcaaagatccgatactaactccatttttgtctttcggcaaaagagcaacatacaacagtattcgacatttcggtttgtattcaccacgtgtgtcaatgacaattcataatcattttgacgctgaaaataaaacacaaaacacttccacatacttttgttggtgttacaaattccacatcgaaaatacgatgagatttttgtgaaaaatcatgtggaacgaagtaagttgttatcgataagaacaacataaagcaaatatttctgtagatgtaggaaaaaacgtagtacagtaaaaggaaacatcaatataagaaacaacatttttaatttgtaacacaaatattattaacgcttttgaattaatttggcatctttgaaaatcgattgaagatcaatggacggttgaaaaatgtatgttattaacgctttaaactatgcaaattacaacttagtttatattagtatagaaggtactctccagcttccttcaatgtatatataaacataaaattaaagggtgagggaataatattggcctataaaagttaagtgtagaataacacgaggactcgaggaggctgcctggctgcgccaagatctatatataacaattacaacgttttattctattagtagagaatcatttttaagtcaaaaataatcgtccaagtgaatcaggcaacaacacactaaacaacttgcatttataatattttcgcaaatcataacattgatagacaaaaaggtagtttaatactactttgtattattgtcgttattgcatcaacatttaaattctaacaagcatagtacatgtttatgattgaattaaaagtacaaaaatatctaacatggggtcacttctaatcatagtgctaatctactttatttatataagatcttgagttgaatagtactaatcctcagtgtttatagagttaatatatata

SEQ ID NO: 53758 - DNA, 528 bp, Arabidopsis thaliana landsberg
cttgccttctcccaactccgccacctgctgccgcccgccgccgccacccaactcctccttcgccccatcgcctcgctcctccaactccaccgctccgacctccgcataggcctccagcttcacgggctctccctgtccctcggcctctcctgctactcgcacttactgccccgcctcctctccttctactcacaccacccgtcgctcctccccgccgcctcctccctcgccgccggttccacgtgccccgaaccctacaatgtcctcatctccaactgcctcaaccacggcctcccgcaccacgcgctggccgcgtaccaatgagatgatcgacaaggatgccgttccccctgatgccttcacttaccccaaagtgctccgtgcctgtgccgagaccgggaacctcgctctcgggcgggcggtgcacgtgcgcgccgtggacgccggcatggacgaggacctgtttttccagaacgcactggtgtccatgtacgccaagtgttgggaccttgcggctgccgcacggtg

SEQ ID NO: 53759 - DNA, 876 bp, Arabidopsis thaliana landsberg
tgcatagtaacaaacaaacagccgttgataactccggttcccgcggaatgtcggttgtcttcccgccaaatttcacgttctcacccagatatttttggttataaacatttgatttcacatgtaagaatgtttttttgaccttcacatgtacatgtttaattgttgttttgataaaaacattcaatagcaattcaattttcaacttcacttgtgaaataatcaaatatatgaatcctaaaggtagatataaaatttatgtcatatgtacacaggattttgaattcttagcataacatattgtgtttattaatttactctcacaatattttgttaatggtgaaatcgagaagagaaaataaaagtcttcggtgatatgaaatttttaaaacgcgttgaacaaatgaagaaaacttctggaaaaaaatcatgtgttcaagaagaaacgacctttaaaagtagttgaaggcgcgtcgaagaagttggtcctacgtgtaccattcgacatgtgagcgactttggtcggtgtagctcgtttatttatttaaaattttacataagatacacaaacatatttcataaatattcaccgtcaatgttactcttaaatgatgataattcgtaaccgtcgttctgttataacattaaattcttatcattatttctataatgattaagtaacggcaataaagcaaaaaaactctcagaaataaacttgaaatttttgaaagtgtcatgtgtgaaaatatagtgaaggttcgagacttatttaaatggaatgacatgattcgtgtcttcttgagtgcttgtagcaccgatgcgtttttcgtctttttatggagtcacgcctgtttaaatattttctatacataataatgc

SEQ ID NO: 53760 - DNA, 830 bp, Arabidopsis thaliana landsberg
tttccgtttcaaatttcattgtgttgttaaagaagaaaattgtatgctttcattgtataatttccctaaatttctcactatgcctcaactaaagcaccgaaatggctacaccaaagcccttgaatgtattaagcaccatagcaaaaacgatgcaaataaaaggcagtgcaatggtagttgagccagaacctaaaggacggggctctacacaaatctccaaactaagtagctttgttcgggtcacgtagactcatggaggaaagctcggggcttgctcactttcgggagtagttggtattggtccctatcttcggttttgaaaactcttgacgggatacccagtgctaatcgaagaagaagaagaaaaaatgtaaatataatacacagaaaaaataaaatggaaaagacagtacactagttgtaatgtctaattagtgattatgggataggtgggtcgtttgttcacaaaataaagccataaaaatggttaatgttaataatatcagtagtttgactaatctctaacaaaagcaaaagaaactgataagacaagaaagaagaaggatggatgcatgaaagagtggtcaaggtctcctttaagtactccttttttctcctttgtactctctatttcttcaattgtctgccacgtttcacaaacagcgcacgtgagagtgatacgccacttataatcgatacattacagatggaaagaagttctcattgaacacatgagacagatttaaacattaattatcgtcgaaactgagtaatttgcaccataaaaaagtaatggtgagagtgatagatagactaaaatgtctttttgt

SEQ ID NO: 53761 - DNA, 497 bp, Arabidopsis thaliana landsberg
tcgttccttccgcgatgttgttctttcctcctctgacgcgtcctgcgcggcggtttctgtggtgggcggtcgggcgctgttggccgtggcactgacgcttcgtcttcggcggctcctgctggtgttgcttgcccctcgccggcctgtccccgggtttccccccggattacgctcgtccggcgggatcgtccgaggggtggtcgcacggtctactcgccctgttccgcgcgtccggctccgggcggctggcagagggcggaatcccacggctccaggtgccgccgtctccgtgcggctcgtcctcctcgccgtgccgtcccggcggacctcgtcggcaagtgtttcaactgcatttcgccgtcgcacactgctgctctctgtcgctcgcggactcgctgcttccgctgcaagtcccttggccatcgttcttcggtgtgccgcagcggccttcagcgtgagcctgctgtcagtaacgctcggctcgcatttctgtgtgg

SEQ ID NO: 53762 - DNA, 801 bp, Arabidopsis thaliana landsberg
gagatccataaaagaatcacaaggctagctgttactaaatatgagaaaatgaggttcattgtcttcttttcttttcttttaattagcatcgcctagcctacttctcaaaacattttcttggcatgagtttcatgcaactccattacatactaaagcacatgaaccgaaattcaaaagtgcaagtggtccaaataaagcgattaagtttgctgtatatataatcgtttcttggagagactattaactgcacgttaatttttctaataggaaaagaaaaaaagggttggttctttcaaacaaattcaaatgagcatgtaaaaatatgaatagaactaagtcactgacccttaccactcaaagcgcatagaagattatttatgatagtacgtacggaggaggggacgagacgtagatagtagatactgttagtaataagttattcaattattaaacgaataatatcgactcagttaataatttaggaatcattagttaaatgaataagacttgatttcaacaaaagttttaaaatcaatgatccaataacataagattttgtttgaatctctaaatcaattaaaattcgcaaaccaataaaccccaagtttgattcttgacgcgtaaaacactcaacaaaacgagttcacaagctgtagagggatgttgcaattctaagatagagttagcatatgcgtcttactctgtttcagaaatcgaccaaaacgtccataatgagtttgagctatggggcttttggatttattaagcctaccaaatcacagtaacccacaagcccattaa

SEQ ID NO: 53763 - DNA, 1351 bp, Arabidopsis thaliana landsberg
ccggccttggccttgtttgttggtgaagctcttgttggaaacgatgcagtagacctgctctcgaagttcaatcaggtttgggttcttacccgcattagactcctgttaggtgtttaactgagccttattgacgttgcttttttctgaaatcagaaactttcggatctctcgacttctgggaacccaagactgatcgatggaatcttacttacaaagtttgataccattgacgacaaggtacagtaaaatgatagttggagttagtgttggtttgaatcatataaatgaatgttaacgagactgtttgggatctgtttgtaggtcggagcagcgttgtctatggtttacatatcgggatcaccggttatgttcgtgggttgtggccagtcttacactgacctgaagaagcttaatgtcaaagccatagtcaagacacttctcaagtgatctcctcttcatcatcatcatcatcactatcatcattaccatctactatcaacaatcaatgtcttatccatcatgctgttgtttttggttttttatttgaagacggtttctctttggaagtgttgtgttttctttaaaactcaaaagactggagtcgcaaaaaataccatcccatgactttatatgatgcaacgtaacttttgttttaaattaaagattaataatcatgtgaaatagtgtcatcttttattttgttattttaaataattataaccaaatgaagattgaatttagcatgatttaaacttgaatctcatcacctaagttttcaacttatatataagcaaagtaaggtcataaatttatgatatactaatataatttcgtttgctgataataatgaaagaataatcttttgtctgaaagaagacgtccttttgtgtgtttgaaaataaaaaactgagcaaaaaacgtagtagaacgttcagagacaaacaaaaaaaacatattaattcatatgaaacgttatttagtggtaaatctagccatcttaattatcatataactgttacgaaccaattgaaataatgtcgctctgccaattgaaccggaaattttcatgcataacgtaaaaaaaaaaagtaccgttgtcgtagacatcgtttttgcttttaagaaaattgtaaaaggtcaaagattacataaatagatagtccgttacgttacatttttaaaattacgtgttttcctagttcctactatcggaccattctttgtgtaatcgtttgacacattttcaagtttatagaaattaaagtcatttatattcaaaaacagattagtcttttattttataagatgtaaaagaaaaaattggaaagatttaaaaaaattagtatcttga

SEQ ID NO: 53764 - DNA, 640 bp, Arabidopsis thaliana landsberg
  unsure (1)..(640): unsure at all n locations
ttcgtttttgttcaattttnnnnnnnnnnnnnnnnnnnnnnnnnnnnnnnnnnnnnnnnnnnnnnnnnnnnnnnnctccgttctagtactggtcaacatacataatacagtaattttatgttaagagttttttatttatttacaaataacatcttctagtggtaactattgatcaaattaatttaagaattaactaactaccacaattaggattttaataaaataataattatatttatatttcagagtaataaaattaattgaattaatttgatttttcttgtatattaaaattaggaaagaatagcaaaattcaaataacaaaaaatctattcttcatcgggcgccatattagtgttttacgtttttcagagaaaaaaacaaaatcactcaactctaaaacttttcttaaaaacaccgtacaacaattttagtggaacaatttgatgctaaactgtggttcgatatatgactagatatgagcagtcttttattttatttttgaaaatgtacaacgcttaattaacgctttaataaaaatttcgattatgaagatgtattcaaactgccgtgtatgttggactggaccgcagtagtgattccggttatagatcatgagtagccagagcgtgttatagtg

SEQ ID NO: 53765 - DNA, 642 bp, Arabidopsis thaliana landsberg
caacacaaaacaaaacaaaacgggacagaataaaaaaaaaaataaataaaaaacaacccaacaaaaaaaaaaaaaaaaataaaaaaaaaaaaacacaaaaacaaaaaaaaaaaaatacaaaaacaacaaaaaaaaacaaaaaaaaaaaaaaaaacacagaaaaaaacaaaaaaaaaaaatcaaaaaaaaaaacaaacaaaaaacaaacaaacaaaaaaaaaaaaaaaacaaaaaacaaaaaaaacaaaaaaaaacaaaaaaaaaaaaaaaccaaaacaaaacaaaaaaaaaaaaaaaaaaaaaaaaacaaaaaaaaaaaaacaaaaaaaaatccaaataaaaacaacaaaaaaaaaaccaaaataaacaaacaaacaaaacaaaaacaaaaaataaaaacaaacaaaaataaaaataaaaaaaaaaaaaaaaaacaaaaaaaaacaaaaaacaaataaaaaaaaaaaaaaaataaacaaaaaacaaacaaaaaacacaaaataaaaaaaacaaaaacaaaaaaacaaaaaaaaaacaacaaaaaacaaataacacaaaataacaaaaaaaaaacaaacaaaacaacaaacaaaaaaaaaaaacaaaaaaaaaaaaaaaacataaaacacaaccaaaaacaaa

SEQ ID NO: 53766 - DNA, 1142 bp, Arabidopsis thaliana landsberg
acatctaagaaagtaggtacgccattgttatttaatttgatcaaggagatggagaatatatttgaaaagctaaactagtctagctaagtaaaatactattgaactaatgtcacttgagattaaaaaaggttcatgtatgggtaacaaagaaaagtatggagtggtaaactacatcgcaacgatgagcatcacatgtgtggaatggtatggttacattaatttattatcgagttcggtgggaaacatttagtacaatataaaattgcttataactcatttcaagtatttattagtacaaagaaatctctttaacgaagataaaattagtctatataatttttttttataaccttaataaaaagtcaactgttagtatagttataaacttataacttataacatttgccaactaaacgatatgtttcatgcaacaatatttcttgagaggtattaggttaaaaagaaaccatgtgacccccaaattccacaatgtgtaatctccgccacaagttttaagatgtcaatttattacttttactttttattattattattattcttctcatcttttgtcttccatgtatactaattttctgcatacaacttccctttttgtcatcgagcatctcaaccaaacaacacaataatattcccaatttgattatatatatcttactactaagacgaagtttcttcaaaaaaaggttcgtatactctactttttagtttttaagcatagagtgttgttactgctgcttccgatccaaatcagaacttacttcattcgaagatagaaaacaaattgtaacagtttaaagcgtctaaataggacaccaattatttgttctctcggaatgtttttataatgtaaaggagcttatgcatgtgatgtacgtaaagagtgtatacgtacacgcgtcgatatcacacatgataatagtgccacctcttaaggaggcatgagggatcatgcatgcatgccccatccatctcgaccgttcattatgcttcaaaatgaatacttttcttacattattccaccaaacatttaaaataatttattatttatacatattgaattatcgatcccacgatcatgactactacgtgaacctctttatttcccccttattactcaactt

SEQ ID NO: 53767 - DNA, 676 bp, Arabidopsis thaliana landsberg
cttgaaagaaattaaacttgaggttttcaataaatcaatcataacttagtgttatatgcgcttttggttttggtcaatcttatgaattacctaagttaaaccacattagtacggtcgtgccgtctcaagtctacaatcaaatcaatttgtaccgagtagataattattcatttaactacttagccacaattggattgccaaaacaattacaatttacttttgagtcttgaaattggtgtttcatagtcttaacaaacctagattttatctttttctgctatctccgtaaaacatgatgtgcggcgaaggtaagtttttattccgacattgtgttttttctccttaactagtagttttacagaattggtaaattagcagaaattcaataagaatttctgctaatttaccaattttataattaagtgggttaataattcagtagttacttataaattataagttataattaagtgggcttaataagatatcttgattacccaatcttttccggacaaagattttctcatttagttcaccactaagaaacagacacgtgttatatttgaacttcactattggcaaagtcatccaaacaaaatctgtggcccgttgcatttcacttcaatcagagcagagcaacttgctttcagatttttttcgagccatggaagctact

SEQ ID NO: 53768 - DNA, 717 bp, Arabidopsis thaliana landsberg
ataaatcaatcgtaccaccgacaccatattcatttttttgagcctcaaatttattttatttatatgaacttctctctttttctttgttctgttgtaaatctagatttgaatacaacggcgacaaattagatgaatggacaatgcatgtgttaaatatggactgtttcttcatcactaagctataacaaacatttggtttaacaattttaatcacttttttattttcagaaagtgaccttaaacgagtcctattggctattggtgtcccacaaaatatttttctactttcatataaatcataaaagttgggtcttgaaaaataataccaaccccacatagtgccacatgactcaaaagtcgttatacgtataaaatacggtcatacatagtatttcaaaaattaccaaaatacccttaccaattttcctttaaattccagtctccttcaaatcaatgcttcccttttctccttctcttctctctcttctcactaattaaacaattttaaaccggtcattatgatgtctactgtaccggcctttacctttactgaaccgggtttggttaaccaattatcggatttccagaccggattcactccttgggaattgaactgctccgatctcttctctacaatccatctcgaaccggtcgtaccgagtccttgttctggtgaatccgatgccagttctgtcaaaattaacaccgattttaacg

SEQ ID NO: 53769 - DNA, 552 bp, Arabidopsis thaliana landsberg
  unsure (1)..(552): unsure at all n locations
ccccccccccccccccccttcccccccctcccccctccccccccccccctctctcccccctccccccccccccccccccctccccccgcccccnccccccccccccctccccccccccccccccccccccatcgcacccccccctccccccccccccccctcttcccccccccccccccccccccccctcccttcccccccccccccccccccccctccctttttcccccncccggggcccccgggccccccaaaaaccaacccccccccttttccccccccccccccccccccccccccccctcctttttccctccccccccccctctccccccccccctcccctttcccctcccccccttctctccccccccccccctccctccccctcccccccccccccccccccccccccctcctcccccccccccccccccccnttcctcctcccccccctcccctcctccccccccctccccccctctcttccttctcccgcgggcctgttgtggctgcccctccccccccccccccccgccggccccccccccc

SEQ ID NO: 53770 - DNA, 976 bp, Arabidopsis thaliana landsberg
tatgtatttattataaactgtcaaaatttgatctctcacaatatggttacagtttgattttgtttatgatctctatcttaccattatgtttgcagtttataatcaattttctcaatggagaatttgcaaataagcaatttgtttttttgttcttaatttcgcatttctcatggaatttaaaaacaatgccactaaacctgcagtagtccagtaattaacataacaaagttttaataaccaaataaactgactatgttttagattatttgtgtcaacaagaccaaggcaagataggtttcttccggggaatcaccaggaaaaaaaacgcaatttaagcaaacgttctatcaatccggccaactttaaaaacaaattaaaggttttgtggcccaaaaatacgtgtaagacaaaagactgtgacacatgggccttacttcatgtggaagttttggtgcagttatgtgacttacgtacgtcaagcaaaatattagccgccttgaaatttcaaaatttgtggattaaatctaataatcagaaaccatatactataagatttacgttacatccttaaatttgcaatcgtacgttttgggcaatgtattatgtatacattgaatagaagagtcctgtattaattgagttacgcgaacggttttttttttttttttttctgatctagcggatggaggtattaaaaattcacatgcaaaatgttgagaaacaaatttgcaatataacgtagcataatagatttttaagaatatacctcaaaggaaagcaaaatatttgaaagaataaataaatcctcataaattccgtattttaaacaagattttattaagaaaaaaatcctaataaaatcttatttgaaataaggaaataaacatatcttagaattgttcaaagtacatttatataggaatataaaatagcataatgtatgtacaaaaataattatttacaaatcatttatttc

SEQ ID NO: 53771 - DNA, 1811 bp, Arabidopsis thaliana landsberg
ttaggtttccgagctctccactgatctcggtttctttatatctccggagaataacaaattaactagttcccatggccggagctcttccggtcggagaatcagatatcctctcggttcatcgtcatcgtcgctgttcatcatgttgattcgattttgtgttagtatagtactagaatattgtacgaatgcaattatttatgtacgtataactctatttataatgttagaatggaccgtattgtagatttggaatatacttggagttgtggaaaacgagatttgtttttttttttgcaacagtgatctacacatttggttttggaatatgaatttttcacgtgggtttaatgttttggaaaattttaaaatttctgagagttttcatctctaacaaaaaaaaaatccccaacggtaacctataatatagtgggcctatttgtgggctgacaatataggttatgtgcccattgaatagtgatctttcaacccaactttttcttttcccataataaggccatgtgaattataccattttaaaaattatattttcaaattaacaatttgatcataatttaaataaaaatggtacaacatttatcaaaatgtataactaaacatatattattatggaaacctataggactaaaataacaaaagaccgttgtttgaacataatttttcttttctgatgatatatccggtgattaaaattctaacaactagatctgttgaatcattgatatttgtctgtttaccaagaaccaaaacaatgtatacatattatatatatatatatatatatactgatatgatcgtatatggatgcatattagtggtattgtacgtgatactttacaaattacaaatctataaacgaaaggaggaaatattctgatatccatatcatcgaaatgaaaacattatcttatattatggttttgtttttcatatgtcgtgtgaggtgcaccgggaaattataaatgagtacatttaacatagcacaagagactagatgcgagtagtcaaagaatgcaccaaaataccgaaaatcaacaaaacccaaaaagaatagaaagatcaataagatatatatatataaaaagtatacaaaaaccaaaatagataaaattgggatctgcattcccaacaatacctacccattttaaaagcatactatattatattcaataaaatcaaaatctttatcatcccacctatttgcttgtccccattcttttccgaattctactacttttatcctttcaaattacataaaaatgagtacgtctacgttttcgttttaggacgtttctaccttctaagatatagattttgacttcttcttttttataggtagattttgacttttttgcagaaattgttttcttgaaacatataattggttcgattttgcagttaaattgtcttattactatttggtgacctcacaatgccatcaaatttgactactatttgatcccatttttgattggcatagtttagtttacctgcataatgcatttggtatgaaattatataattagattacgataacaccaataataacaaagaagaatgcatgaactttatcctgtcacggagaacatgagaatttatccggaacaaaaaaaaaaaagagatagagaagaggaaggaggaaaaaggcattgaagaaaagataatacaagaaaggggaaaaatatcaaaatttcttcaatatttcaaagagaccccaaacccataaataaaaaaagaagaagacaatagaaaagtgtcagaagaatacagagcacttgcccaagaagatgtta

SEQ ID NO: 53772 - DNA, 638 bp, Arabidopsis thaliana landsberg
  unsure (1)..(638): unsure at all n locations
tagttggaatttggattgaaaactcaacaacaactcattgtttggataagtaagtagaaatctggcaataaacgtattctatttttgtaacgtagaaaattagaaaaataatagtaagaggaaaaggcatggtttagtctggtcaagttaatgtaaaccagagtggttaaaacaaaacgacaaagcaatttggcttcttaaaaacccgcccatggagaaagccctcacgcacctctaaaccacaaacaaaaagagagagaagagaacgagagaatcattgagaaactaaacaacaatggccgtctcatcattccagtgccctaccatcttctcctcctcctcaatctccggctttcaatgccgttctgatccagatctcgtcggttctcccgtcggtggatcatctcgccgtcgtgtccatgcctccgccgggatttcttcctcattcaccggggacgctggattatcctccaggatcttaagatttcctcctaatttcgtccgtcagctgagcattaaagcccgtagaaactgtagcaacatcggtgttgcacagatcgtggcggctaagtggtccaacaacccatcctccgcgttaccttcggcggcggaggttgntgctgcctggtctgcatcgc

SEQ ID NO: 53773 - DNA, 627 bp, Arabidopsis thaliana landsberg
atattccgttactgttacagctcacttactagaatagagattttacgagtacttgtgcattggtgtgttctaaattctgtgtccatcttcgtcaaaacagtagacttttttgctttactacgttttcacagcgctaaaaagtatcatatctgttctaacaccaatgcccattgctgtgttagaggtcactgctagaaattgatacgcaaattttcaaatttgatgtcttcaatgtctatctttgtcaaatcaatagacttctttggtttactacgttttttcagagcgataaagagtctcatttgtgtgaaatgccttcaagtagatatcatcttgtatatacaggaaaggagaagtaattgtatagaaaacttgatcgtctttagatggtatcttcataagatttgccacaatagagttttgttttaaggggtcttgtggagtttcattgtgtttggtttaatttgatttatttttgtgttatcagatggcgccaaagcaaaagattaggatcaagcttagatcatactgggtgcctcttattgaggactcatgcaagcagatacttgatgctgcgagaaacaccaatgcaaagacgatgggtcctgttccattgacaaccaagaa

SEQ ID NO: 53774 - DNA, 486 bp, Arabidopsis thaliana landsberg
  unsure (1)..(486): unsure at all n locations
actgctatgaccgaccgccgaggatacgcaaagagccggggagccacaagactgttcggtttcttgtgtcaaggcctttagcctacgacttgacgctataacccacggggcatacgcctaacagtgtgtacaatccaatagcgaaatgtctacatcttttagcctgaaatgcgctccaacatgctcggatcggtcaacggcaacagccaacgtcgctgcccgggcttgaggccgcccttgcgggaacgatccagcacccagccacgcgcctcgacttggcgtcccttgaggttatcgaagaagctggcggggaagttgcgctgcagacgagcgggaacctgcagcaccaccgcaccgtccaggttcagccagaccccgccacggttgcgctccacgccttcgatgcggcccgcaatgaaccgcaaacccgactgccggacatccncggcacgcaccaccggcgaacgacgccacagcccggagcca

SEQ ID NO: 53775 - DNA, 597 bp, Arabidopsis thaliana landsberg
catgcagcaccaattaggatctaacctccgctactctagcattttgggaatatgataaatgtaacagaaaagcatgcacacaggacaggacgacaaaggagaatcaaaactgaataccacttgtatcagcaggcaatccattcaaaaaaaagaatagagctacatctcgataacaatggcccccgtgtgattgttcggttggctttcatcaactcagatgagaatggatgagattgtccgtgacgcaaagctgcaggctctatcgtctatctgaaacgcaagatcgaaagaagcctccacatgcatgctacgtctctctgtctcacctcacctagctagggagaagaaggggggggggaactgtatctctggctcatcatcagcttggccaccttccatgtcaacaggtgattcatcagattgtggaggcgccatcttccatgtcctccagttcgacgcgtccacatccgcgtccctcgtccactccaaccgggcctagtttagccaagagtcacggactctagcaccttgcgcttctttttctcgggcgtacgatgtctcgaccgatctttatctgcatatgcatgcatatatatg

SEQ ID NO: 53776 - DNA, 467 bp, Arabidopsis thaliana landsberg
ccatggagttcgggagatgaaacagattgcgtcaggaattatccaattggcgggtgttgctttgctgtcaaatcgttgctctggaggaggagctttgggaacttgtatatagccaccgagaacttcagcttcgccgagaatcgcagccaggagcagtgattttccagatccagtaggtcctgaaataacgctcagcccactgctggggaagttaaggttgagctttcgcagagcaaattggtcttccgttggaccatcggcgccgaaaggaaaggtgatggtggcgttgctgaacgatatcgcagcgcctgggtggacattatcggccttatcaggcatgcggaagaacttgtcgattctatcgcagctgactttggcgttgatagctgtaaccaacaacagtgggatatgctccacgatgccttcaaggaaatctgatagcgtaatcgccgtaaaagcaaccgaag

SEQ ID NO: 53777 - DNA, 734 bp, Arabidopsis thaliana landsberg
ttacagcactagacaaacgatctatagtgcaaatgggtagttgacatcaactttagtgtaatgtattcctgatactttttgttatgttattgatttatatcgtatacaattcactaatccatataaagcaacaaatattaatacaaactactagagtacatacaaaaaaaaggttatgttattgtttggacttgattagcatcggagtttaatttgcagttttgtgtgtgtaatgtgtgagttgttttaaaagaagaatcgaatggacatttacaaggtttatataagtaaacattttgatcatttccgtcatggagcaactataacagtataaaacactttataaaaactagtatttaaatgttaaaatcagtaatatacttttggaaaaaagaaatggttacatatatagagtaaaacgcatggtatataggcactctcgaaaagatagagggcgtagtagtcatagtccaccaggaccaccaccaccactaccaatgtctacccttcccacatatgcatatgtatggagacttgccaaaacccttctaagttgtaatctggataatcataaaacaaaattttaagaattagtaaaacttatcgcttgaaatgtatagaaaaatagtaatacaattaagttttgtgcatttttcatatcttaattttttgttttttttttgtcaaccaagatatgtaaagataaattatatttttgagggtttctttgtttg

SEQ ID NO: 53778 - DNA, 357 bp, Arabidopsis thaliana landsberg
cggccttggtcaggcgcacttcccacagttcgcaggcgtcgtcgaccggcaggttcaggttcagttcgatgcgcaggccgggacgatcgagcgtccagcgaatgtcggctggtgtcacctcgaatgcaaagcaatcgaccggtgcgcgcacgggttcatagggcgcggaaaacaggctgccggtttcgcggtccttgacgtagaagaaacggccgggatggtgagcataggtgccttgttccggcagcatgaagtgtttggcctccatgatctgagcgcgggcgtacttgctgggctccggctgcatgaactgcgccgtggtgtaaccgcgcgccgtcatgtggatcatcatatgcg

SEQ ID NO: 53779 - DNA, 609 bp, Arabidopsis thaliana landsberg
  unsure (1)..(609): unsure at all n locations
cctccctctcccccccccccccccacctccctcccccccccccccccccccaccccacccacgccctctcctcctccctccccccccccccccccccccccccccctcccctcccccccccccccnnncccccccctccccccccccccccccccccccccccttattcccccaccccccccccccccccccccccccaccccctcccnnccccccccccctcccccccccccccccccccccctctcccccccccccctactccccccccacccccccccttctctcccccaccngcggggggacaaaaccccccccccaccaccaaaccccccccctccccccccccccccccctccccccctttttttcccctcccccccccccccctccccccccccccccccccccctnccccccnccccccccccccccccccctcccctcccccccccccccctccccctccctctccncccccccccccctcccccccccccccccccccccccccccccccccncccccctcccccccccgcgggggggggctccccccccccccccccccccccgccggctccgcctccccaaaaaaaaaaaaaccccc

SEQ ID NO: 53780 - DNA, 503 bp, Arabidopsis thaliana landsberg
ctggaggctgacccaagaatcctttaatcctttagactaaaatttcccaagaaatttcaaatttcatcactatactttctaaatatattgtgacattcctcagtttattcgaataggaccattaaaaaattatattaggttttaagtcattaaattaactcatacttgtggactcgcaaatattatttaccaggatcatagaataattaaagatattacatgaaaatgatttaaaataaaaagacaccctagaaatatactttaaaattcaaattattggaattgtttttttttgtataatttctaagaatatttatattcacttatttttcaagaaaatagggaagaatttcaaaataaatatcaagatcaaaatgtatttcaaacaaagctcaaaaaattattatttccaactttactaaggataagagcaagaaattagtttatcaaaggataatcatggcattaccaggttctatgtgtaatccgttttatttgacaac

SEQ ID NO: 53781 - DNA, 681 bp, Arabidopsis thaliana landsberg
tctacaactgcagagcagcctaaggatttggttgacgaaccagacacttcttctttctctgcattccttggttcactgttatcttcagatcccaaagacaaaaggaaggatcaggatccagaggacgaagaagacgaggaagaagacgaagaagaagattctgaggcagaaacaagcgatacatcatcatcatctgccaatcctactagaactatgaaggagactactagtggtggtgctgcaaagaagagttttttgtccaagtacaaacagcattttaggaatttttaccaggctgttaagtttcccggggtcaaggagcgaaagggaaattctgatgtgataccagatgatgaggagactgaatatgatggcttagagatgaagccgatgcagaataataatgtcaaagaggaagtgacagtagtagtgcaagcaattatacctgaaatttcagaaccctctttgcttttatcggagcagtctagacgctccctttatacttcacttcctgcgcttgttcaagggaggaaatggatattgctttataggtgagacaacacattcaaagcttttggagctgagtatgaatctcaagaatggtttatttcatatgttctatctgtgtgtgcgtatgatcatttttctgaaatcttgcaatttttagtacatggaggcatg

SEQ ID NO: 53782 - DNA, 557 bp, Arabidopsis thaliana landsberg
  unsure (1)..(557): unsure at all n locations
aatcggcccactcccagggcttagtgctctccaatcacttcattttctctttaccatataaaatctccaaaccaatttgtttcatccaaagagttatggtccaccatccacatctttcgcaagaaaaaacttgctttaataatattcttttctttctttagctaattaaaatccataacaatatttctctcgtcatcaaattatttccttaaaaatttataagatcggatatacactagaacaaatttctgacctcatggtttctttctgaacacaaatctctagacgtgcatcaaaaccattagccacgtgtgacgtttcgaaactttgtttggcgacatctcttctacgaaacacctaaaagataaatatgtgactaaaataatttaatttccaaaagagtgactaacatctttttcttttttatttttgttatcaagagtgacgagtatttatactcgacttttcttttggtaaaccacacacacaaaatcttaaataagaagaatctttaaaattttgtgttgagtgtgaaacacanaaatatgtgttacaaa

SEQ ID NO: 53783 - DNA, 593 bp, Arabidopsis thaliana landsberg
  unsure (1)..(593): unsure at all n locations
ttattagaaatcattaatcatactaatttggtaaacttttgtgtacaaaagttgaaagcattggtattaagaaagaaaccacaaggacacagatgatgaaagaaaggaactaatgaagaatataatgttggttttgtttagtgtatcataacaaattccctttaactcattatccattgaaagtgcttcacccttctggtgaatctctaagctttaagtcttttgtcttttcaatttctcagattgttttgatggttgagctcgagtttttgactcacttcacttcaaaggctcacacgtacatttcaagaatattccaaagtttcacatcaattattattattttttccatgtactaggaggagaaagtctgacctctatacgttgaaattttcaaatttcaactattagagagagctttttggcccactagtagtatatctctagttgacaacatctggaacgtatcgtgagatcaacacttaatgttagctgntttggacttcgcttatataatggtttaacaagttatatgatgaacataaacatctaaaacatagaactaatttaaacatgtcanagaattttacatg

SEQ ID NO: 53784 - DNA, 443 bp, Arabidopsis thaliana landsberg
  unsure (1)..(443): unsure at all n locations
aagancnggatcactctcangcacagcctcattgaaaagctcacaacattcccaaacgctcatcaccattttatctaattttccatattcagccctcatctttttcacctacaaaacatacaattatttatattatttattaattaaataaaagtatacatatactacctggatcacataagttataataagatgtgtcattatacacataaaccctaataacttttttaagaatcttacaaagtcgacagtttggttgatgtgctgtaatctgtaaaactcttcgacgcccttttgcctctcactctcaacatcgtagtccctgcgaccaaataccaccaatgtacacgttatggatcaagtcaaggtctagatccggccaaacaaacaaaaaaacactcaatttgatttaattaaatattttcttcattcttgaattgaat

SEQ ID NO: 53785 - DNA, 531 bp, Arabidopsis thaliana landsberg
ggatccccccacctcctccaaacccaccgcctgctcctcctccaaagccaccaccggctcctcctccaactccaccaccggctcctcctccaaatccaccgccaaagccaccaccctttcctcctccaactaacgtcttctcatcctcatctcttcccgagctcacatctctcgctacaacattcaccacaaaaacatggaaacataacaaagccaaaagagtagcaccactaacgagacgccccatatttttttgaagtatgtttgtttatttgcagagtgcactgcccgatgatcaaacataaccaacattacggtctattatatagcaacacttaattatctactttaatctttgcattaacttacttcaaccactaactcctactctacttctcactgcattcaattcgcaaatccttttgcgatatcatctccacatgttttctagtaacatatcttactaatcataaattaaatacatagaaataagaagaactctggttagtaatttaccaaatctaccaagta

SEQ ID NO: 53786 - DNA, 243 bp, Arabidopsis thaliana landsberg
gtcgactctagaggatcccctggcatatccacagatgcttgcaatcacgatgctccagcatgtgttgcttaagtctgtctatctggttctatgacaaattgtccctcgtactcgatgatatttaaccttgcctagaatagaacacaccaatcagggccaacttcttagaggatagttatcgtgcagtgtatcgtaggcacgtgagcctttgctgtcccacatctggcagagtacgacgggata

SEQ ID NO: 53787 - DNA, 452 bp, Arabidopsis thaliana landsberg
cggtgtgttcaggtaaaacacatactgacaattagaaactgtggttagatgcttgtgattgtgtgtgcgtgaccaaaagagttttatttctggtctagtctgaaccagaatttagaccactgatgtcaggagttgttcaagatctactagatatgatcagaagagagcgtcatggctcgagtgattctagcgcggactagtgaattgttcagaagcatttctgtatcggatcatctctgtgaattcgtggaaacaagagatgttcagttctcagaaacaacaacaacaacatagggaactaaaccagacacaagaaaaatagttgcagcagccaaagcctcagaaggaggcttaaggaggcttaagctgattcgacagccttgtgaagtgtgctcaggggaaaggatcaagtgctgcttccaatgggcgatgattcgatggggtcagagttt

SEQ ID NO: 53788 - DNA, 1165 bp, Arabidopsis thaliana landsberg
ctctctcatcatccacgccgccaccaccaccaccatcaacttcttcccaatcaaattcatcagcagttacctcacgatcttctaattggagtgaatcccaacaaagagggatagtcacactaacatcatcatcttcatattcatcatcatcattcacatatacatcttcttcattcagatcaatcccccataattccctctcattgtgaacaccatcatcatcatctgaacccgattccaccgtaatcaacctgatatcattccccgaagatgcaatatcgcggaactcgagcccaaaatcagtcctccccacattgaaatcgtcgtcatcaggttcatcaaaatcattgctaacatcaatatcactatcacctaaattctcaacaataacacttccagattccaatcctaattcaatcaccatgtcgcagtttccctctatcacaacagaacaagtttcggatcgcgattcatccgtagcctcgttatcaaaatcaccatggatattagaatcgtcatgaggaggagttacctgagactgctcgactcgctggtgtaacagatcatccatgacaaagatagagaagatcgagagataccacgactgaatctgaaaccgattcgtcgcatgaaacaacgacggaggaagaagaagaagagtaatcagttatcgggggagaattgtgagaaatcgaatcgaggtctgcttcgttaactaacaatctcacatcttatgtgttgttataatacgacgtcgctttcgatctaaacacatgaaaatttcccccatcaattttgacgatatttactccttttgtggagtaaccttaaaatgacgattttgtccctcagtcatattctcggctcgagaatcgcttgaatgggccaggccgaaatattggcctgttatcacggagaatctcttgagcacccaaaccaaatttgagattgacttgaattcagttctatttgaaatgatgaacaaaaaaagaaaaccaatttgtattctcagtacggtggaattagatgcacatttacaccatatcggcccatgggcggcccataaattataatggtttacttcaatttgtcaacatttatatatcataacgtttttaaaatttatttgactagaaaaaggaatttatttttattgtgagatact

SEQ ID NO: 53789 - DNA, 506 bp, Arabidopsis thaliana landsberg
cagcaaccggccttgtgagcctggcttcctgcctactaactgcgtacatacaggagggccttgggtgatccgggtgcttggtttcttggttctgcggctttcgctgctgttggatttgccgagccggagccgccggagatgaccgtcgacgagctgaagctgcaggcaagggccagcggcggccacgacctaaggaccagttccccgtcggcatgcgcgtgctcgccgtcgacgatgacccgacctgcctcaaggtccttgagaacctcttgttccgctgccagtaccatggtacttccctgtatgcttggcttcctactcttctcatcggattgtatatacatcctgccgttctttttcacctttattgtccccgattcggctcttcggtttggttttatttagtttctgttgttcgcgtaccaactatcaagaagtctacggagatatttgggttgctgtttttgcattttttcatcacataaatagcaccccgactctatgcg

SEQ ID NO: 53790 - DNA, 1415 bp, Arabidopsis thaliana landsberg
ggtgatttatgtagcgattatagatatatttatttgatagataaataatgaaagattaataaagttaaaagtatgtttttgttttctcagttacaagattaatctaaagaagttcaaacaattgcattttctttagtcgtcgtgtatatttggggaccatttgatttaagaagaagtgtaaaagcagtttttaatggcagaaagaaaatctgtaactacttaggttcttttgcatttgtctatagagaacgaaaaaaatgtaagagaaaaagacaaaaatggaaagaaaaaaggcaaacaaaaagtttccaaaaaaagaaagataacacactttaaaagttgaaagctaaggaagataacaaaaaatattaaattaaaacaaagtttggttcactgaatgatgaacattgcatgtgtttcgtcatttaattatataatttcttcaattattattgcaatttgaccttttcctcgaactctttttttctttttgttaataataaattaataactagtagtattaaattattactttatcctttagaagccttacctgttacaactacaaaaaggtatgacgcaaaagtctcctagatttgatactttttaactaaaatatatgaaatctaacgtataaagttgtataaatggctaattgtttgtttgcgtcgagataaagggggaaaagctgttgtattgtgatgtcaaaataattagtacttcaatatagtggttggataacactaaacataacctttttgatcaattagggtagatttagatttatcgaatgcatgagaattgtgaaataattaaataatgtatgcccaataaatgtgaaaaagatggcaacttgtaagaaaattggagggtttgctataaatttattgacgcgtttgatttggacaactcaacttcttgtagagaagactaagctgtcttctagttcaaagctttcatgaaatatctaatctttaaaaccacaatagtgaatgatccatgtgaaaaaataataatataaaattatataattgagaagataatataatgctgatgttagaaaaagagagtgtatattaacatacaaaattttaaattcagtcatcactagacacaattgttgacctgtacctcatgggtttaatcctgtgcatgattgagaaaaaaagaagctaaccattaaattatatataagaatgggcctgaagatagcccaataaagagaccaaaagagtatgtatgtaatgtacgtaaatgatgtaaaagtctaaaagagtaaactagtaacttggtctatttcgaaaacaaatcgtttaagtagcaaatttgttatgtaatttactttagtttgggatcagttttaacaaaatttgcttgtaactaaatcttttcgactgtccatttttaaaagtgag

SEQ ID NO: 53791 - DNA, 447 bp, Arabidopsis thaliana landsberg
  unsure (1)..(447): unsure at all n locations
ccagnttccgctgcgccttgcgactgcttgagtaccgcgttgaggtgaaaagatggtggcgacagtggttctcccaattctatgggctttcggcggcggatctggttcctatggtatgtgcggctggcgagattcgctagttgctcaccggttttatgtatgggacgggaggagtccgagctgggtcgattgaagacccgacagagccctgcattcgaactttatcgcacgcggttgcaacaacccgagatgcgcgcctgatcattgagagaaggtaggcggacgttctgcgtacatggccccacatggcgatgacacgctgagagagaaacgtgccaagcgactgaccccggggccccacatgtcagcaccgtacgaatgagggtgtgagcgcgagttagtgggccgccgggagcacaatcggcccagtgaccgaattggtttatt

SEQ ID NO: 53792 - DNA, 727 bp, Arabidopsis thaliana landsberg
ttcggagcgcctgtgaaatggtcaagggtttgttcaaagaaaaatattttgatattttagtccttaaaagttttcttctatttctctggggagtcaattatatgtacaccttgtttttgggaaacactaaatccagcttctttggagtatgcaagatagagaatatatcactagcaggccagggataatagatgggagtgaaattgttttgagtattaagaaaagagaaaaaaattgtgacaaaaagacattactgatcgacgtttcttgtaataaaataaaaaatgtcttgttttcatatattttaagttgatgtctcatgcttctagtcactgtctgaaaagaattagcctctttttatttatatgaatttaatagaatctaacggtaatttaattccttataaaactctatcataatcgttgtaaatttaaaatagaaaattaaaataatttgaaaaagtagtaaaacataagcaaaaattaagcaaaaatatgtatataaaataatcatatgattagtagtggaactcattaccaacttcactgttaatcatattcaaaatctaccatattcatcaacaatataaacgaataatccattggtgattcatcaaccatctctagactctagattacgcatcattcgttgataatgcaagcgaaataaatttataataggctagacagaagattacaagactttattcaaatttgaatctattaaa

SEQ ID NO: 53793 - DNA, 515 bp, Arabidopsis thaliana landsberg
catgcgcaatgacccgttccctttttccctgagtgtgctgcgccgccgtccttctcctccctgtttgccccaatccgtgcaccgccgcggacaacctccgctggcaacaccgctccgccgttgatttggtctcggcgtgctttccggccagaccaccgcggttcctttccctgcttccgacctagcctcgtctggttcacaaaaagcgcacagcactaaatcgccgatagtagagagaagaagagtagacctgagcgtcgtcgtcgagtaggtcccgattgagcactctagtactcgagccgcggcattgaggggcgtcacgacagatcggtgaagctcgcgcgcgacatctccggactcggtgcggtctggtgttgaagcaatcgctcgccggagcttggtgaccgccactcatcgtggccggggcctttgctgttacatcaaagcgtatgtaccggttcatcgcgttcatatcgtatgaagcatcgtgtagtactcttcgaatccgagcttgg

SEQ ID NO: 53794 - DNA, 1235 bp, Arabidopsis thaliana landsberg
gtcgtttatgcattataaaagtaatacttgtgatcattgcgttctatataaacaacttctatataagctgaaaaaaacttgataagaataaattaatacaatggtaatttgaatccagttaaaaataatttggactcagttacaaagatatgctaaaagttataggtaatatttcgtttttatttgaatagaaatgtaatagtactcggtaatgcagtaaataattcgactatttccatgaagcgaccaaaccatttctcatcatatgcacacactcagacaaatatattggtcaaatcacgtgctgggaatatgcgtacactataaatagattatagccaatcattagaacacattataacgtttgaaatgaacgattatatacgtatactactttaaagtttaaaccaaaacaacaacaataaccaggaaaaaaagaacaattttgttcctaactaaattagtggtaattatcgttataggttctttaatactggagcggatcatattaagagatatatttaaagaggtcaaataatgaattcatacatgcacacatagatatatatggctatatgtagtcgatcaccatatgataagataatatagtttacattaacaagaaaaaagataatatagtttttttgcatttgcgacgtcggcttaactttgaggaatcaacccaaacaaaattaaaagaaaaacacttggttcacaatatttgttagggcaaaatcattgcacaaacacatttatagatatacgtgcatgtatatgtaaatattataggatggagaaaagggacaaaagaaatagaagatgataaatgcaaacaaacctccataactgtaataactaaaagagtatgggaagaccatgtgatcagattcacatgtttttcctcctcagtgtcacactcagactcagactcatcatcaggtgtttttaccattggtaactaacttagttaactataaccccattccatcaattttcatcttcctttgaaaaacaaaattagaaatagggtatcctctaagttagtatttttcaaataatatcactactttaaattacaacaatcttttttttttttcatacgattacaacaatctttttaaatatctaaaactaccataaacataactatattaaaaaccgatacatataatataatgatattatattactggcattgatgtgtccctatcaagattcaaacatgtataatgcat

SEQ ID NO: 53795 - DNA, 367 bp, Arabidopsis thaliana landsberg
tcataaatatgcaatagtacttatacgtgaacctaattaaagacagctataaaggagtcttcctccaactttttttgtcttgtgggtcatatcaagagctatgaagagacgttattgtttttgcccaacaacgttttttacgcatttcaatatgagatcatgttcagaaatagttaatttaaactcaagtgaaggtagtataggggtaaaacatcttgtgtctccaatttgatttagtatgttttgtataatgtaattactacgtaaaatatcatgattaactagatttaggtttagtgcatggttttccttaataagagggattagaataggaccatatgagtaaattaaaagaaacattcaaata

SEQ ID NO: 53796 - DNA, 502 bp, Arabidopsis thaliana landsberg
  unsure (1)..(502): unsure at all n locations
cccccccctcccccccccccccccccttcttcccctccccccccccaccccccccccccccccccctccccccccccccccccccccccccttcccccccccctccccnnnnccccttnnncgcccccccccccccccccccatttccccgcgccccccccccccccccccccccccccccctcccccccccccctnnnccccccnacccccctctccccccctccccccccccccccccccccccccccccccccccttttccncccccccccgcggggctccacaaccccccccccccccacccaaccccccccccccttcccccccccccccccccccccccccnctcccctcccccccctcccccctcccctccccccccccccccccccccccccctcctctcccccgcctccccccccccccccccccccccccccccccccccccccccccccctcccccccccccccccctcttcccccccccccccccccccc

SEQ ID NO: 53797 - DNA, 579 bp, Arabidopsis thaliana landsberg
  unsure (1)..(579): unsure at all n locations
atgctggcacctcgactctagaggatccctcaccgaaattagggaaaacgaacgccgatcccgactaaaccctagcacgaaggaaatcgcgggaaccaggattggacgggggccgagcttaccgaaaggccgaacgggctggatcggtggttgcttgcggttgcgggatggggacgaggtcagtgtaggacaaggatggagccggtgatgagttggagagtacacagagaagcaactgggtggcgtacagacacgggtgtgatttgcaggttttcgtggggttgatttggtaaattgaggcgttcttctcagaagaatgtgtatacgagaggtgttaatgtatcacgatctaaataatttctcataatctatactacctattaaggctctaaggggtaggctgcctctgctttgttctaccttccgacgatctcaaccgtccaatacgctctagagtctctcagccgtccgatgcgcgcactctcatccccacgcatggcccgccccacccggtcgtcaaccgtgcgagcacctagctcctccgcgcntctacccccacgaatccactcacgatggcga

SEQ ID NO: 53798 - DNA, 388 bp, Arabidopsis thaliana landsberg
gccgctggactctgaggatcccgaaaatgatcaaacaaaagctgcagaagcaaaccagccttcagctaagtcagcatccttatctttgaccttcatgataatgatatcagtaagcgtacgttgaggaggagcattcttatttaacagtggctcaaacagcttcgcgtcatcctccttaatcaccgcctaatatgggtgtcgtcgcagtatcagtacatgagcatgagagactcaactttggcatcgtactacgcaattcaatctagaccttccatcgacgggtgctatatgtatcttgagactcacttgcctgtcgaattggcacaggagagctaggaatcaaccacgacctcaataacatctcatactccctactgcctattcaggc

SEQ ID NO: 53799 - DNA, 621 bp, Arabidopsis thaliana landsberg
  unsure (1)..(621): unsure at all n locations
tgaaatcgtaggttcaagttaagacatacagcccatcatttcctccactgatgctgtttggattcattcatggacctaaatgcatcaccgtggtgtcccactgtcccttaacatgagactcacctccaccttgcccctcccagtcggatcacctcttccgttccagaatccctnnnnnnnnnnnnnnnnnnnnnnnnnnnnnnnnnnnnnnnnnnnnnnnnnnnnnnnnnnnnnnnnnnnnnnnnnnnnnnnnnntctggagccctaccaaacgggctggagcgatgtttatcaccatcacttctgccacggactggactcctgctcctgctcctgcggacgcttgcatgtctactccggtcagaatccctgtccctcctttcacggcctcgtgtttcgccatccctgttcgaataatcagnnnnnnnnnnnnnnnnnnctctgtgctcacgagcatgccgatcaggtccctatccttgtagtactgccattgcacgttccgatccgagcgctcctctccgaatcatgatacgctcagagctcgactccggtgcttcacggtggcgatttccacggtcgcttccttgtctgtttggaaggtatgttcttcggacggggaag

SEQ ID NO: 53800 - DNA, 115 bp, Arabidopsis thaliana landsberg
tgcaggtcagactctagaggatcccccagcaaccaatgatcagcatagggcgcatccgcaacgtcgcagtctccgcatacaggagtgaaaagcacacgtgatctatgagaccgat

SEQ ID NO: 53801 - DNA, 576 bp, Arabidopsis thaliana landsberg
cgactctagaggatcccctccctcctagtgttttggaatccttatttatggtactaataagtagcattctaatctgcatatggttgtcttgttacaaagtcatattctatcaccataatttattaaagagaaaaatgtttggttgcacaattacaagcttgctttgtttgattctacttgcagcgcggccacacgggcccaacaatagcaacgtcacatggtggttgccattgtcacgtcgagctctccctctccaccaactaacagttcctgacggtggagcagaaattcattaagagcatatagggattcacaagtggtacatgtatttcgtctttctttctttcttagtattatataacctacatactgtatttggacatgcattgtttattctctgcaatcggttaaccctggactgcttgcaactatccccagttacaaaatagtgcttcttttctgtcataacttttcaggcgtccatagtaaatgaaattggtgcatatatttgagttgactaacaatgctataactaacctgcaatttgttgatttcatttttactgctagattttga

SEQ ID NO: 53802 - DNA, 512 bp, Arabidopsis thaliana landsberg
  unsure (1)..(512): unsure at all n locations
aaaggatnccgaaagttaaaaactgnaaatattatgaaaaatatatgtgctcaaataaagagagagaatccaatggctacaatatgaagaaaccagtgcatattcacttgagcagtagcaatctagtggataggaacaagataccaaagtaaaggtaagagataagagagaaaaaaaaagaaggagaagtccttaaagctttaaccggatatgtaagtctcacataaacaaaaagagagaaagaacagaatcaaaggatctgtccctgcaaaatggtacccactgacacttctttaattccctggctccaactaaagctcaaagtcacagccactacgaccaggatagagctcgttactcgcattttagagctaaagattgtaattcatgaatcaagcaacgaaacgatacttgatggttacaaagagtaaaaataaggactttggatcatgcaatgtagagacacataaagcacctgagatcactaaatcttgttaaatcaaaaagcaaac

SEQ ID NO: 53803 - DNA, 1179 bp, Arabidopsis thaliana landsberg
gcccttatctcgaacaactgggtcgaaaagatggtgtcggatcatcacaacactaaaaggtaagaagtagacatgagccttgtccggatctcgggttcggtacttaaggacatcgttttccataaagtttaggaataatccttccatggagtatatgtctttacaaagtccatagtgaaatattggcggatctccttcttcgtatacgtatatcttgaacatcttctccataagaagataacttctgcaacaagtaaacagtattcataaagggtaacttctatgacaagtaaacagttttttttttttttttaccggtgaaaggcataagggttccggtaaatgtcgccatgaggaacatagtcttcgtctccaaggggagacgatgtagtagaactataatttaattgagcttctctgatcaacgccctcgcggttgctaattctgcttctactttcccatcccttttccaatatccagaacctggatttgatccgtttctctttcttttttccttgaaaatacaaaactaaattcttgaaaatacaaaacatagaaaccatttttcttgataactgtaagcaaaaacgtgacaaataaaattacttctttggaaatactttttgtacatggaaacatatttaacacacatatacactggtaaacatgtttgaaacaattgtaccctaaatcgatgaacggtaagaaagatggataccgtgatgaaggcgggtgagaaggaagaggtccatagtgaagaagatgttgaaaaataaagatgagaagatgaatttgaatcttttgctatgaaaatggcaaagcctacagcaaaagtggcaaatgccaaaagaaaggcgttcaggtatttcggaatgtaatctctcataccttttccattctaattcctattccattattgtgtttgtgtttagtctagcgagagagagtgatgatgctgatactaaggagattttaagtgagctaattaaagagtctctcaacaccacacaatacaactacttcacatgcattacagtgacatacaaaaaaaagaatacaaggatgtcaaaactagactcctggttttatggtctgccatagaatctcttcacacaacacaaccttttttgtattttcttcttatcgttgataatgttctagaattagggcttttattg

SEQ ID NO: 53804 - DNA, 534 bp, Arabidopsis thaliana landsberg
ggatccccctgtataatacaacagtgaaataggtccatatagccaatctttctctgattcaaatctattattttagtttataattaaaaaaaaacatagctggcatgaataagatataaacaatattaaaaaaaaaaatagacaaattaattcatagatatttcatgattttcataacattcagatttaaagccctatatgtttacaaatgtttgtaggtactacatttctgcaaacgcgatagttgcggttacccgcgatctcaatagtgattgtgatgatcagccaaggccaaagaagcaaacgtttgttgatggcggtcttgataggagatcttatgctggtggctttactgttttcctgcactggagccgccggagcaatcgggctaatgggtaggcatgggaaccaacatgttatgtggcacccagtttgtggcgtgtttggcacattctgtaacccagctgctgtttctgttgctatctctcttattgcttcagttgtgttttgcttcttgttgttcttgatgctttg

SEQ ID NO: 53805 - DNA, 522 bp, Arabidopsis thaliana landsberg
actattgaaaatatataatccacttagggggtaggaggctctatgagatcggatatcagaagtggtagaggggctccaccgctcgagccccaccccctaccgctccatccgtctatgtcaatagcatacataaaaataggaatgttgggttgacgaataatccatggcaatcaattagtaaccgagataacattcattcaataagccccaggatgttgtattatcagaaccccatggagggaaaacgggagacatcaaaggtttgttttgtttacaaggtgaccgagtctctctcccgacttaaacatgtatgccaattagtggtcgatctctttcttgcacattgatcatcaggcatcagccaattgacatgcagtcaattagcttagcgatggcttctccttctccatctatatcgcctcctcggtgtctttcttcaattctgtcgtcggctcggctgccacattgtcggtggaatatttcctctgcatggactgctgatggcttctccttctcgatgac

SEQ ID NO: 53806 - DNA, 369 bp, Arabidopsis thaliana landsberg
tgcatcaaggtttattgaaacgataattgcaagttaacagtgtagaaatttccacagataaaataggtctctcatcggctttttcagtgttggtggttacataattgtctcaccctagaagtagtagtagcatgagaagcattgtgctccatagatgatactaatactgacggtgataagcatcaacttgtaacagtgtgtcaaatgttttgttttctagaatttcatcaatccttttataagttattcaatcaagaaaatttatgttctcacaaatgtaaattatggactgtgtaaactatatttgaattatgtgatctatttcttgcttagaaattgaatttcatttagtgctttatctcccactca

SEQ ID NO: 53807 - DNA, 442 bp, Arabidopsis thaliana landsberg
cattgatcagcatagaaaaagaaaaagataagtagagcatatcataatgaaacagcaaaccttgtttcgcccgtgtgagagcctctgcaacaattctcgtatcttcagactgaacatctactttccagtataaaagaataagtgagtatcattgtatactttaccaccaagaactaaaagcagagggccaaaatacatgtttatccgtcatcaactatctgttgggaagtcatttgatggctattttttatactgttacacaaaacaccagatgaaacaatcagagttgaaagtgtttactgatgcatcttccttccaatacaacagcagcatgacgattaagatcttgtaaaagtgacctcttaagctggtcattctgtggttcaataatgtcattggtgccatcgcgctggatcccatggtcctgaggggctgccaattt

SEQ ID NO: 53808 - DNA, 875 bp, Arabidopsis thaliana landsberg
caatatagagtaatacaacccaaagatttggatttgattttttttgttgaacaatgtacgtattgtttatagtgttgaaagttgaaatatgtatgaaaatgtaaacatcaatctattaatttatgagtacatagtcgtatgttgcgtgcatcctacgcaataagtactaattgagaaagcatattcgtaaagtattcttgtaattgacaaattgatacgcttcattagaaagcagaatcctaattaaaatgagatgtaacagaaaattgactatcattttgtttggcaacaaatcattttttttttgtatatcttaaatcaatttacaaaaatattcacgcttataatatcgacatgaacaaaccagtgttaataaaattttgtttatgtaatgtaaaactgaaaaattggcagatgggagttgtgggagagaaaaaagacatagattttgtgatatcagtaggagataatttctacgacgacggattaaaaggagtcaatgatccttcctttgaagcctctttctctcatatctacactcatcctagtctccaaaaacaatggtattcatgtaatttacttccttctaatcaaagtttatacacatgtttaatagttagttacttaattgtttatctatatgcctaactgagtttaaacactcaaatgtgttatgggattattgtgtagtttgcaattgttttggaaaatgtcatttttactaagatcttacagatttgtcgtacgtatttcaatttttttgttgttaaaaatacatattttataccaaatactaaacttaagatcagatggaaccgactgacctaaacataacgggtaaaatgcatgtttaaattataattttttagcttgca

SEQ ID NO: 53809 - DNA, 335 bp, Arabidopsis thaliana landsberg
acaaagctagcgattatcagatcttcttcgtctcaacccgccatagccgccgctgatttgtatctcgggctgatgaatatctctgcgttttcaccattcttctctctcgcgatcgatacttcctttgatccatttgatccatctccagatcgattagtaactctcaatggtgtgtcactcaccattctctggatctagggtttgagagatttcagagaacgctccccgaatagagagtgagcaatgtgacagatactattgcctcaacggtcggaatctttttatcaatccgagtttgtaaatgggcgttagttgggccaattgattgaaatgtc

SEQ ID NO: 53810 - DNA, 836 bp, Arabidopsis thaliana landsberg
ccacttacataacggtcgttttgatggcgatgatggcgatttggcaatatgttcatgtcctcaaataccggtacgagctgagggagaagatctctcgtgaaaatgctatacaaatggctacaagtcctgacgtaaaccgggttccagggattggtcttttctacacggagcttgttaacggtataactccattgttctctcactatatatcaaatctttcgtccgtccactcggtgtttgtattgatatcgatcaagacacttcccgtgaaccgagtgacgtcatcagagcggttctttttccgttacgtggggccaaaggattccgggatgtttaggtgtgttgtgagatatggttacaaggaagacattgaggagcctgatgagttcgagggtcattttgtttattacttaaaggaattcattcatcacgagcacttcatgtctggaggaggaggggaggtggacgagacggacaaagaagaggaaccaaatgctgagacaacagttgtgccttcgtctaattatgtcccttcatcggggcggatcgggtccgcccattcatcttcgtcagacaagattaggtcgggaagggtcgtgcaggttcaatccgtggaggatcaaacagagttggtggagaaagcgagagagaaagggatggtttatctaatgggagagaccgagattacggcagagaaagagtcttctttgtttaagaagtttatagtgaaccatgcttacaatttcttgaagcagaattgtcgggaaggagacaaagcacttgcgattcctagatccaagcttctcaaggttggcatgacctatgaggtataagat

SEQ ID NO: 53811 - DNA, 480 bp, Arabidopsis thaliana landsberg
  unsure (1)..(480): unsure at all n locations
ccccccccccnncccccctctccccccccccccccacccccccccctccccctcccctctccccttctctnccccccccccccccccccctccccccttttccactgtttcccccccccccccccccccccaaaaaaaaaccccccacccccccccccccccccctcccctcccctccccccccccccccttcccccccccccccctccccccccccccccccccccccccccctcctcccccccccctccccccccccccctccccccccccccccccctcccccccccccccccccctccccctcctccctcccccccccccctctccccccccctcccccccccccccctccccccccctctctccccccccccccccccccctcccccccccctcccccccccccccccccccccccccccccccttccctccccccccccctccccccccccccncctcccctctcccccccccc

SEQ ID NO: 53812 - DNA, 462 bp, Arabidopsis thaliana landsberg
tacttcaatatgttggtttgtgtttgaatctgattagtgttaaaagagttgagataattaatctaagttagggcttaattattgtaggtcccgaacgtcctttgacgttagctctgtcaccgtcacgggacacatcttcaacggcggccaatgctgtcacagctgctatcagtctcctcctgtcacacacattaactatacactttttttttttttttcccttctcaacaatagacgttattgtaacactatttgggtataaatatacaattaagttgatcattcatgaattaataattcttcaaaactaattaaaacccaaaagtctataataacgacaacgttgaatggcgttttttgctggggtaggtgccggcatgagctagcatgtataatgttttatagtagtaccacaccgacgtaaaaaaaaccattacgtatatttctactcagtttgtggtg

SEQ ID NO: 53813 - DNA, 582 bp, Arabidopsis thaliana landsberg
gacttcatttttcaccatttaactcctcttgtctgctaatcaaacgactgcaacacatatgcacaatcacaaggtccaatccgatagcgcaagtcataagccgattgtaaacactcgtggaacaaaattttcctcgggcactcacaaccacgcccccgattaattcaaacgcacatagccacgccacccaccaaggagcaactatcgaacgacaagcagacatgtttgtgacacccacaataattctgtttattgaacacttacctaggtctaccatggctggcgacaaacttggagaaaatgaagcgtgagtagcgaggtgggcgacgaagcacagtgagaggctgtgggtcgtggaaatcgacgacgtgaaggagttgcggggtcgagtatggccggcgaggagacgacgacgacgataccgctgtgcgtgtgatggacaagcacgcgacgaagcgtccgctggcgagctccaccgatgacgtggcacgacagtagacggcggggacaacgacgtggtggcgagcacacagctggcgctagggcgagatagcgctacaagaactggggcggaatggggag

SEQ ID NO: 53814 - DNA, 681 bp, Arabidopsis thaliana landsberg
tcgtgccgctgatgggccactccacgatgcttcaataccaaaggtcatgctgtttggcatatgcatctttcagctgcaattatttacagtgtgttcccatgcgtttggtgaacattagccatgcgtttggtgaacattagccatgctgtttggcatatgcatctttcagctgcacttatcaatgtcatttatatttcaccattttgataatatgttttctacaatctttcaaggtagggtaatgtataagaaatgtgttgaaactgtggggcaatatgcccttaaactcactggatttctcaagacgttaatgcagaggagaaattaatccggtgagtcgttgtacactgttcaaaccattaaggaggtaaattttgtttatgctgcaagtttaaagttgattggagtacatatattcttttaacaatctcactaatagctgagacaagctaattgtttttaaacatgagacgatatctgccttcttctgactctaccacttttctctcgcatgtgaagaaactttgctacgtagatgctgattatgaagttgaattaagtaaggatacacaagcgtcctgcgaggttgatggtgaagggtggtttcttgctggaagagagatcaagacccaaaaatccattcagcccatatggcagacgtgcgaatgttagaaatgttaa

SEQ ID NO: 53815 - DNA, 437 bp, Arabidopsis thaliana landsberg
tgcgcatgttaattagcctgactagattatcctatagattagacggtacatgtattacttttccctccatatatttagtagagcatgtgtttgaaatagtcatacaaaatgaatccaaaaactgttatgagcaattcattctacaaacggatgctgtaattcctcacaaattatgaaatgaatgtagagttgatcaagaacaacgtgtttgaagattggatcaaggaaaaaaagataaagattcgaacaaggccactaattaagggatcattataggaaagagaccaccacctacgctcaagttaaagtataattatagtcaaactttttgaatgttatatttttaataccctgaaactgaagattgggacgactaggattggtggattatatatggatcgacaacgatggtccgttataatatatataatataata

SEQ ID NO: 53816 - DNA, 414 bp, Arabidopsis thaliana landsberg
agacgctagcaagatcccctagatcaaaactaatggtagactgtatgttaaaaaagacgtaagaaacgatggctgcagacagggaggaacactcagaggtcattttacgcaagtaatccggaaaaggactagcaaacggtcgtcgccccgtgaagattcacaagctgcaacgcatcgagtggcagatacacacaaactatacactgcgaggcatcatctgtatgcggagcatgcattgaacaccgaaccgtaagggcatgcggtatatgtaccactgccaacctgaaataactctcgtcagagaagaagattgcagacgccttaagtacaatacccatatgcagagtaattagtgttatcggggccgctcgcaacatcgattaggcatggaggaagtgagcgagcggactcgga

SEQ ID NO: 53817 - DNA, 505 bp, Arabidopsis thaliana landsberg
  unsure (1)..(505): unsure at all n locations
ccccccccctcccacnnccccccccccccttcccccgggctagccccncaccacaccncccccccccccccccccccccccccccccccccccccccccccccccccccccccccccccccccccccctccacccccccccccccccccccctcccccttcccgcgtgtggccccccccccccccctcaccacaaaccccccccccctcccccctcccccccccccccccccccccccccccctccctcccccccctcccccccccccttcccccccccccccccccccccccccctcccccccccccccccccctccctcccccccccccccccccccctccctccccccccccccccccccctccccccccccccctccctcccccctcccctttcccccccccccccccccttccccccccctcttatccctccctccccccccccccccctcctccctcccctccccccccccccccccccccccccctccccccccccct

SEQ ID NO: 53818 - DNA, 592 bp, Arabidopsis thaliana landsberg
ttagactctagcagtgaaagaatcaaaactaatttttgctttatgttaaaaaaaatgtttaaaacaatagaagaacatgttaagttgcagtcacacctctttttaagcaatttatccggaaaaaaactttaaaattgtcatcgcttcgtctaatttctttagcttcaatgatttgattgaatagatagaccaaaaattatacactacaatatatcttttatatttgtaacattcatttatcatagaaccatttgtataggttttaaatttaacactgtaaacatgaaatatttatcttcttagaagaagaaaaaagatgccttaagtattatacccatttatagaaaaattaatgttatcggggccatttacaatatagttttggcttggttgtaatgagcgagaggaagaagaaacaaaaggaaaaggttaaaagaaactttggtcggattagtgtacctataggccatgcataggccatttgaaactcctttgcattcacgattatgatacgtgtcgtgtcttcgctcagctgttaccacgatccttttgtcctcgtgcccgtgacacattctgccgcggtaggaggaca

SEQ ID NO: 53819 - DNA, 529 bp, Arabidopsis thaliana landsberg
caggggaacatgctggcagccactttccttttttccgcaggcactgattatcagtgtgcaaaacaattttccagcaataaacggattcatgtattttggttgtttcatagaccttttccgggcagctaaagctgctttgatgcggggatattttcctgtttatttttccgggcaagcagttcccggtagcgctgttcccgcatctcccacctgaatttccggtagaaaaatgccatgaagaacgatatcgccagtatggcaaagagtaaaagaaaggagctgagccgggtattggcttccatattcgccctttcgtaccagccggcagacagcagcagcaggatgcccacgcctatggcaaaaccgcctgaaagccctataaaaaaaggcctggggctgtttttttctttctcatggttcttttcccagtattcgataaacgattcttcctcactgttcagcatgccgcaaagatacatgctgaaatataacccccggcaaagcaattaaaggttgcaacaatgtatat

SEQ ID NO: 53820 - DNA, 668 bp, Arabidopsis thaliana landsberg
aagccatctcctggaagtaatatagggtttccaggtgcactggtgagttaacttgtcaattttattaaaaatataaaaaaaacgacgggggagttaaaaacgtctgcggtgaggtggtagattagggcctgatcttggtgaatcgccaggcccttaagatctctaatgaaccagtgggtagagagacatttactaaaagtggaattgacccatcacagatacagagtcacgcctacagttggaatctttggtgttcagtgaaagactggagaactgagagtcgagatctttgctagtagcacgtccgcgactggctgatggtttttgagtttgttgttgttgctgatacaacgctcgtagtctcccaatctccttttccaacacttcttgttccactggataatagacagaactcatgaggtatacaatcttaagaactgttgaatcttgataactagctaatacttacaaactcatactctagactatagtttgaaccttaagaacctaaaagaaactgcgagaaacttacattgtttgataagcttctcctgagctatactttcgagacgcttcttgagagctttattccccatactcagaataagagtcctctgttatttaaaatcaagttcagctgaaactttggagccttctgcctatagtcg

SEQ ID NO: 53821 - DNA, 1492 bp, Arabidopsis thaliana landsberg
  unsure (1)..(1492): unsure at all n locations
ttaacatcggtcttggtgactccttcacgggactttgtgatttcgcctgaagaaaacaaggtcccccttaatagcttgtgagattaaattctgtgttcaaaaggaaacaagactgttgcactagttaggtattaagaacatgtttctttttggctttgttgacttaattagaccgatcaattgcatattcattaggtacccgtatcagagctcgagggaaaaaccattggccttctcttctccgtcgcctcttacaggaaatgcacagagtttaccccaaagcttgttgagttttatacgaagctgaaggagaataaggaggattttgagattgtgttgatttctcttgaagatgatgaggagtcttttaatatggacttcaagaccaagccatggctagcactgccgttcaacgacaaaagtggatcgaaattggctcggcatttcatgctgtcaacactaccgacgctggtcattcttgggcctgatggaaaaacccgtcactcgaatgtcgctgaagctattgatgactatggagttcttgcgtatcctttcactccagagaagtttcaagaactcaaggagatagaaaatgcaaaggtagaggctcaaacactcgagtcacttcttgtctcaggtgatctcaactacgttctcggaaaagatggggcaaaggtatagctctcaataccctcttcattttctaaacactgttcttcaaggctgatctgaaccaacctgtaaaaatttggctttctttgttaggtgcttgtttcggatctggtggggaagaccattctaatgtacttctcagctcactggtgtcctccttgtcgcgcttttacaccaaagcttgttgaagtatacaagcagataaaggagcggaatgaagcgtttgaattgatcttcatctccagtgaccgtgaccaggaatcattcgatgagtactattcgcaaatgccgtggctggctcttccatttggtgatcctaggaaagcatccttggcaaaaacctttaaggttggtgggatcccaatgctagcagctctgggaccaactgggcaaaccgtaacaaaagaagcaagggaccttgtcgtagcccatggagccgatgcttacccttttactgaggaacgtttgaaggagattgaagttaagtacgatgagatggcaaaagagtggcctaagaagctgaaacatgttctccatgaagaacatgagctagaactaactcgtgttcaggtttacacatgcgataagtgtgaggaagaagggacaatatggtcttaccattgcgacgaatgcgactttgatcttcacgccaagtgtgctttaaacgaggacacaaaagaaaacggcgatgaggctgtgaaagaaggtggcgagtccaaagatggttgggtttgtgaaggaaacgtatgcaccaaggcctgataggtagcttcacgcacagttatgtcactatgtgtatgcaaagctatntcctttcttt

SEQ ID NO: 53822 - DNA, 902 bp, Arabidopsis thaliana landsberg
cagtaaaaacattgtctcttaaatttcccttattttctgctgctataactaagagatggaatttgtaaaaccctttcagctcattcttttgccaaggcaaatgaatcagagaagccctttccactctgagggaggtggcaaagtccttcaagggaaaggtaatttttatctttgaattttctttggtcatttttgctcactttctggaataattaaaaaccacctggtacgattatttataagttgcgattgatatatatatatataccaaaaggagaggtggattataactttagttattgaataaaaagggcaatcttctcttttctctgcagtttgttttcgtttatgtgcaaatggacaatgaagattatggagaagcagtttctggattctttggtgttaccggcgctgcccccaaggtaaagtagttggtgtgaaatatctgtgtatcggttttgtttctgtgatgcacatgatacaacaaaccaaactgtgaaccagaagatctaagtttccaatctttccttgcgtatgcaggttcttgtatacactggtaatgaagatatgaggaagtttattctggacggtgaattgaccgtaaataacattaaggtaggcccaacattctattttctgtgaaattttatggtttcagggcgtgttgttggttatcttaacgcaatgactttgtttaaaaatagacacttgcggaagatttcctagcagacaaactgaggcctttctacaagtcagatccactaccggaaaatgtaatgcgtctgacatattttaaaacacatctaacatctgcacacaaaactaattctcttaaatgaaacgcagaacgatggtgatgttaaggtcattgtgggaaacaattttgatgagattgatcttga

SEQ ID NO: 53823 - DNA, 633 bp, Arabidopsis thaliana landsberg
gtcgactctagaggatccctggtgctaaagtttaaagctctcaaatggagagctaaagtttagtacatgagtagtgtttcgatacatgtgctaaagtttagcacatggatattgacagacatctatcgccctaattcccgcagggtggggagacacagggggtgagacaagtagtagatgtctttcttctcattctgcaccatagattcaaacaagccctttattggttctagtgactaacattgactaaagaacattaaatattgtgtataacgattaggttgtcatatttcatgcatatggtctagtttagatatcacaataggacattcctcgtcgcggaatgacttcccatccccgttcacgcagagagagaaaatcctcgtccttgtgctcacgaagtgcaaaacagtcggtcctgcacaaggaattttcccacgcgggtccacgtccaaggttaacattaactatatcatcatactatgcatacatgcactaattgacatagacacatattacattgtataacacttgtatttagtaaaggtccaagatataatacagttagaaggaaataattaatttataggaaagatgatatttttttagcatttcttggggtatatttatgta

SEQ ID NO: 53824 - DNA, 825 bp, Arabidopsis thaliana landsberg
tatttaaaattcgtaacttaaaatattgaaaaccttttatgtgtgtttgacaattgatttttaaaaaataaagataaataatattttcatatttagaaacaaaagtgtttggtgatagagatagtagaattaaaaaaagaaaaagtaaaatagttgaggaaaattatgggattccccataagtacatagactctcttttaaattatggaagataaagtgcatttaagattttagattatcatgaattcactaacaataaatcaacttaaaaacaagatacattacataagctagcagatcaacaaaagaatcaacatagatttaaaaagtaatattttgataaagaaattgtatggctaacatttaaataacatatttaacaatatattaaaataaaaacaagttaataaatctatcaatcatgatacatgatgccaagatcgaaagtgcatattgtacaagggacaagttaggtaacatgtgagatgtcaaaaaaaaaacatgtgaatattattgtgtttagtcttgcaagtcattgaattgtttgagcaatttatgttcacaagtaatactagcattaatcataaattctttgaaaattttcatcagattatcatttgattatactatttgattaatgcaattgtttatgtggactatcatatttaccttaaaccattccttatcttattcttttttttggtatcaagaccattcctctacatggttgtcttgcttcctcaaagaccaagaatgattatgtgacaagtagacgatctaaaatactttatgtaccacttgataagatttgatcgggtcgggttt

SEQ ID NO: 53825 - DNA, 934 bp, Arabidopsis thaliana landsberg
atttattcccaaagaatgtaacgggttacacgaaattcttgccaatacaattgtccacatgcagaatatttatgaacttttgacgtgacctattgtggacggtgtcacggtagtgtagttggtcctactcaatcttaataatatatatactatagtattcgtaatatcttcgttcatacatatcttcaatcggctaaaaacaaaacgtcttctacaaaatcggctaacatgtctatcagcgaaattaatactcaacattcattgttcattattatcaacatatcgccgaccttaagtactatttacaaactatcacaattctaatggttgtaagcaaatcgatccgatacttcgctagagtgatccgtaaggacgacgaaaacttctttcaatttttaaagtatttctatatcattttggtaaattccaccaaaaattcacaactcttataaatcattttgttgttgctccatttattgttttgtatcaatcaagtatttggatgttttataactacaacctagaactaatatctacacaactaatttacaactacaacgctaacaaaacagattcataagtacaactgtgagacagatttagtagaggtttgattcttaataatctaaaataaatgtgatattgtaattttgaaggatgatgtgtacaatgaatataatgatccatattctaaaacatattcaaataagtttattctaaatactttgtacatatatttaccttggtacgatgcatgaggaggagggaggtttccatctttatccatgaggatgagttcctcgggtcgggttcgggcataattatcgacccggtaaatcaaatctccattcgaatctatcaccgtgaatccttcacaactcaccagaagcgattttctccacaccgtgagtgtcgtacacgctcctccaatatc

SEQ ID NO: 53826 - DNA, 598 bp, Arabidopsis thaliana landsberg
tttaaagttttgggagagtaaggactggattggctcatgggaatggtttcttcatcacgcttcgagctcatttgcttgtgaagctgcttcatcgttctccgattaaagctcgtcgccggtgaaaatgagatctcagaattgccgggaagaagaagagctttggatctggatagattcaaacgtaagagcgatggtgaatgcaaaagtagttagttacacggcgattacttgatgcaatccttcgctctcttttttatttttattttgttttagttatagagcaaatatatatgtttcgcttctaaaatctatatgtgattatcagataatctaattaagtaatttcactaattgtttaataatatatgcaattttttatatatatattcttgaggggatcattaatgtgatttgcgtttgatttgtatattattcaatgaacatactcaaaactttaggcaaatgtggaacaaacaaaaaaaactcctcgacgcttacaaaatatgggcttttacaattggatcccaagtttggcccttaatagccacaatatgttagcctagagatatgtcttatgctatttttatttttttgaatg

SEQ ID NO: 53827 - DNA, 670 bp, Arabidopsis thaliana landsberg
  unsure (1)..(670): unsure at all n locations
ggagctcctgtgtgtaaggctgtaacatctctctcctgaaactggcagaatggaccaacctctccatctcgtgcacgtcaagattctcgccgcggaccttctctccttaaccgtacggcacacctctccgacgacgttcctccgctgcggccgtagggttgcgcgtgcggactcagtcggagtcgtcgtctcgcgtgaccgcagggagaagttcctccgcttcctggtcgacgacggcactgggtgtgnnnnnnnnnnnnnnnnnnnnnnnnnccagtacttgaatgctaggacgtcctctgggccatcgtcagaccatgatcctactgcagagatggcgctgaaaatgtcagaggaggtgcgtctaggcaccctcttgagggtcggagggaagatcgcctcgtatcgtggtgcgatccagattactgttagagatgtggttccggagaaggacccgaattcggaggtgctgcattggttgcagtgtgtccgcctggccaaggagtgctatgatctgccacacgttctgctcaaggtcgcacttgaatggggtttacatgtgtagtttgacgagtttactatctctgacttgctggagaaatctctctaagggggcgctaatctttgcatctttcgaaaccattaactacatgtatgatatggatttata

SEQ ID NO: 53828 - DNA, 1415 bp, Arabidopsis thaliana landsberg
gttgaaccgttctttgttaatctctcgaagctaatctagggattagggaacattcacaatgatgaattaaactttttcctaaacatgcgaaacaaaatattttggcacttagtttcaggaaaagattcacagtgatgaataaaactttttacaaacattgagtgatacaaagctttacaaaaagagggagaagaacacaactttcttaaccactcatagtaccctcatcttttcttcacactctctttctcatacgaatccaattagtaattcacgagcagcaacatctacgttaccagtcatcatcgagactagcccggtgaaaacacatgacagtgcaaatgaatatgaagaatgatgtgaactctatgagcattgcacctgtctcgatcatctgtgcgtgccttaagatgattgggatagcaaggcttcccacggtcgatgctccggtcaagaacttcgctgcgtctatccacctgcgttttatggacgagccaatttggtaatcgatctttcgtttaactcaaagaagcaataaagtctctagtaactaaccctccaccgtcccgactaataaggaattgggttgagcctcctccaaagaacatacaaggcataggcaccactacatacatgagtgctgatagcattggccaccagttaccatatatcgcgcatgcctgaccattatgaacaaatagttatcactatatctcccagatgactataacacgtgttactcattgcatggtataaccaggtataccaaaggaaatcacaaaatatgggaaacgtaattgatttgtaaatcagatgatcctttcttcttctaatcgaagtgcaaaaaaaaaaaaaaactataccctatacagggacctgatataagctgaggagagaagatgcttgagttataaaagttgttcagaaagtctaagtcaattaacaagttagacattgaggtcggctaaggaccccagcttaccatatgctccggtcaaatagtgttgtaaggataagaattctaagtgtaattttggtttttgggatccagagatcgctagtcaacatactacaagagagtaaagctcaaaacttcaaatatgaaagaaggtttgaatgtaacaaactttacttcacagagtatctctcccagtaaaacgggccaaaagactcacaactctgtttgctacatcaacaagggtacaaaaggagaccagtatactcagctcacaacctaacagcagaactagctaaccatctcttgcaggatttaaagctactaagtcatgatcttatgatcaagcttcaagggttataagcagatagctatattcaccaacgcaccaggatctgtaggaggatactaaatgaaaacatgaaagcaagtccagcaagtctgtgcaatcaagaaaaat

SEQ ID NO: 53829 - DNA, 758 bp, Arabidopsis thaliana landsberg
ggaaattgtaccggacgagaaaattatggaccaagacccggaaacttaattttgggtaataatgctagtaatatgcagagaagtaagtggaaaataaagttatttgtttgataaatgataactaatttcattgctcaaggtatacaaaaatcatcggaatcctatcttctcgcgaagtgacacgtgtcaaaaccatctcacactcgtccaaagtcagacgaaacatgataacatccccacgtaacatcttaagctcatcgtatctccaccacccaatctacaagccatatatacccaaaacgaactatacaacatggcccattaacgaaaactgaagagaacccatgttaaccgcagccggagacgatgaactggacccggtcgtgggaccagaatcggcaacggaagcagccactccaagagtgctgactataatctcccatgtgatggagaagctcgtggcacgaaacgagtggttagctaagcaaactaagggatttgggaagagcttggaggcgtttcacggcgtgagagcgccgagcataagtatagctaaataccttgagaggatatataagtacacaaaatgtagcccggcatgtttcgttgttgggtatgtgtacatagaccggttggctcataagcatcctggttctttggttgtctccttgaatgttcatagactcctcgtcacttgtgtcatgattgctgccaagatactagatgacgtgtaagtaagcctttcttgaatttctata

SEQ ID NO: 53830 - DNA, 768 bp, Arabidopsis thaliana landsberg
caaatccgaacccccagccgttagattcctgaaaacacatgacaagtaaagcttgtaccctctgccaatgcaaggatattttttatgaaatgagccttgtaccttgttagttaaatcgcgctttggctctttcgcttcagcaaccttaaactcccatccgccattgtcccaagggtcatcatctccattttcccgttcagccactaacttaactgcatctactttagcagtatcaaaatttggacctgttccatttatagcaggtgaactccaaacacctgaacttacatccgctgtattctggaccgctttctctcgttcctcctgctagaatacagatatgtaaaagcgcatcacaacatcttgctgactatgtcaaaatgtcaacgtaaagattcatctcccttaatatatcttaaaaaaactatacaaatagcaaaacattacaaattgctctacgcaacaagtacaatttcctcactagagaacaataagaaaaggcgtaagcttatctacaacataccttataacttccaccaagagttccaaacatagactcagcagtcttaaactcccaaccatcaagatcatcgtcacttttatcggcaaatcccaaatctgaataatttggatccaatgtgacctcaatagtacttgaattcagcacattgctcgccttgacagacctttctgtacccaaattcaaaggattcgtctccaagctaacagatgaattctcgattttacgattcgaactttgaagactac

SEQ ID NO: 53831 - DNA, 127 bp, Arabidopsis thaliana landsberg
agagacagacacagagacacacacatacacacacacacatcatatacacacacatacatacatatacagacagatacacacatacacacgaacatacagacacatacatacacacagacagacacag

SEQ ID NO: 53832 - DNA, 867 bp, Arabidopsis thaliana landsberg
  unsure (1)..(867): unsure at all n locations
atctatcgtctttcagatagtaaactagcctttttcgcaaccataacttaaactagtgtgttgtgcattaatcattatatacctaaactagtctctaaaaaaacattttaccacacttcggattacctttttcattatatattcaaaaactctataaagattattttgagattaatatcaatatagtatatacccgccactataaaatatcttattgttttcttctatacctatccaatatttatcagacttagtcttcagtgcacaagtcacttaactcgatacaaaaaaaatttattataagccagacttgattgaattattcattatcattataacaaccattttaggtctccactatagaagaagcaaatgataaagctgaatcatagaaagacttcaaaaacttaaaacaattgtccctaaattaaacataaaacaaaacaaagactaaaaatatgctatgtttagcgtatctatggtgatggggacgtcgagattttggtccaaccaagtgttgtaccaataaaagacctccatctattataccactaacgaaagcgacagtacacgtggagcctcttaacgccaatagaaccctacttcaaccacacaaaatagtactacaagtttatcaatcaatattatagattgtatctaaataaatattgtatccgatactatctttgattcgtctctactctaatccngagaccgtatagatgctatcattcgttttcgtttattggtatgctatctttttttatctcccgcacatgatagngtataatttattagcttctttttatttccttcaagttcaatgtgtaaatcgtttacctgaaatttaaatgctgaaaaggcaaa

SEQ ID NO: 53833 - DNA, 807 bp, Arabidopsis thaliana landsberg
cacatatgaattaaggtgtcttggtatccatttaaattgtgtttcctcaaacttctctttttccacaattcgcaaaaactactatttatttggtcgtctacaattcaaacagatgcattactatatattgatattgaattcaatcacaaacgatatctgaattcgaaatatctccgtacggaaaaaccagaaaagattaaaacctaaataaatataaaccaaaaaagatgaaaatatataacttaaaagaaaaaaaaaactataacctacaaacaatactaatgtaaaaatttgtaaaaattccatggaaatgtatattgccggcgaccaaatatcagtagactaatattgggtcgaaaccccaaaaaatattgggcccaaacccaaaagaagaacataccaacaacatactttccagtaggagaaagcacaaaactaaactttattgcagcgtactagacaaaacattaaacacaaacatagatttcaatttaattaaacaccctcagctgggtcaccaactagaccatgtaacagcaacatcatatgatgatatgggttgcctaccgagagattttgcttaggtacaacagctgaagcctgaagcaatcaagagagcaaattaatgtctcttctaagtttgacgtagttgactactggacagatgtactactgcatatgctggcctcatttcgcatcaaaatgaggtttgaaaacattagaggcgtatgagaatgtgaaaaataagaaaataaggctattgaacccatccactatcctttgatgcgctatggggataattaacac

SEQ ID NO: 53834 - DNA, 489 bp, Arabidopsis thaliana landsberg
tctctttcttttagttcctatcctgccggtgttgatgaatgagggttaatatagtaactttggcgttaggaactatagttccaaaacctttttctgaatgaatttactttttggaggtatgaagtcacagcttttacagattttatcttgcaaaaattctctccacatttcaaacgtctaatagttaaagagagcttttgttctttttttcccatgtctatcagtatcaccaccgagaaaatatcatcaacaccaccaaccaaacattaacccacccgagagtacccaatgccatgtactacttatcttcctcttcttcttctcctcttccttcttccaccaccatctgtacaaagcaaagttatcatcaaaggaaaccaaaccattctgagtttcaaagctattttccggcttggtttcttcagcaccacaatggtcctccaattggtacttgggtactcttacgcttctatgccacgtccacccacg

SEQ ID NO: 53835 - DNA, 803 bp, Arabidopsis thaliana landsberg
gttattagcttcaataatactaaataaaatgtttactttcacaatatgtaaccgattaaattcgtaaatattttgtacgaagaaaggacctcactcgataaattagtaatcactataaattaattatttttttagtctcgatcaatatagtatttaacataatttaataaaataataatttgtttggaaatataatgtaattatatagtctagtaatattatagattaataatcattatcataaattaatagaaacttatcaaacatcggaaattcagattaaaaaagaacaaaaatttagttgtattattaattattaaaaatttagacgaaggtatactagttttgtaattctattattattactctatagaattaaattaatagtctatagaatggtttgagtaaaccgagaaatgagagagagttctccttgaaccaaggataatcaataattgattcccggtttattcgtaaaattagattcgtatcaccgaaaccaattatattcgcaaaattaaaatccgatcaacataaaccggtcgggcaattccaattttgatgctccgtttattgagcgtttattgatctgcgactgcgagatccatcttcttcttcttctccttcttcttcttccaacgaatgttcctatgatctctgtgtatgaacagaatctgtaatcagatccattgtagagagagatagccatttcaattcgaggtagccaaagatgtatatggcttacgggtggctgcaggtgatcccgcttctacctggatcgcagcgagtcgtgtaccttaagc

SEQ ID NO: 53836 - DNA, 629 bp, Arabidopsis thaliana landsberg
ctagaaacgttttctggttcagaaattgaaccgagaacgtaagtttgagctaaagcggacaagagagcaattggaagcgttgcagaagaatgatatgaaactggatgttaaacattccaaggagatgtcggaggagctactgattcaacaggagaagtacgaagagatcttgaagaagaagaagttggaggagaagaaacttaaagattgtaccagagatcttgcactgagagaaggagaccttcgatgggtgagtatgcgaatgacaaagcgttgtgaggaactgaggtgggaaaagaaaaagaatcatgtgttatgtaaacgtaacgaggaagcagaaaggaagctgaaacacttgaacagagcactagaggagaaacagaaagaggtcgatttgattgagaagagactcggtgaatggagagacgtgaagggaagaggaaacggagataccagtggagatgaatgaagttcaaagagagcaactatgtaatataataggagaaaactagctcacattcaaatatttatatattacatatgccaacagataaatggagtgttcacaaactccatataaaactgatgataaaagaatttttttacatatttgacaaaaagcaataagg

SEQ ID NO: 53837 - DNA, 452 bp, Arabidopsis thaliana landsberg
  unsure (1)..(452): unsure at all n locations
ccccccccccccccccctctccccccccccctcccccctctcccctccttcccccccccccctcttccccccccccctctccnccccccccccccccccctcccccccccctttccgtgtttccccccctccccccccccaacacaccccccccccccccccttcccccccccccccccccccccccccccccccccccccccctcctccccccccctccccccttcccctccccccccccccctccccccccctttcccttcctccctccccctcttcccccccccccccctccccctccttccccccccccccccctctccccccccccccccccccttcccccccttttccccccccccccccccccccccccctcctctccccctcccccccccccccttcccctctccctccccctccccatcctccccctccccccccctcccccc

SEQ ID NO: 53838 - DNA, 920 bp, Arabidopsis thaliana landsberg
cgtagagagtaagaaaactatacgcaaagattcaagttctttcattttgaaccaattttctttttcaattaagttaagaaaatacccaaaaagaaaaattattgaataacattggtttagaattgtatcagatcagcttgctttttgaattgaatttttatcatcatcatcatcagctctttgagttgcaacattaatatggaaagcttatgttgaaaaaagtatatgtcttgagacattttaaagaaggttaattttcattaatacaatcaaataggttggaaattatggtgttgaatggggagattaaaatgcaacggttcattcatttatgtgggtcttgtggactatgtgtacaaaatattacttttctcatgtttaattctattgaagatgcggtgtaccggagaagtaaatcggagaagatagtgaagaagctaacaaagagtaaaacagaatgttaacaacttaatcatttacaatgtcattaactcaacttatatacttaagattaaaccaacatctataaccggaaatgaccaacatcaataaccggttatatctgcaataaattccaaaaataattacattgtgcattggggatgttgaaaaaatgaagattccaaaaataaaaatcttcctcatttattgatgcggagcagaagctataaaacaatagtggcgatgaagagatgttttgaaagcttaatagagagaagcgtgatgaagacgtgggctctgtttcacgaatggagagagagaacacgagaaccacggaacaaaacgaagaaaattgcaaatggaataaggtgagagtcctccttaaggtcctacacaaagacaagatctttgggcaatattagatcgcctctttttttgggttttcttattatcaaaatcaaaggtggtttacataggtg

SEQ ID NO: 53839 - DNA, 579 bp, Arabidopsis thaliana landsberg
  unsure (1)..(579): unsure at all n locations
cttatgaataaagcaaggttttgtttcttttgatctgcaggttaatggatccttggcacggagggcatcaaggatctgatggcaaaggggctcataaggatggtctctgttcattctagccagcannnnnnnnnnnnnnnnnncaacacatgatgggtgttttgcgtcttgtggacgttatctagtctagacgacttgatgttgctattatatcaagtttaatttaatcgtggctcgatcaatcttactgtcgtgttgaatgtcgaatatttttgagattattgtactattttaatatcatgttttttataacatttaagaccatgttgccatccaaattttaatcttggtgaggaatatcaaccaatctctgctctgcaattacaattgctgaagttgttgcgtgtgttattatgaattcagtgttacttgacaaatttatttacagtgttacctgagcaatatttgggtcatgcctatgtttatcaaggatgcggctttcgttgccatttatgctggattggtcttcggtacagcgggaatggcgcttgtgctagtcgaaatgtcggtgaggtgtat

SEQ ID NO: 53840 - DNA, 1002 bp, Arabidopsis thaliana landsberg
accgggagcaaccgatggacattgaagctcttcatataatcataatgaaaggtacttgtcgtgttacctgagttttacctttttagttggatcactaacccaaatcttccgaccggtctgttatgtttggtttaatttggtatattggagaatcaatgaattggtagtgtgagagaggagaggatggtagaagttaggtgctttgcttgaaagaggagactgtcactttacctaattcaatgtctaagtttggtcagtcgatctgttcttcaagcaaaacccctttaaagctgacatcccatttccatccatccatctgtttcttgttgataactcctttctcagaaaccactctcttttcatccttttcttttttaataattgtttttttcctatcaaatttactaagtagataaataccaaaaggaaaaacaaaattaaccgattgggtcaaaattatcgaaattggatgccgactgaatttttacattggaactagaatcttcccaagaaaaaagtgtttagtcaaaaaatcttatgattgaaacatgattaaggaaacttctacgttcatcttacttaaagttttttttttttgtgtgtgtgtgtgtcacgtattcaagttgtatttaagtaaaacttaaaactagcaaatcttaacttttaaattaagttcataccgctagtgtgtgtcattagcataatgcgttaccaaagttctatctcagactatgttttaagggtgatgattgatttagatatgatattaaaagattcgtttcgcatcattagtgcttttcttttgtcaaatgctgttcacaaaattcaaacgtaatgtagatggaaacgacagacgctatgtcggctgcgttcgacattagcagttcacaagactatattacctctcatgtgtttatacattatatatatttatatactacagtacatatataaacaaatgcataagaaaaagggtataattgatacttttatatcgaaaac

SEQ ID NO: 53841 - DNA, 571 bp, Arabidopsis thaliana landsberg
tacaaagcatccattatagatactcaacagagttttaacaactcataagcatcatcaaacttcaaagtcacattaagcagcaagaaagatcaataaatattttccaaatgaacaaaatggaagatttagaaatttgcaggactatcatcgagttgcttttcatcttcaatattaacctccaaaatctcagggatcctctgttttaagtagttcccaagtcgagctagaaccattgcacgcgtatgccaaaacttgcctcttaaacttatcgtaacgaatggtccgtctagttccactaactctacttgtcctgttatcccaaccgatgagtcgaagagttgtgctagctatcgtacaaaaccaaaacatgaatttcgatcaaaattcacaaattcggaacctctagtttagctctgtaaaaaactgaaaccgaacaaagattgtttcctctacaagcaacaatgctctgttttgtttttttcatacggaacacaatctctcaaaatgacctagaaccggttcggtgcggttacggtctcagttaattaacaggcaacacaagcagggataa

SEQ ID NO: 53842 - DNA, 500 bp, Arabidopsis thaliana landsberg
ccccccccccccccccccttcctttccctcccccccccctcccccccccctcccccctctcccctcctcctcccccccccccccccccccccccttttcgggtgtccccccctcccccccccaaacacaaacccaaacccccccccccccttcccccccccccccccccccccccttcctcccccccctccccccccccccctctctcccccccccccattccctccccccccctccccccccccccccctttcccttcccctcctttccccccctccctcccccccccccccccctccccccctccctcccccccccccccaccccccccccttcccctccccccccccccccccccttcccccccccccccctccccccccccccccccccccctccccccccccctcctcttcccccccccctcccccccccccttcccctttcctcctccccccccccctccctccccccctcccactcccttccccccccccccc

SEQ ID NO: 53843 - DNA, 617 bp, Arabidopsis thaliana landsberg
tcgaatatttgtcgtccattaatttatttttgaactaaaacacgacaaataaataacggagggagctatctatggaaatcccataaaaagtcattaaagatatggagcacagggcacaatacattggcaaaaaaacgacattgttttttctatcatacataggcacatacatacaatcattaaaaatgaatagccgaaataacctgaaaaggtggacatatcagttaggaggtggaggtaaaagaatagggaagggtgagtatagccctacagcaattttggagatatgtagaatccatcggatatcacatggataaggaagtttttagtgaaagaagtagatttttttaaaagcaatgcaaattgtcaaaagaatatgaggcatgttgttgtcaccgtacagaagaagctttgatctgaccaaggcaactcatgctgggcgcagagcagttgcgctacgacctccgactcctacccatggcccatggggtagcaagtcaaacccggcccagtcggcctccctgactaacccttcgtcctccattgtgacagtgattgcgtgtaggtgttggtgtctgaggtgctcgcttggtgaagaccagtacatgtgcttttat

SEQ ID NO: 53844 - DNA, 678 bp, Arabidopsis thaliana landsberg
  unsure (1)..(678): unsure at all n locations
nnnnnnnnnnnnnnnnnnnnnnnnnnnnnnnnnnnnnnnnnnnnnnnnnnnnnnnnnnnnnnnnnnnnnnnnnnnnnnnnnnnnnnnnnnnnnnnnnnnnnnnnnnnnnnnnnnnnnnnnnnnnnnnnnnnnnnnnnnnnnnnnnnnnnnnnnnnnnnnnnnnnnnnnnnnnnnnnnnnnnnnnnnnnnnnnnnnnnnnnnnnnnnnnnnnnnnnnnnnnnnnnnnnnnnnnnnnnnnnnnnnnnnnnnnnnnnnnnnnnnnnnnnnnnnnnnnnnnnnnnnnnnnnnnnnnnnnnnnnnnnnnnnnnnnnnnnnnnnnnnnnnnnnnnnnnnnnnnnnnnnnnnnnnnnnnnnnnnnnnnnnnnnnnnnnnnnnnnnnnnnnnnnnnnnnnnnnnnnnnnnnnnnnnnnnnnnnnnnnnnnnnnnnnnnnnnnnnnnnnnnnnnnnnnnnnnnnnnnnnnnnnnnnnnnnnnnnnnnnnnnnnnnnnnnnnnnnnnnnnnnnnnnnnnnnnnnnnnnnnnnnnnnnnnnnnnnnnnnnnnnnnntgctccgaatggttgaatttgcttcttacaaataataacgttatggggcaagaataatagagccataggataggagattgggcaatagagacaagcaacaaaatctaagatgtgttgcatgaagtgaaattaa

SEQ ID NO: 53845 - DNA, 375 bp, Arabidopsis thaliana landsberg
cctgcgtgaaggagctattcaacaataagaaaaagcccggacacacttgataacgaagaaacggaagcggataaatatcgcgtgaatggatactctgaaatcgaacgagaaaaattgaatttaattaaatcaacttataaaaatatgaaaccattaaaaaattaccacaatgaaaccattctttttgcgcaacaccgaacaattcctcaagtccgcgaacgggtttccccacccgctttccccggcgctatcggccccctacctccttgtctgcgtcatgcgtttcctttcccgtctattcccgcccatcttgggctgtttggctcgatgcccgacatccctggcttcttctcttccttcggttctcatcggcct

SEQ ID NO: 53846 - DNA, 1037 bp, Arabidopsis thaliana landsberg
aaaaagcagataaaatattttaattttcattgaaaattttgtttaatatgaaaataattcaatcgagtactatacgtatttttaataatcaagagaatcagctaagatataaagcattaatcaaatgtagtctcatctaataaattatcgaatcaatggtttaattaaagattttcgacaataaatcaaatctaaatgattacaatctctccttaagatcacatttgattagtgttttatattaaatcaatcaacaaacgatgtatagaaaactagttaattgttcttaaaattaattacattccctaaactggcgtacaaaatttccttattctaaaacagaaattaatgatttgctgaatttaacgagaatattaatattaaatacttttaatatatttcattacaaaaaaaaaaaaaaaacttagtgcccatattcgattctcgccacgtcagcaaacacctcaacaacggcaccgatttttctgtcctcttcgttcaagtcattccaatattaataaaaaaacaaaattagtaaattaaaatttttaaacgaaaaaaaaaaaactttggcctctccggtgactcttccttcttctgctaccgaacttttcgcttccttctctgaccaatttttttcaacaacctctcttcttcaacaaattctcttctcaaatcctccaaatcctctctgccatgaacgctactttcttcctcctctccaccaccgtctccaccgtcacaatcaccggattcaacggtctcgatttctcatcttagaaccacatgcatcccttctgttgcgttacaactgtctccgatcactctccttcgatgcctccgttacctgaaccacaaccgcctctaccgaattacgccgccgattttggttcagcgagatccgaaccgattataactcgatctgcttctcaaagttataatcattcaggtcaattcaataacaatcttattcatagtctctcgtttaatcatcaccagagtgatgtaacgaatcgattggggcaacgcgttttagc

SEQ ID NO: 53847 - DNA, 566 bp, Arabidopsis thaliana landsberg
atgatgatgaatcttgaattgatcttcttctcgaaaacatcattgcttctgcttcttctcttccatttccatatttacacttcataatatctcttcacccacttctcttcttccccatttataactcacaaatatatacatactcttacatttatatatcttgggctagctaagtagctatagtaattttctaatatctctttccatttcttgaaatggtcctcctctcaccttaactttataagaatctgaccacctctcaggtttccagtttcttcactttctcgttctctggacactgaatgtgatacatatatagaagaagaaagctataagagattgatcgatggaggtgaatgttcttgcatccaagagaagtcttctcctttttcttcttattgtaagtctctctttgagccagaaggtcagacatatctctgcctttaacgacaccaaaccatacagacaagtcagtagcttgagacttgcgagcatccaaaagcacttgaacaagatcaacaagactcctgtcttcaccattcagagaaaatatatatgtacatgtt

SEQ ID NO: 53848 - DNA, 1069 bp, Arabidopsis thaliana landsberg
aacaaaatattaaaacttttaggttaatcagaaggttttcttaatgaccagtgagttcaaggttttatgaccatccataaattttttctaatcatatcaaagagatcataacaggtaaataacatttgtgagtaatttgttttctgaaagattcagaactgaggtataatgcctatgagatctgagtatatttaaaatcaatcttatatgatccacatctctttaaaatgataattaaaagtttaacaaatatcaaatcccaatattttcaaaacatttaatctcttaaactctacaaagttaaatctcatgaccaaatatatacgcttgacctcagagggtctaacataacagttacagatctctgtactaattcgggctcgatcgatcagtctttattgaagcaatatataggattgttttgcagagaaaatgtgatcaaaaagctaagagtaggaacaagaggggaccttgttttcagctacattaatggagtttccttcacaaaaagataataaatagggctcagaatctcatattttcttatttattgacacctaaataaatgtaatagtgacgactctccatcctacacatttagtccttactgataaactaaaaattacttggcgtcaaaaattaagtgcactatatagttcttatacaagattgtaaaaagttattattttttattctatggtatttcataatcaaattgttaaaccaaaactcaaaaattgaaccgaatagaactccgaaatgacattctcacaaaaaaatcgtttgaaagaagacaactgaatgagttggatgaacgcattaaaaaataacacattcgacgcatgatacctgattattctatacagaaaccaaagcaaatcgaaacatgtgaacaaaaaacataacatctaattataccacaaatccttttatttatgaaatggcacattacacgaattatagtatacctaaaaaggtggaaatgttatttaattcttgaacatacgtgataaacaaagagggttaataaatgtgatctcgcttgtgacaccaactacatatttactcg

SEQ ID NO: 53849 - DNA, 817 bp, Arabidopsis thaliana landsberg
ataatatacacgaaaggattatgtcccaaaccagaataaaataagggaataaacaaaaaaataataataataacattacttaattggagattaaaaaaacttagattttatcaggaaaatataaaagaaaataaaataaaaacttagatcatataaaaaaaacatacagaccttcaaattatttacttttcttaaaaattaggtcctttttcccaacaattaggtttaaagttttggaattaaaccaaaaagattgttctcaaagatacacaaatttggtagataagtttccttattttaattagtcaatggtagatacatttttttcttttcttaattagagtagattaaaatcttttatgccaagtattgataaattaaatcaagaagataaactatcataatcaacatgaaattaaaagaaaaatctcatatatagtattaatatcctttatatatattatgattgcttattcttaatgggttgggttaaccaagacatagtcttaatggaaagaatcttttttgaactttttccttattgattaaattcttctatagaaaaggaagaaattatttgaggaaaagtatatacaaaaagaaaaatagaaaaatgccagtgaagcagatgtaatggatgacctaatccaaccaccaccataggatgtttctacttgagtcggtcttttaaaaacgcacggtggaaaatatgacacgtatcatatgattccttcctttagtttcgtgataataatcctcaactgatatcttcctttttttgttttggctaaagatattttattctcattaatggaaa

SEQ ID NO: 53850 - DNA, 1232 bp, Arabidopsis thaliana landsberg
  unsure (1)..(1232): unsure at all n locations
ctcgcagtttcgtctgttatcattgatcatttcttaaattcgcataagttttgatcgtccaagattaaaaattaaacaacgaatgggaaaatgttatatgtaactactagtttcatcattctcttgcacaagaaaggttcatctatgcataaaataatttgttctgaggtaaaaatgtaccctgaacctcttttcaactttcttaaaaatcctcattcaatgcctaatcttttcctctctgaatcaattaacctaaagacatagacatgaatttgcaagaaagtaaataaggtgaaaataactgtccccaaaacacagcaatttggcaaaaactttggcatgagactcgatccgttgctcggctaatacaaattaatcatcatgagtcgatctcacggcttgggagtcaatcagacaggaacagacatgcctttcttggccatcccatccagaatgtcattgagagcttggcataatcccgatatctgcacagattccacttttcggtcatattccacgccaataaaacaaacaatcatatatagttgctctaaagagacaaagagtgggagggagagatagaaaacctgttgatcccattgttgtagttcctccacgtcatcctcaaaatgaatcacagcctcctcctgaacagtaacataaaatattaaaacacgtctaggaacctccttctagaaaatcaacactaacgagaattctcttcagggctcttacatagctcaaccaacaaagtattttttattgcttacctgatctatggaacccctcattcggtcttgcccaatcatattagctgctatcttctccgcttttcttggatcaatcgccaacagagttcccaattcatcaaacctaggatataaaatagttgagaaaatcaaacaagtctagacacacaaagaagatactaattcgacatctcataccttatgtttgtgtagagtttgcttgcactaagaaggttatgctcaatcatagcacggtcaagaacagtggatttgtcaggcaaagatgctttctgttgaaatcaacagtgtattaacttgttatgaacctacttaccaactcagatgttatccaaaaactacatctaaatcttaattcacagtccatacctgatgtggccttagttcttctgaaaaggcatcaatctctggtctccttaaaatcctttccagatacacctataaagntgcattaaaaaacaaaaa

SEQ ID NO: 53851 - DNA, 1344 bp, Arabidopsis thaliana landsberg
aatctcccttcttctttccataatctgatttggtttatcgatcatcaatttccatgttagtcttatttactggtgaaataattctattgtattcaacttaatcaaataatacaaaggagaattatgggtcgttttcttaccatagaggggacagagaaagatgcagccatggctttaacttttataaattggaaatgatattgctttgttaggagctatgaaattagagaagcttcaagcatatttgctcttcttccctatcatctccttatatactaatttctgcattggcaaatattgctttcttatgaagtattagattaaaatattttaaaatttatttctgatcaaaaagaaactacttgtgctgatgtatatatcttttttccaagttggactaaaattatatttttttcggaaggtaaatgattgtgacacgtatgagggcattatggcagaaacgaattaccatttgacatcttcattgtctcgttcatttgatgtcattaagaaaaaatgtgatgtatatagaatggttcgaacaattaaagagttgcacaaggattttagccatataatgaatcgggtttaagaaataatcgtagattctttccaatgggtgtataatataggctaggtagcctcgctctaatagaaaggaagctggtgcaattaagaaagaacaccaattttttatgtatcatcctaacaatctcaaacgtttgaacactaaagcctcaaaatgtagatcaattgtgacataatctgcagctattgatggacattatacttaagagtaagagcattatacattttacttgaaacaattgctatacatttaacttatcatacatattcaatcattcatacacaatttatcagcaacttcaaagtgaaataacttttacaaggaaatgtatttaaaattttacgtatcgtcattttttctgtcaactatgtattttatttggtgattatatattaatgtgggtaaagttttaaaatcgtatttgaacactgaataaattttaaaataaacagtttgtttcccgaggaatatagataaaccctatcttgctttgaattgagtcgcagattgagattggatacgacttggcaatcctatctttccattttgttgctgtcggtttccttcttcttttatttgatcttgttttcttttgagcctaaacattttgttgttgtttttctcggaagcgtttttttttttggtttacgaaaactttacatctatggatggaatttgattcccacacaatgggaattatttttgattagtgtaaacaaatttattagagattgtcagcaaagtgcatgctttat

SEQ ID NO: 53852 - DNA, 1161 bp, Arabidopsis thaliana landsberg
acttcatcagtcaatcctcaagcaaggttgcaagacgaagaatctttttgttggcatcatcagtccttgcaacaggaagcttgtgtagtaagctagcatatgttaaagtagcttaaaattcttacaaatcctgaattagggtttagcaaatcaaaataagaacaagccactatcaagacacatcatatgttaaagtagcttaaaattcttacatccttgttcgcatagctctccagcgctacttgtcaaagaaactattctgatgaagggaaataacatgagccgaaacagcaacagacttgtgagaaacattcatagacgactcatcatgtggagcaaatttgaaccccattgattatgatttatgatgatttggcctgaaagtgaaaaccatccacatgaattatgaatcaaaacaagatctaataaacctctaaatctaggagggatacagtcgtaatattacaacacgaggcctaggtatgcgattgaatcaaacaacacaaaccctagtgaacgagaaaaacccctaaacctataaaatgagaatgatcgatgtcgaaaacactcatagagagaatttcaattcgatattgtcacggaacaatggatgcaaaaagaagatttgtattaacacacaatcgaataaaaccaaatctaattaatccttaaaacatattcacttgaacaaaacaatgaatattggtttgataaaaccaaaaatcaattggacttggactgtatcgaattgaaattcaaaccctatttacatttgctttaagattttacattttaggactctttttagcctttttcttattaattgtttcaacaactattgtagccttcttctattctatattttttttagaacaaagacttcatttcattaagttaaacggatatatataaaaatttctatagagagccaaacgagtgaacttttatggaaaaaaggatacattctatgtaaatatacaattttttttttcaacaactattttaactttcttctattctttttattttttgttttacaacaaaaaatctagtttattaagtccacggaaagccaaacagaaacagtaaactttcatgaagaaaaaaagtataggttttcgtctttctaaataaacatgcaacctagaaatcgttacaacg

SEQ ID NO: 53853 - DNA, 376 bp, Arabidopsis thaliana landsberg
gagtctaccaggatactaatttattatttacaacattaagtaaagcgagataatcaaatctcatttaataaagtttcatcataaatcaggaggttgaatgtcaaagtggcgttggataacaataattacaacgaaagcattgaaataagtatgatgtggtctaaagatagacgagtacatatcgcacatctagcgtaccgggtcaaatcccgttataagcacattcgtgtgccgatggttccaaaacataaccacggcagtataaatagcagatggtgtgtcaagccagtctgaccccatcatgcatggtctacacttttgaacggttgactcacgtcaaggttaatcgaagtatgagtatacgtagtcaattctg

SEQ ID NO: 53854 - DNA, 423 bp, Arabidopsis thaliana landsberg
gatcccctttaaattccttataagtgttaagaaatctcgattttctcacgtaatagttgtaaagccaaatccgtacaccacgactcttacgtaggtactattaccaaaaccgataatatattatagtataatattctctatagccatatacttaattaatttacaaaagcacactcttctacatgatagcgcaagaattagggttctcgtcgctaaacataatagtgtaagagtcatcgactgtggtctcgtttactgaggccgtgtcggagacttaccgaaccatgtttggtggcgtcatctggtcatacgcctgagatatgtacggattcgtcaccattgtgtaaggcacgatacggacattactcgcactgacggcggcgctgacattggcagccatcccttatcttccttgggtctata

SEQ ID NO: 53855 - DNA, 1551 bp, Arabidopsis thaliana landsberg
  unsure (1)..(1551): unsure at all n locations
cttttcatttattaccaaaaaaccaatatttactctcttcattgattcaagactattaggcacatgacatcttataagactatatagtctacatgctatagcttcatgttctctgtaatgtcaagatatcctatatattatgttacagtgaggtaaacatgttgtagaaatcatctgacgcaagagagggttatgggtttacgtacatggtacatccattagcgggttccgaagatatcctcatgggccatatcggcccaaattgacctggaaacagtgtgtgctcaaataagacaagctcgtatgtatctaatttattgtctagtttgagtagatgaaagatcgttgttttgctgttcgtttgataatatatatatgtttgaactgttagttaacgaagctaggcagctcgtggggaaaagtcgactgtgaattagggttttaacacgtctcatttggcttctttgtttcatcaataattaatattttccttgtggaaaaagaaatcacttttatcgattgttttgtgttcgctgtacagcggaaaaaggttggtggttgacacatgtgttgggatcttttttttttggaactgaaagatgacagatttatcatcatcaaacatcttacatccatcataaaagaagatcagaatcatttatatcgataggcaaactcttctatcattcttttgaggcagaatttaggtagaacgggaatatttggtttgaatgaagataattaaacctaacttgaaatatatagaattttacagaatcctactacttaatgattatgacatgaaagccgttgttagccactaatataagcatcgttagcttaccttaaaatgttttaattntattttctttttcagtaatggtgggtgaatggttatttaatagtttaatcatataaatttgaggtagtacgaatatattcttaagcacattaataaccaaaaaagagtagcaaagaaagaaagtgggcatccaactatgggattaggcaattagcaaacaaaaagtaactatgtgggttaggcggtaaataatcatctaatttatattttactaattacagtttgtttttgccttcatagataatcataataaatagtctctggctcatcatcttattattgcaattgactttcaacacagctatgataaaatatattttttcctacgttaaccaatcatatcatcaatatgatccaaacaaaaagtatttctctgttgccatcggcaatgcgctaaatgaatgtattccaaatactacataatcgtattaacaaataaattaagccagcttaaagaggaacagtttttgagaaacaaaaacaaaaaaaaagaagagcaatttaattatcaccaacgtaactattttaactcgtttttttttcgggtgagaagagcaatttaattatgtagattaaagatgagaaaaaagtatttttaggaacaaaaacttggactgagcaaccatatcgggtctatcgcaacatctgtacttctacgaattatagtgtaaccaaacacgacataatta

SEQ ID NO: 53856 - DNA, 844 bp, Arabidopsis thaliana landsberg
taagattgatgaccaatattatatatgttaagagagtgatattaaacatatgaatgaaatagtaagattagtgtgcttttaacaaacaaacaacaaaaaactagtgtgtattccatatcttaccttaattactgtatcgtatcagggttttgtttttggacaaaatcgtatcagattttcaagatgtcaaagtttactatatatgattttttcccgatataaaataaaatgtgtaggcctaattaggaaatattcttttgatctttattctttatacgtatacattatttttaaacagataatcaatgtgtttttacataatggataagataattcaaaaagtaatgtgtaagtacatgaattcatgtatatacataatcaaactttcatgtaaaactagatcattgtatgtgtttaactttccatgtttccagattgcatgagtagtactagttgcgagcttgtgaatttatctatccactaagttataaaagagacccttcaattcccaccattcagactaacaaatttccgtgcttataaagacacacaatccgggatggcggattcgatcctataccctaataccaacctgaaaaactgaggcacgttgcatgaatgacctgctcccgaccctgtctaggttattcaaaagcaaacggttagcattaaacccacatgcttcaatccttgtggttaggcatctaatatgaacactgaaaatatttagatccttaacttcttatgatgtctgcacgattttaaccttatccgttccactttcttcacacaactaatatagcatcctccactgctgatgtaccaaactgggtttatacataat

SEQ ID NO: 53857 - DNA, 1094 bp, Arabidopsis thaliana landsberg
tttctttttcacatttcgaggtgaactgataagtactcttagcaaacacaagggacctattttttcccttaagtggaacaagaagggggactatcttctaaccggtagtgttgatagaactgctgttgtttgggacgtaaaggcagaggagtggaagcaacaatttgaatttcattcaggtgcaattttatttcttttttgattaaacatcaatttgaatcaatttctcatgcatatgacatggaatgaattttttttgaaaataggtccaacacttgatgttgattggcgcaacaatgtatcttttgcaacgagttccacggacagcatgatctacttatgtaagattggagaaactaggcctgccaaaacctttactgggcatcaggtttgtatctgtcatccaagtttctcccatatcgtatcagtatgtttagttttctcagtcgcaagtaacaaatgtctggtactaaccaaacccatggcttccataatggcagggtgaggtcaactgtgtgaaatgggatcctactggttcattattggcctcatgctcagatgatagtactgctaaggttctttgaattaacttgagcatattctacatttctttaagtttctctctgcctcttttaatatatgtatattttttcttcagatatggaatataaaacaaagcacctttgttcatgacctccgagagcatactaaggtaaatccataaatcctcaaaagtcttaaggaaatttcaaatatatttttggattttgaatagcctctaaagatggatattaatcttctctttaggaaatttatacaatcagatggagccctacaggaccaggaactaacaatcctaacaaacagctaactcttgcaaggttacaacacgctttaaacattgaatactttaaaaacaaagcgtcattgtaacatatcattcatcatctctgtgttgttgttgttgtttgaatggaacagtgcattatttgacttaacagtaaagctatgggatgcagaactcgggaagatgctctgtagtttcaatggacacaggtcaaagttaaacctcaatgtacttttgcggggtttag

SEQ ID NO: 53858 - DNA, 829 bp, Arabidopsis thaliana landsberg
tagtggagcaaaaaacagattcccataaggcactgggaatatttatggttttgtgtgcaaaatgattatgatacaattacattattttatggtttttagattttaagattggtttaagaaaacaagccagtctttccaatgcctattctaagtcatcggagaaattataagttcgttgttatacaaatcacttatcgaacgaaatggatgttcttcttctgaacttttttttaccccgctgatattgtttactttggagtttggaacatagaaaaagtaacaaaacaatacgagtaccttttttaactccttttcattgctagaataatcatacactgtgagcaaaggcattcaccaaaatttaaacaaaataaaaaaagaagacatatttgagtaatagagctacaaaatgattagcaagcatcaaaagatatgcgcagagagaagatattgttcattgttggaacttggatcatccaagattgaaacaaaacagaacaaacacaagctctctcgatcaggacatgctaatcagactctgaatctgaatcacttgcgttgtaacctgagaaatcacaaaaaaaaacaaattcatatccaaaagcaaaaaagaaccaatttgttgataaaccaattttgacatgtaataaaacaaagacctggtcgtttatctatcactttccacactgaagaacgaactcttgatgctttcgtaatccaaagtctcccctaatcatttataaaacacagaatcaaattcaaaaacctaaaaaagaagaaacttgcaaatcaatctaatcaaagttagagaattttcaaatcaaccaaa

SEQ ID NO: 53859 - DNA, 278 bp, Arabidopsis thaliana landsberg
  unsure (1)..(278): unsure at all n locations
atacccgcgacccgcgtagccacaaacccgcgggcacataattatacacatatatttatacatatatcatctatatatacatatatttatacacagatataactatacatatacaaatatgtatatatatataatatnnnnnnnnnnnnnnnnnnnnnnnnnnnnnnnnnnnnnnnnnnnnnnnnnnnnnnnnnnnnnnnnnnnnnnnnnnnnnnnnnnnnnnnnnnnnnnnnnnnnnnnnnnnncgcaccgacttttgcacgcacgggtatgacatt

SEQ ID NO: 53860 - DNA, 857 bp, Arabidopsis thaliana landsberg
aagttggaatgtttttgattaaagtaggtgatgatgaagaaacaagtggaaattgtgttgtggtggtttttttaagaagaatggagtgtgaggaggattctttaaaaggtggtgctttctttgcaatgaagaaggagagaggaagctgccttctttgtttcctctttccattttatctttcttggtctttttttttttattatatttttttggaatactttctttgttcttcttgacgaatatggatatgttttaggtcaaaagtcaaaaggttgaaaccaaactttcaaaggtgagccattgtcgctcttgtgctgactcttctactcgtatacaaggaaaacagctgattatgcttctctttttttggtcaaacaattgattatgctattaaattctcctttcatttaagaaaatatgtttgttcgttttaaattagtaggtttgaagtctaataattcgattatggaaatagttgtgggtggaaatggtaaattttggagttggggggagttaaaagaagaattcaccacttttaatttctcgactcaaaattctgaccgattaaagacggtaacacttcaatacgcgtgtgcgtgatccacccacacacaactagcacgcgcttttcaagagcacgtgaaagagacttttaccagtcaactttaccacttgcttgcttcgcctgtttttattttgtttacatgattttaattaagctgtctatttccatcaaaaatcctagccaaactcaaaattaatggaggcagaaagattatcaagcaaatcccataccattaggagattaaaaaaaagtataaatgttgtgagaaatttagaaaatcataaaacagtaa

SEQ ID NO: 53861 - DNA, 642 bp, Arabidopsis thaliana landsberg
cggcaggtcgactctagaggatcccctgagcgtcgaagagattaaagtatctcaaaccattaccagaatcaaccattcctggattctctctaagcaaagcataatctaaaggaatgacgtcagagtttccttcataagcaaagaaaggatagacattgatcataagtcttgaaccagtttcacgtaagaagtcaagcattggtttgataacagagtcgacaagttctggtcggaaagaaccggagaagaagggtaagagttttgaagagcgcttaaagcaagaggagaagagattttaatgtcggagtggagattgaaactcataagagctttgtgaatgtttctcattgcagggatcaagaagcttgtagtgttgtgtgtatcaacgaagacttcgttaccaacagctattgattcgatctgtgttgaaggatgataagctgctacgttgcgtttgacccatgagacggcgaaggaagttcttttggcggcggagaagagtaactcgttggggagatctacggtgactttgattccagatccggataatgctttgagaactgatgggtctgcgtcgaagattttgactcgcgtgattccttgggattttaggagttggactactttgaatgcggaggggag

SEQ ID NO: 53862 - DNA, 733 bp, Arabidopsis thaliana landsberg
  unsure (1)..(733): unsure at all n locations
gagttatctagtgaaaatatatatatcctagttcatgaaaaatgaaaatcaaccttcttgagtgttatacttctttttgtgaggataataattgatatatacggcgggtctctcgttgacttttgatggtgatttgactttgcaatgtcaccaagagcaagtagctaatttaaatcacttttaacttccaatttgtttatgtttggtcttcagactttacgtcagaataattatttttgtgtctttaaatgaaaacttcaaacttcatcacatcaaaaatctcaaccccatttttagttgtcttctttttccttgtttttcaagaaaccagacgaaaatggaagagtttcgttttctctatttgaaatattcagcagcatttgcattgtgtctcgtcgtttctgttcttgctcaagaccaatcaggttttcttaactgattcatttatctttcaaactattttctagtgaagaaagtctaatcctttattcttttcataactttaactcgttgcgtgatcacaggtttcataagcatcgattgtggaattccaagtggatcatcgtacaaagacgacacaacaggtataaactacgtctcagattcatcctttgtcgaaaccggagtctccaaatcgatccctttcacagctcanagacagcttcaaaacctgaggagctttcccgaaggttcaagaaactgctatacattgattccaatacaagggaagggc

SEQ ID NO: 53863 - DNA, 491 bp, Arabidopsis thaliana landsberg
  unsure (1)..(491): unsure at all n locations
ccccccccccccccccccccccccccccccccccccccccccccccccccccccccccccccccccccccccccccccccccctccccccccccctcccccccccttcccgaagtacccncccccccccgccccccaaaaaaaaccccaaccgtccccccccccccccccgccccccgggccccgccccccccgngcccccgccccgcccccccccccccccccccccccccccccccccccccccccccccccccccccccccccctccccctcccccccccccccccccccccgttcctttcccccccccccccctccctcctttccccacccctcccccctccctgtcccccccccccccttcacaccccccccccaccaccccttccccccccccccctcaatccccccccccccccacccccctcccccctcccaccccccccaccccccacacccctcccccccccctccctccccccccccctc

SEQ ID NO: 53864 - DNA, 1039 bp, Arabidopsis thaliana landsberg
atatatatctacttatttaaaaagcaaaaaagaaccttaattttttgttggggatcatttcaagagaagatctgatagctacagagagattgagtgagaaagagagagatttaaaatggcttttgagagagacgaagagacagaggtcgtgataaacgatgaagaagaagaagaagatttattttgattattaaatttttgttggaaaaattcgtttttggtgagaagttacagttttgctttaaggagtttcagtagcagacaaagatccttagaacagaaagaaacaaaaattaattgctgtctttggtctttttttgagttttgtaacttgtaaccactaaaaaaaaaaaaaaaaaaaggcacagtaaccgatttcaaagttttaagatgatgaactcaattcggatctgttttctcttttcttttcttttattttattttgatattaaatttctttttttaatgttgaattatttttgccaaacaattctgaaataataatgattaaaaatgataatattagttttttttaatggatcaaagaattggggcgaattttgttgtgactagtgaagattttatttttttgttttttgtgatgaatgtttgtttattgacttactgatagtgacaataactaacaagatttttcgatttaagtaattttgtcttccacaaaagattgaacatgtaaaagatactaatctgttgtaaaaaaataggacaatactaggatctaatctagatggtataccaccagataagtttgtatttttatatataataatgttcaatttttatatggacaaacacattttatgcagcttcgctttaacagtctcaacttgactgacatttgatatatgagagttatagtgcagagtttactttgagttgaatggttattataaaatttaatcagtggcaactggcccactggccagtgtgtaacaacaagcaaagatccagaaagattgacacattaaaagctaattaaattattcgaacctaaattttctgttcagttttgtttcac

SEQ ID NO: 53865 - DNA, 387 bp, Arabidopsis thaliana landsberg
aaactacagtagcactaagccatgaccagctgctgcgtagattgaatccgaagatgctgctattctgtctgcagaagatatacttgtaacagtatatgtacaacacttaagatagattatgatcttcatacacacctatgacgccagccatagaccctcaaaaactagacaaagaaaacggagtggagtacacactccctggcaagccaccaggacacccaactcatgaagatcagatctcagtagtatccatcaaccccgacgtcctatgcaaacgttggcaaagaggcccagcacattatcctcctcaccacagccggccactccatccgtggcatgctgcagctgctggtagatgtgcataaacacagctccgtgtagacggct

SEQ ID NO: 53866 - DNA, 631 bp, Arabidopsis thaliana landsberg
  unsure (1)..(631): unsure at all n locations
ttgaatgatatatatgacaaattagtgatgaattcttatttggacagctaaagattaccaacaaggcatcaacaccacctgcagtttgaggtatttaacattcaattgaaatcaatggtgaagcattattgtttgctgctgtaatatcataagaaacatgaacaaccactgattattctaattaattttgatcacaactcttttcaggtaatgcatggtgtaaaaagctagctacttgaggacaagctgacatgcttcgaggacaagctgacatgcttcttttggtttcaagttcttttgtgggcaactttgtatctaatagtcatgcaatgttgcgcagatcgaataggcatgatggaaagcttttgtaatgtctaacccatatactgtctctgatgaccaattgggtatatttaggaatgtttgtagcttatgactacaactcaattgtggatgtttaagtgctgccgatgaatctatgattatttgaaccttgtgactcattcaatctatgtgttatgtgtgtcgtatgtttcactcagtatgtggtagattataatcagtgataccaattgtgaggcttttttgtatggaatgagactactgatatagctactgatnnnatgatagt

SEQ ID NO: 53867 - DNA, 641 bp, Arabidopsis thaliana landsberg
ttgcagttcgactctagaggatcccctgaagatcttccgagggcaaccaccgaacgcggctccaccattgcctcccatgcatcacggcgcacggttccagttccagcagcagcagtgaaggcgcgtctacaagaggtgtacgccagattctcatccaatggcaaggtcagcccccgttagcagcaacatgggaagacatcgacgacttcgtccagcgttatccaaagttccagctcgaggacgacctgttaatcgagggggggagagatgtcatgtggggcaaacggtattcatgtaagcctgggataagggatcgatcaggccagcgcaccagggtcgatcgtcagggataagtcatagagtttagtaggagtcggtttggataagtacaggagaataagattagatgagagtatttaggagacttgtttagcatgagggctatatgtaagtcgcatggcaacagagatgaattaggcaataaatcatattatcttcctcacctcctctccagcaaaaatagttagtcgaggggcaaaacctcgcgttgccaatgtcgggggttacgcttcacagcaagggtcacagtgtgagataggacccatgcccgtacagggatggggagtgtataatagactagt

SEQ ID NO: 53868 - DNA, 619 bp, Arabidopsis thaliana landsberg
gaggatcccctattttttggtcactatcatgagtttgtgttaataatttgaatactaaagcatgtggtaggcaccattatgtctaaaattcctatacatattgcttatgattgtttgaggattacacctgtcttgagtttttatattaataatctgaatagtaaggttcgttgtaccttgtaacacctgagttttagttgttggctctaaactctgaatttttttttactaaatacaacattagatgtaattttactactgtgattaagttgtatcacatattcacagtactcaagcaagtcaattacagtgagcttttagtcatgaatttacagtagtatatgaaagatcattcttgaatttttgcctttaaattgtcttgttaaatcttgtatactacactactaggtgagtgttcgtgcgtcacaggcccgagtttctcttcaacgtcatcccggatggctcgtagatgtcgtcctttatcttataacagtataacacatatttgtagatatataagtctacgagctattagatgatcctgttgcaacgatgtggactgagctaaatacataaattacaagcacgcgtacaggagtatccttgacagatgaatttg

SEQ ID NO: 53869 - DNA, 781 bp, Arabidopsis thaliana landsberg
tctgaccatgcacaaattttccctggtaaattccctctttaaacggtgtatagtgcagaagttatgttatcgcctttcccgtgtcccaaaccatgtacatgctccataatgaagttaaactcacatccataatgaaattatttattgaacggcctatatttattttggtatgagtttgatcttgattagtaaattctgtcgatattagaatagtcttttatattttgcaatttttttggccattcacacaattctgaaaagttcatttacaattcaataccattttgtcatgtattcacaaaaaaaaagggaataaaataaacctatgttacaattccattcaacctatgtatctaatttcaactactggtgttccattatagtactatcaatcaaaatcaggattgctacttttccaaatccttttagtatttcttggttttttaagcaatggcttttagctttttgtgaagggaaaaaaagggggaggttgtaatatatttggactttggtatgagaataaaatattccacgattccaagccgtccaatccatggataagaggacacgtggcataaacttacgtatacaaaaaccgaccaagccacccaaacacttgtcaccttcagccaaatagtaaaatcatttttagttttatttttcatgagtgcaataattgcatgcccactcccaatattcccgttgcgttacagtccccacttccacctctcttggattattaattttgaaaccatttgtctctttttcttttttgacaaag

SEQ ID NO: 53870 - DNA, 811 bp, Arabidopsis thaliana landsberg
ttcttttaagtaatctcagctttcaaagtcacaaactcaaattgtagttttgacattggctcctctgtcgagtttggtccaaacaaaactagaaacaagccatacataggattaaaaatcgatgcacgacataaaaagagtaattggaatagtaaaagaccagaaaaaaacgattacaccttaatatatattctcagagagctaagattgcagagacccaaacgttacggaggctttttggaagacaagtcacactctccagaatcagcatagcctgcaaagaagagaaattatgtgtcattttctggatttcaaaatacaaaatctattatcagctattttaaaggaacatcatgtgagatttttatgagacatgattcaagaaggcagttttcatatagcagtgatgcacacatatcaaatcaccatccaaagcacacatatcaaatcaccatccaattatacagatttctaacaatttgctgatcaacattgttcactaacttatcaatcaatcatttcacaatactaggtatatatatccatgagcatacctgtattctaatacctagataagtaaatcaatgctcaagagtaaaacctaatacatagctcatgcaaaaagaaaacagacgaaacagaaaaatagcagattgatgaacaaattactcaaacaatagatgaaagcgagttggtcaatgcacatagcagaatctagtaaagccaagttcgtaacacaaaaactacaaccatgtacagaatctaaatccgaaaactatgaccagaaaactgtggaactaacctgaataac

SEQ ID NO: 53871 - DNA, 724 bp, Arabidopsis thaliana landsberg
aacaaaataggattataggcggactttgatttgttcatcaaagaatagtttataacatgaattggtaacggtaaaatttatcctagaaggtagaagatagatgtcataaactatgcataaatagatagatgtcataacaaatctgatcacttttagatgttgtaagtttttaaagattagaggatccaatttgttataatgaatttgcataactagatatatagtttagtctggataactcattactattagtctttaagcaaatgtgatcagagtgtgcaacatagaagaataccgagacatacaaaacttgcaatttgtaaaccaccattcttattttacaatttacacaaattaaatgggccttattaatataaggcccaacagattgcaaaatggtgaatatggcaacatcgattcttatctctttttaaagatatttaccgttggtttaggacacaacaccaaattattaccgttggatttagtcggttctgtctgaagcccatttttgtttttttctgtcagcgtctgaagcccatttataaacacttgaaaaccatactttagctaccttacgctgttcttcccctttccttccgaaattagggcttccgtgtttcgcagtgctctccttcaatccccaggaatcgaaactctgctcaattcgatgatttatattgaaatttagtgctttcactgctcggaattacgattttatatt

SEQ ID NO: 53872 - DNA, 481 bp, Arabidopsis thaliana landsberg
  unsure (1)..(481): unsure at all n locations
tataacatcaaattaagaaattatctgcatgaccacgtcattgtaaaaaaagggcacgagaaacagatacgaaacaccaatgttttcttctatcacagaaactccacaaatctataggctgttttggggagacgtcttcttaccacacatttaaaaatagcaattgctaataataaacgtaagtaaaataacaacacctataaatcacgcagagacaagagcttgttcttcaggcatcacaacaatcaatataagcctgggatccaattttattatttccccaaccaaaacaggggaagaataaaaaagtaagcaaaaaaatcaagaaaaattagataatgaaagcctcaacaagagtcatatggacaatatctgtccttatgctcgctgctgtgtccgnggccatcttccctctaccgtttctaccgttcctccctgggttcaacaacgagctttgaggcaatgaggctgtcaaggttgc

SEQ ID NO: 53873 - DNA, 553 bp, Arabidopsis thaliana landsberg
gattccgaatcgaatcattgaacaaacaagaactcgtctctctcgaccaactataccgcatcaaactcccttgtctcttcacgaccgagaccctaacccttacctcactacttccgagctttctcaactcatgaaatggaagctctctcgtggaaaatggcggtacttgatctctctgtctctacaatcttatatttttgcctaattcctcaattctactttacctttttgggtttaatggtaatcttcctttcctcgaaggccgcgtctgctggacttcgtgtcgtctctagacgattcagtggtgaaatctgcttctgagaaagcttttaaatcgcttcctgacatctccaaggctgtgaaagagctcactgtgcttaagggcgttggtgctgccaccgcatccgccgttcttgctgcttacgcccctgacattgcaccatttatgtccgacgaggtacacttctctttcagtcatcagatagtagcaatgaagaatcctgatttttggctctgtttttaatttggtaaactttaatgtggaagaattcaa

SEQ ID NO: 53874 - DNA, 1215 bp, Arabidopsis thaliana landsberg
cactccgtattctccgtggacccggttttcgcaatttcccaatttcctcaatttcgatttgtctttgtcaccacaatctgacgacgccatcgccgcaatgccttccaccaccgaaacggcaacatttccgatatctttcccgcgagctacttttctactgttccgagatcgaattttcttcttctcgactcgtcacaaaaacgcctattctcactttcaccgctcttggattttaatggatatctcttgaaacctctccggccatcttctcttcggccatactctgaaatttggattccaaatttatcaaaattataaatttgatggaaaaaaacgtgaaacaagattcacaaagtttcagaatccacgaggttggttgatccaagcaatctgtttttcttctttctcctgagattaaagtgtttgtttagaaattgactgtgctttgacatgttacatcattttctccagtatatgtttaatctttgaaaattggtttggtatgaagtaagaggtgacattatgccgtttgagatctacatgtgaggtttatgcaaccatacaatgcactctgagtgatttgacaaccgtggtaactggtaagtgctctcttaacttctatgtatgtgtgtagttctagctgcatatgtggaatcgacatttcgaaattagcttatagctccaaagttcggttctttctagctgcataatgaaagccaagatattcattcacaagtttaaagttctaagatcatctttgttttcctgttgtcattgttgatctttaatagatatacggttcttgaatatatggatgcacataatgattacctgattattttagtagctgtccatagtttaaatcagtattgcacattctctctttttctgttaatggtgatgtgtactgacatttaataaaacaaaatttttgacataacttaagattttatctcactgtgatcttctcctccttccttctcttacaacctggttcttcaccaccaacaaactggcaaagtcctctcttgggtctaacgtcatccataacatcatcaagatcgtaggaacaccttggtccgctcttcaaactcagctgaactatatttggcttctttagcaacatacagtcatcatcttcaggaacatacattaaactcatccaacattttatcacttcacaaggtcctatcttcttccttgtttccatcatct

SEQ ID NO: 53875 - DNA, 429 bp, Arabidopsis thaliana landsberg
ccccctattcaaatttgttaccgccagtaatcgagcgtaaactattaccattaccatttgcgttacatttcttgaaccaaacaacaccttagttcgtagcagtggatcaaacgccggtttcatccgattgctattccccaattataataaatctccatcgtggtcaacattaaaaaaaaaacttcgtcgaccctagtactgctactcgcgagaattttattttgtcttctagacgagttactgatgtttgcttgctggcccatctaatccgcaggagaattgaagaagcaagcgctgttgtcctgtcacacagctagctcggtccctctatcattgttgaatggtttattcccggggaatatgccctcgctcctctggcatcatccgcagcatatatcctccgtctcgtcttccacctcggatcaggta

SEQ ID NO: 53876 - DNA, 1034 bp, Arabidopsis thaliana landsberg
ttatggttcctcagggtcaacacaacattaaattccttataaaaacataagttcaataaccaaattttatgtttaaacaacacttttaacaaacatgtgttcacactccttggtataataagaaaaaataaattgatatacgtaatttagacattatccaaattgttaattggacaaataagacatttgagactttaggaaatggtcccaaacaatttagtaacactttctcgacgtttacgaattcttcttcaatccttaagttttagtgctaacttaaactttttttttgtcaacgaataatttatatattaaaaaaaattaccaattggtaatggtttttcctaaaatattagttttgcttcgtaataatctacactcgttggggatatcacactcattgtatatgtgaggagaaatattttaggattttttctgagatggagatatttatatattcaaggtttttgtaggacaacgaatttacactttaattagaacctgagcacttgatgttaaaaacaaaaatatttgggagataaggtgaatttagacactaacaagtaacaagtcgcattcatcttgaatattcctctttcttccactttcacctttatattgaggcattgactctataccaattgagtgattgatcactaatcatattataagaaatactaattatataccatgtcacgactgtattaaggaatctaatcgcgtcgtcttttgaactttgactgttcaagataatatagactgagtcaaagatatgaaatgattttgttattgccgacaaagattaattgatttattaataataataaaccattaggttttggtatccacgttcctttcacccaaaatatttgtccaattccttggccatcaagatttatctttatagtttatataataagatgttataatacagtattataaaaaagacatagaaatacaacaacaaccaaaattagtgattgaaaataatgtcgaataccatatctaagtaacagaacctataaatctaactt

SEQ ID NO: 53877 - DNA, 180 bp, Arabidopsis thaliana landsberg
aggatcccctaataattgaaataaaccaaacaaaattatgagtggatgtgacattctagaagcatgttccacttccctcctcttgtcttccaccatctcactcttcactaataaaaaataaacaaagctgataaatacgtgagaacatcaaatatcaataatacccccagttccacatgt

SEQ ID NO: 53878 - DNA, 1058 bp, Arabidopsis thaliana landsberg
cataatctcaacgttttctatcaatggcaaaaagaaggtgacatgataacaaattaataaggagaaagaaaccagaaaacaaccatcactccactactaggattgagatgaagcagcacatagagtgagcggaactcggcttcattttcgtagatatagtccggttttctatttgcatcatatatattgtacaaagaggtaagagtttttgctagctgctccatgttcaagtgatgcattgagctaatacttgtaccactacaactttgaagcctcttgtgagatatgacatgaaattttacctgttacagaagccattcgggagtcaacaataataacatcaacggaactctatagaaaataaaacaaactgatgattaccaatcagaagaggatgatcaatcagagtggtatatatttctatgaaaattacaaaagaagaaaaatgatcctatttgagcatcctgattaagattacgactatgtaaactacaatcaacacattaagtcaaaatatcttaaacttacaaatattcttttggtaatagcagagggttaaacacacaaacgactgtcaacaaaacccaaggaaagcaattctaaagacaaaatagacatgctcagtgtaattcatttaccgaaccaggaaagagaaaagagttagaaaaaagtcaaaccataccatttcctcataaaggtagatcactctctcattggccaaattctggatgctaagatcttgtctaatagaccttgtcctatcgaaaataaaatcatgaaccacttcaaacgggtgctccttggagtcgagcaaacttagaaggtatctcagggtttcttctaaaactgggagcggtcttacatccgatgcctgaacatccgccgctgaaagggttctgcaaaactagcaagaacacagaaagagagtataaatgccgttggtattggaaaaaaatgaacctcattgcatagcaactggtatctcccaataagtagtacaaactattcatcttgaccaataagttatggattctaatttgcatagatgaagaagttca

SEQ ID NO: 53879 - DNA, 492 bp, Arabidopsis thaliana landsberg
taggtataccaccaataaggatgatctctcgtgttacgcaagaaactcgaaaacagatatgaaaacgattttagaaaagaaacaaaacacgtttaatgaaattacgttttcattcaaagacaaaaaagaaacataaaaacaaatattcaaagagaacaaaacgtgacaagtaataaatcaatggaaacgttttgtcgtccaaataatactattatacatctcacatattctatcacgattatataatcacgaatctggatttgaaactatatgtaatcagctttatcctctcacatttatataaaatctcagaatcatgatcatatattcatatgttaatcttccttttttcttctattaatccttgatctctcaaattctcaaaactccaattccttcggactccagtgctccttacgagctttggttgttccgccgggttggtacattgctagggctagaaccaacaggaccacttagcctaacgtgatg

SEQ ID NO: 53880 - DNA, 640 bp, Arabidopsis thaliana landsberg
tgatcaaccagatatcaacatttgatacaattagataagctataaaatatggctattaattaccaaaaccaagaaagactcctggattgcataattaactttggaaacaatcataaactaatttattaaagttaatagaagttgttcccaagtttgttaatctatagaaacaaacaaaacttattttcccgataactgatttcttgacgattatcattagaagatgtgtgagttaaagcacttgagcaaacagacgacgaagaagtcgaagaagagcaacaacaacaagtagcaggagtcaaattcaaatcacagcatcttcttctccttctctttttcttcgtgtcttttctcataaagtcataaaatatgggacaagtactcttcttgttctcctcctcacgttctctctctgtctctgtctctttctcattctccacctcttctttctcatcttctttcctcttactattactattgcttctcttcttcaagaacactctacacaaaacccaattcatgttctgtcccttttaaaaacacattaaaatacactttttagccaagtttttatccaactgattgatgaatctaatttatttgaatttgattctcttacatatagtctttacagaacaag

SEQ ID NO: 53881 - DNA, 163 bp, Arabidopsis thaliana landsberg
aacagatgaatctgtttgcgaccatcacaaagaacaaaagctctgaacttgagcagcaacagaacggctaagatggcaaactatctcagaatcaaacttccacgagcttgtaagttaactaccagaattcaggataccaggtggccgtttaatatgagttaga

SEQ ID NO: 53882 - DNA, 461 bp, Arabidopsis thaliana landsberg
aggatccctcgaatttaggggacgttgctggagacacggaagatatagacggacagaatctttgagagtgtgctgtaaagtacagagaatattcctttaggggacgaaatttaggggatgttgctggagacagcctaggtattgtatgtggtgggagtgggacggtaaaaaatccgggggtggttagtgcaacggtcttcgtgagaagatggaatacgtatctcttgaatctaaaacttatttcttgtggacttccacctagctcttctctttaatcataagaatacttcttgttggacacgctagtcagtataagtattgttccgtgagtttgtacgatttgtgcatcgcgtgtaatttgatgcatttgcaatacgatagaaagttaacatgatgtaaaggagaaaatcgcaatatctatagacgataagtactagactaggtgtgtacccgtgcgttgc

SEQ ID NO: 53883 - DNA, 748 bp, Arabidopsis thaliana landsberg
aaggatactaataatcatatttgattgttaacgttctcgtcgcttgtggctcgttggtaacatttaagcatgggtcagtgcttgtgttcacgaggtcgagtgctcgagcacacatttccaaaccaaacaccaaaaaaaagaaagaagaaaaaaaaaggaccttacatgtgaggtattcttaaatacctttttcctgattgtctttttaattgaacaatattcatatgtttaacatttatctatttcaattttttttgtccatattatggtttatatatattaattcagccattgagattttgatagcacaaatacttgtcaagcttcaaaccattaacaagtctccaatccttctccttaaagtcataccacataaacccaagaggagctagagttatatacataaatcacataatctatcacacacacatcgaacatctttattgcaatagtgctcacatgcatgtaccatctcttggatcataaactatcacttcacttgtccataactcctagaatataagatctttctctctattgagacagagataaatatagtgggattgtggcgccacttccaaagtttgtgtcttgtgtcaaacacttccggtttgatctcttcgcaccctttaaacacgtaaatcatttcatgcatcaattaatctcacaactatgaaatagcgagccactcgcaaacttggaccttgacgcaacttttcacacagggtatcaaggatccacatgttcc

SEQ ID NO: 53884 - DNA, 603 bp, Arabidopsis thaliana landsberg
cagtgacacccgcctgagaacctaaagatatagcctccacagcagcaacaagatgtatgccctcaagcaactcattcaccattttaactttactggttcagaaagaaaaaaacaatgacatcaattggttttctgtaatgccggggaacagttagaatagtcaaaggtgtttttacgcatattatgaccaaaggtctctcatagatttcatgacattaaactcagtaaacaagttgagcattatgatcccaatatgactcgtgacgaggaaataggcagtcaaacacttagaagttgtagtgatcacgagaaggttattctggaaagttgcataccttccagcaccaatttctccctcaaaggtgtacagattttgacacattgctgaatgaaacaaagagattttctcagaaaacaaaatgaaaattcataacgtctacatctggagagggtctatacactagagttaagttttaccagtaagatagggttgtgctcttgtgatcgaatctgaccttccagatgctattatcttaaaagttgaaaagaaaagggttactataagtacggtgacatgcaacttttacaatgaatggagatcag

SEQ ID NO: 53885 - DNA, 519 bp, Arabidopsis thaliana landsberg
agaaccaacataccagcatgctgcctgtatgttttatttgcatgttcatagtgtctaaactgttggctttattttgcagagctgagcatgagtgaaaaactgcatggccgtagcctgtggtgttcactgtctaggcctttgtctcaggaaccctgtgtgtctttagtaattgggattgcagagtgctttgtttatgtaatcacttataatcatggtcatcagaatttaccatgccaggaataagtgtgtgtataagtaaacatattttagaatttgtaatagtggggtcagctgtcaagagcacctggcagctctcctagaagacctggggttgacttccaatactcacacggtaactcacaaccctctagaagaccagtcttggtgtattcagcaccctctgctggccttcagggatactgcacacatatggtgcataaacagactgcttggaaaacacacatacacatgaaattattacattaaaatgcctaagatcttttaaatatttgcaacagt

SEQ ID NO: 53886 - DNA, 571 bp, Arabidopsis thaliana landsberg
aatattgtatatcgttatgatcatgcaaatgcatggatagagaaattccaagccggtttaaggttttggttttatttctatcccggtttggatttagctgaaccaaacaaacctcttgagttctttcaccagtaaacaaccaaaatcatcaatcatttcgagtttggtgattattagagtttgaaggtgtttttgttatggtgagtgtcatcctataaactataggctaattaatgtgtccaacaaaacaaaactctttttaaacaccaaattttaaccaacgatcagaacacctaaacctaattatggcaaaattttaaaattaacacacctatggcccctctccataattatctcttctccattggttttccattggttaaatcttctttacgtagatatataaattgagaaacaatgttaaagtattttctcaaactcatcaataacatcttacaaacaacaacaatcaacaatggcaacttccatgatccctatattcgtcaccttcatgctcgtgtgcgccacatggcctcgccgatacaaatatgcttaagacttttgtgttgtg

SEQ ID NO: 53887 - DNA, 1135 bp, Arabidopsis thaliana landsberg
ttactaaacattcaccgatcgaatctgctgtcatgttttagtcaaagaacacaaaatatttctctattgtacttgcgtaaatttagcactatgaatttattcacgcggtggttgtaaatctcgagattggtattatattttaggtaaagaaaaaaaaagagagagctcgattgtgtaaaaaaaaaatgaaagtatggacacgtggaaaaagaacgtgaaagggaagacaatgacagatttaagtgtaattgtgaatatgaagaggacacatgcattgatgtttcttcacgtaaagaaaggccttcgagttggcatttccttgcctcacgaatctttgtctacctcgtgcctctttttaattctcttgtcctcttttttttactttttaaatctattatttaagaaaattatttgtttattttacataaaaaatagtattcaaagtgccacaacgttcgctactctgtcgcttctcctctttgacttttgtcacacttgtttctgtcgatatcgtcttaactcaagtactcaaccatggttaacaatagttttgttgcaaaaccctaagtattttgtcctaataattaacatatatattatgatcgccagttgattaacttgactactttgattaattaaatgattaatccaaaacaagactaccccatgtatctctcattttgctgtttgttttctcttatgatcttgttgggattgtgaattctgaacatgtgtggttcaagagtcaacttcatacgtagagttgtcacaatcacttttgattaatgtaaactcctaaacttttgattttattcagatatgcaattaatttatgtgtgtatctatttttgtatacaatgttcatactctctcttaagctacaataattgagttttggttcaatttatattaactctaatcatgacatgtaactggatttaaaatatctccctttcgtctatttacacatttcatgatgtccatcactctcaagtcatattcatttttgtattgatgtctagaagcgtcgtcagattaggtctgagagtggacaagtcattttacaaaaacatttttacaaatctatcatgattaagacttgagattggaacattataggacattaggttggaac

SEQ ID NO: 53888 - DNA, 504 bp, Arabidopsis thaliana landsberg
atttccaccgggtgatatagctgcggctcggccatcgaccattgcgccttgctcgtgagcgccagcacatggaaatctgtcctttgcccggacatgcgcgaagacacagaaccggagttcggaaggcagagggagagcagaaagtggcgggggtgaggagcgcggaatccggagcagtcgactcagaaaactgtacatggtatgcaaatgaaggtgagtcgggatgatattatcagcgagaggtctgtgcgcgagatgctgaaagcgcaccgcggccccggcgacaattgctggccggctgcgctaatattagatcactcgtggcagagatgaggttctctgagactaggatctaggcatgagagcatgttacacgattaggagaataaagtccaatatgcgatgcaatatccgtgcacatgcgatgggtggtggatgcatggggtggtgttaaatgcatgacagtaaacgatgctggatgaagtgtctagtgcacagcccatt

SEQ ID NO: 53889 - DNA, 540 bp, Arabidopsis thaliana landsberg
  unsure (1)..(540): unsure at all n locations
tatctatcaaaacaggaatcaacagtttcaatgatcatgattacctaaagatagccgcatgaagtcgagttaagtatattgtagacttactgaatccgtcaagagatgcaaggatgacttctccaggaagaaggctgaagaatttctttcctactttggtgtttgccactgaacttgtgaagaatccagaaactttaaggactccagacagtatgctgtttgctacactctctgtcattttggtcatcctcttcactctgcataggcaacaacacaattagacaccaatacacgtaactatnnnnnnnnnnnnnnnnnnnnnngaacacatatcgtctcagctctcaaattacactcttcaggacacaccagaacaaatcaagatcgatcaatcagaacttatgtctcacgaagaggattatcgaagacgttcacacaagtttctgtccagacaatttcctagaatatgaccatatccgccagtttactgcagcatccatgacacagctatgcggcacacagatttcacattcgagaaca

SEQ ID NO: 53890 - DNA, 138 bp, Arabidopsis thaliana landsberg
  unsure (1)..(138): unsure at all n locations
ccccccccccccccccccccccccaccccgccccccgggccgctctactaganttgagaaagaaacccacccccccacattttccggccccacncnccccncaccccccccccccccccccccccccccccccccgcc

SEQ ID NO: 53891 - DNA, 654 bp, Arabidopsis thaliana landsberg
ggcgttaaccaacaacctcctcgccctaaacctgaacctgtcgatcgtgaaaaggtttgtgttcgatttcattattcgcgaatcgttgaatcatcatcctttagggtttccttttagggtttttatctgtacttattgatttctttatctttaaccttcgaatcgcagacatgtccccttcttcttcgtgttttcaccaaggtactcttcttcactgattttactgaatgcaagtttaatcactggagaactggctatgtttgtttctgaattagtctgcaaattaggattaattgggtaggtttgattgcagagtggtggtcatcatactagtgaagattatgctgtgagaggcaaagaaccaaaggatgaagttcaaatctacacttggaaagatgccagtcttcgcgagctaacagatttggtatgtcttctaccattaagatttagattgggtgcttgagacaacaataaagcagcttgctttgagaacttttcttgtgtagttttgtttttacaaatatgacggattttcagctaaaggactcactttgtttttactgctgaggagtgctgattaaaattcacattttggggggttttgtgtaacgtacaaaggtgatgcttctctcataagcacaattttaaatcgcg

SEQ ID NO: 53892 - DNA, 611 bp, Arabidopsis thaliana landsberg
  unsure (1)..(611): unsure at all n locations
cccgcccccccccccccccccccccccggggggggcaaattcctccttttcaacccccccccccatctgcccccaaacccaacccccccccccccccaccccccccccccccctcctctcccncccgagttccaccccccncccacaaacaccccccccccccccccccngcccccggcccccgcccccccccccccccccccccccccccccccccccccccccccccgcgccgccncccaccccccccccccccctccccccccccctctccccccccccccccccccccccccccctttttcccgggtgttttacccccccnnccccctcccgccccccaaaaacacaaaaaccccccaccccccccccccccccccccccctccccccccccctcattcccctccccccccccccccccccccccccccccctcccccccccccccctcccccccccccccctctccccccccccccccccccctaccccacccccccccccccccccccccccctcccccctcccccccctcccccccccttcccccccaccccccacccccctccccccctcccccccctccccctccctccccccccccccccc

SEQ ID NO: 53893 - DNA, 239 bp, Arabidopsis thaliana landsberg
  unsure (1)..(239): unsure at all n locations
ccccccccttttccctcttttctttccccccccccctttttttttttttttttccccccccctcccccccgcncccccccccccccccgccgccgccccctcccccctttcccccccccttcccaccacgccccccccccccccccccccgcggcgcncccttttttttttcttccccccccccccccccctctcccccccccctcctcttttctcctctttccccccccccccccccc

SEQ ID NO: 53894 - DNA, 1392 bp, Arabidopsis thaliana landsberg
  unsure (1)..(1392): unsure at all n locations
tcttataggtatgaagatggctgctgaaggacaaccacaattgtgcgaaacgaaaagcttaaactacagggggttgtgcttgaaatggaggagttgcaagcgagtatgtattagcgaaggtttccctgatggtcgatgcaaaggattcttcaacaacaaatgtgtttgcaggaagccttgtgctcttctttctaccgaaaactagacattatattgttatgaataagccattaataagatacctatttttatgtaagctaataaaacagcagagtacaagtcttgtatctcaaaactctattatacaataagctttgatcaatatagcaagtgaatttgttgctgctatcaaatttaagattttaaaattcttaacataaataaaagcttatagttgatctttttggccataaataagaaaagtaattggactgaaaagattcgtgtggaaattctgagttcctgtacagtggctgttgcgtatacagagaacaaacagtttgagaaactcttcagtcttcttgttcttgtttgcaaaaaagtttgtcaccagtctcacagagttgggagcagcagatagattcttacaagatataaaactcaaatgttccttgtagtgttttccaggaacttcaccaacctgtaaagagaaatatgacgcgatgagtcacgtgaatcaaaacgcagagttacactaaacggatcaatgcatcaaagactttgttactgagatcaagtgtcaaaacccttgaatcgacacaaagtatccaatttttatgagttacataacaatggattaaagaacttacgttcaccggagcttagccaccaatgtgtatcattggtctattagctgttttagcaatgtcaagcattccagcgtgttgcagctttctttctcttcacctgaaacccattgtgaattttaagtcaatacagaaacgaaaaacagaggaaagatttcttgactggttcgtaaaatcagatgaagcaactaaatacttacagcagcgcctataatttcccttagcgccnnnnnnnnnnnnnnnnnnnnnnnnnnnnntctcagactaacctgttcacaagaaaatcatcgggcgaaacaaaatgatcgtcacattattgagaagcaaccacgaatactcatgtttaccggtactcaagttattgcacacttgtacatgttcgcagccacttgaatcaacagttactgacttttagccatggaaaaatctggaaatgtactttacctctgaaggaccaaacaagcaaactttgaagttcccatctgcaagaagtctcaatctattgcagccagcacagaagtgttctgtcatggatgtgatgaaagaaacagaaccgcaatgcccatcgatcgtaaagttcttagct

SEQ ID NO: 53895 - DNA, 1027 bp, Arabidopsis thaliana landsberg
tagaaactattaaagtcaaaatcaaaattgtatttattaattaaaatttgtatgaacatgtagtatagaggtttgtaccagaaatgttgatgtcacaattgattttaaatcactttattgttgctatatatcgagtgatagagagaagcaaaggagttaaaatgtgaagcagagtacaagttttgtttaattttataaagtaaaagagagtactaattgaaatggagagtgaaggagataacacaaaatgagtgttgggaatcataaatccatcaattcatgaaacaatctaaacacaaaaggactaaacttagccccaacaatgtacttttgaattgtgtagtggtagttcaaattgcacaacttggtgggggcatgaaaggacaagtgagtaaatgatgatacaacatatacacgagagagaggatacgcaaaatgataagaccacgacgatcgttcttatccactcatatatatgaacgtgtttttggtgatgaatttagaggttaagctctcttttttgtcctcctcaccaaacttttgcttatgtgcatctccttcaccattattactttcctacaattatttatctgcctctaaataataatatctataagatctttccgcttgtgaagagaatctctctgttttcgtaatcaacatgtgagctcttatggttcacaattttttttttgtttactgtagcacataaactagtagtatttattctccttaacatcaaattttgaactcgtgactttcataaaaagctatttaaaacatgaatattttcctttgaaaacatatcattttttgtaatatatcatcttaggtattttacacaatcatcaacctcaagagaattttcaccttcttattttctttacattgataccaaaaaaaaactcgagagaataatagtaaagtggacttgttaacaacgaaagctggcgatacaaaactagtactattctctttagcgatgcattcaatatgattttggtataaatcaattaagtgttcatat

SEQ ID NO: 53896 - DNA, 636 bp, Arabidopsis thaliana landsberg
  unsure (1)..(636): unsure at all n locations
gtgtctggcttgggacttatccgacggcggagatggctgctgccgcctatgacgtggcggcgttagtcttaaaggtggagacactctcttgaacttcccagattccctgggatcttaccccgttcccctttcctcttccgcagctcatatcagatgcgctgcagccacggctgctgccgctaggggtgcggctggagcggccgtaaaggtaggtgaaaagaaggaagagaaagtttgtgatacggcgggatcttcaactacggtgtttgtggatgaagaagagctattaaacatgcctagtttgctagcggagatggccaaagggatgatggtggctccgccatggatgggatctcctccgttagatgattcgccggagaattctgatggagagagcttgtggagctattgatggattgatatctgtttaatatcttgttggatcctttgttcacgttatgcgagtcatctttgtttctttatcctatgattgtttgagatgatttgttaaataatcgtatgatttcactttttataatcaagaagagagactttcaaacaattttagcacatnttattctggagtgtcttgaatagggcctggtgcgtcttgaatttttgatagggttttatagg

SEQ ID NO: 53897 - DNA, 1028 bp, Arabidopsis thaliana landsberg
  unsure (1)..(1028): unsure at all n locations
cttccgacatcaagcgtagaggaaatttttaaactattcaatctccagaaccgccactgccggaggattcccatcgaaacctggcctattcatctggacagaccatccggctttggtgaccgaagcggtcgaaaatgggtggacaaggttcggannnnaaacaatgaaccggctccattggtgagcggggcctccccggggtcagttcttctagggctttgcaccacggcaggaagcgaagatcctggtgttgtaatctcatgggaagtgtcaaacggctccgtggaattcacacaaacgatcaaatttaatcaagcgttcaacgagacggtcaacgcaaaaaaacacttgacgattcttcgagcaggtttaccacttcccggaccacaactcataagttctgctttcccacaagaggcttactttgaaataacaatcctcgaaatcacccaacaccacagtggtgaggctggtgacgtaggttgtgacttagtggaaggtgaaaaaactaagttgttcaagaaccaaggactaaaacttgtcaaaagaagtgaatgggatggaaaaaacgaagaagccgttttgtctctaggactagcgactggtggttccttcggcgcgggcgagacacgactaccaggaaaattcccggcttctattgggttccaatcggacggtgccatctatctcgatggtacgtacttatttgtctatttgcatcatttagtttcattatccaataatggatcttcaaattttttacttctgagaaagtcaaagaaattttgtggagaaagtttttgcaaaaaagtaaacggtaatatagtaaaatatatgaaaattggctgtcctttgagaatttatatatttggtaatgaaaaatggagacccactaaggaatataaacgtcgtggtacaaaccaaccttccacgtcatctagaagccccacttcgtatcacacgtcattgctttggttgattaaagaccaaacaggggcacactctttttattagaatatgatcctcgc

SEQ ID NO: 53898 - DNA, 1172 bp, Arabidopsis thaliana landsberg
aaagggaacatttttgtcgttttggtgttcttggttaactattttaagagagttttacagttttatttaatctcaattctcaatacaaatatggtaaggttaggtatacatatgagatatatatatagatctaatatatatgtgtgtggatgaaagatattagctttgttatattatatcattgccttattatattataatttttttcttctttatatcaacttgcaaagtttttaaatatcgctacttgatatttaaatgcgaccacaaataatacttagtgacaaaactgtactattctacaaaatataaaaataagaatttcacctaaaaagctttaaacgttttattaattatgaggcaaaatttttagtgttatttgaaaaataatacaatatgataagatattataccattctataagttaattagaatttttttttaagttaatgaatacaggtcattagatttttttttatcacattacaaatacaaatttaacgtacgtaacatttacatttagtggactagaactcaaatcaccctattacagcttgcatatatagtaaattttgtttgttttataagtccaaaaggattagtctaaattacattgtttggttatcaaagaaattaaaataaaaaattagataaaattaatcgaaaatgaaaacttaacatgaaggttgaaatctccaaattatttactcatcctttttaccaaactcaaatatgatatttttttctatacgtaaaactcaaaattgtatatacaagaaatttagctatctaaaaataactatataataagccattatagtaagccacaattttgaccatctacgatcttttcttttgtacgtagtaaggtttggtgcaaacttttgcaagtaattagtatatagctcttatggatatggtatattcctgatatgaactctgattgggtaatgattagcacttagcaaggtagtcagatttttggctttggcacgcatgggtttcactgtttcaggattgaattggaatttttttttgattaattaatgtataatattttatacaatataaaaatatattactgtattaggtaagaactttacgacaaaaaaaaaaaaaaataggtaagaactttaagattatgcaagggtcttaaaacgagccacgtatct

SEQ ID NO: 53899 - DNA, 706 bp, Arabidopsis thaliana landsberg
ataattgtttatataatgatgtgaatgtgtgcataatagatttgggtagggcataggtatcaagaatgaataattaatatgaatgtaatgattaggcagccataatctgacttcgtggaggcattgttctttcatttttgtctttctccctctttttaagtttcctttgactttttagacgtaagaaaagtagaaaacaaaaggttttaaaagctaaaagtattccatcaaattgaattttctttttgccccatgaatttttgtcaactgtgtcgtttttttattttccaaccaactcaactcatgcttcgtttcgtaaaataaataaaaaaactctttactttctattaatcgcagttaaaaactccaacattggttcagccctttatctgccatgaacgtaaaaaacataattaatatattttgtgttgaataattaattttgattttgtagaaaacgtcgttgtcaaccatagaatcatagataaaaactagtattcaccatattttccgtttgttagttaaaattatgattacgttttcatttatatattccgtatgaattattgtatattgcattgtagctctactcttctacctagatagttaaaaacctttaccaccaagaaaaagggtttttttaattgcttcccccaaacctaaaaaaaccatttttctttttaaatttgggttttttcttttccca

SEQ ID NO: 53900 - DNA, 875 bp, Arabidopsis thaliana landsberg
gtgctctcaggcttcaactgatccaggacaatgtatttgattcctcaatttccaaaagataagaagagttttcattttaactcttaaggtaaactaaacacaatatcgtcttctttatcattaaccaaattggttcagagccattggaccgaaaacatagaccgagagaatataccaagttatatacagttaatttagttaactgggccaattcaccacgagaaaacctaaattttattgaggtagcttattgcacggcggcgattagttgttttacttgttacaagaaaatcattccacggcggtggagaaaaaacaaaagagagcgagacaaagagagactacaatggctgttccaagaggaggaaatggtttgaatgaagaagaagatgttgacggagaaaacgctatctttgaggaaaacggtgttgactacgacaccgattccgagcttccctctcacctccgtgacttggccgccgctgctcaggccggagatgtcgccgccttgcgcaccgccatcggtactttccttacttcttctcgttgctgcttttaacaaatttcaatttcaatttcatcttcaattgcgtattgcttgattagctggtcagaccgtaaagcctcaaaatttcccacattcattgcagaagattcctctagtttgatctttgtctcatccttttaagccaccttaagggcttcattttccatttgactcactggtttgccaatctagtttaggtcacttaggaaggataagagaaacatctagttttatgcctatgtgtgtatcatgtctactttgtttgttgatcttgggctgtgatgactgcgtagattgcaacctttgactgagaaatagttagcagaca

SEQ ID NO: 53901 - DNA, 198 bp, Arabidopsis thaliana landsberg
  unsure (1)..(198): unsure at all n locations
ccccccnccccccncccccnncccccccccccccccccccccccccccccncnncnnngcccccgccccccccccccccgnccccccccccccccccccggggcgcccccccgcccgttcccccccccccccctgcccccccccccccccgccccccccccccccccccccccccccccccccccccccccccccccc

SEQ ID NO: 53902 - DNA, 1544 bp, Arabidopsis thaliana landsberg
tctttgaaagagactatcaaagttaacaattcaatgctagctttcacgtccattggagccaaagtgaatcattctgttttatctggttacggtccctacacatatagaattcaaaggcaagtatatcatagattatgatcactacttccacccaaaagagaacctcctaaattttcaaagaaggatgttatgctttgggtctattggatcaacaattgcaaatcaactatgaaacatcggcatagctttgaggcatgtgaccgcatactaagggacattatgaataagaacgatcctactgctaaacataaacaatttggaggtaaatctatcttgctaggaggagattttcgacaaatattgccattcattccgaaaggaagcaaacaagatatggttatggcatcacttaacaaatcttatatctggaaaagctgcatcgtgggtatccttatcaaaaacatgagagtccaacaagatgaaaaaagagtttgcagaatggattttacaagtcggaaatagagaagcaaaaatggtcagtaccctcaatagagattatcaagaaaatgacaacatagagattgagaaatcattgttggtgccctaaggaagaaacccaatagaagaaatacagaaagccacgtttctagatctagaaagcaaatttaaagatcgtgcgtacttgcgaaatcgtgttgtccttactccaaggaatgaaatcgtggatgagttaaatataatctacctaactcaaatcacatttcagatgaaagaatatcacagtgctgatagtatatccaacgatgagagagatgtgtttggagtcaatcttctatacaccacagaatatgtaaatgcaattaagtgctcaggattaccaaatcattgtctacttttgaagcagtacgcccctggcattcagttatgaaacataaaccagaagaaaggattgtgtaatggaactagactaatgattacgcgtttgggagaaaaggtacttgaagcaaagatactaacaggtactaatgttggtataaaaatcaccattccaaggatatcattacaattgtagatacagatattccatacaagatgacgagaaggcaatttgcaatcaaagtttgttctactatgacaataaacaagagtcaagggcaaagtttggagaatgtaggttttatctaccaaaacaggtttttagtcacgtccaattatatgttgctttatcaagagtcatctcaaaaaaggactacacatatggagtgaagaggcagacaaagaaagaaacccatcaatcaaaaatgttgtctatagagagatcttcaacaatctccactataaacactcgggtgatacaaataacaaaacaaaaaccagataaataactctaatattaattaaaaaaacagttgcacgtgaagataatgaatacgcagaaaatcaccaaaccatagaagaaaattcaaccgaaacaaggcaaacatgtaattagtctatcttacactatcttaaatgattagtctaattgcaaaacagaaatatgc

SEQ ID NO: 53903 - DNA, 1162 bp, Arabidopsis thaliana landsberg
gaagagcgactctcagtgcaatcattgcaatatttcaggaaatcagggttcaaactctctttttggcatggctgttcggccttccagtaaaaactatcttccccgtcatcaagaaaggcgggcttagctggttaaggaaggacaagaaatcaaattcatacatctttttacttgatctcgtgaggaaagaaagaaacaggtgcacatatcttatatcagaaaagattccctatagttcatatcacaccacatgaaattgtgtaatattcactaagaagtgacatgctactttgatcaagtcatgttttccataaatttcagaaggtagtgggttgcatagatggtgatttgtgaatgaaaagaaaataaaccttttgcataagacattaccattccattcatcgtcagagaacctgctgttgttgaaatctgcaacgtcacagaagtaatttctagagtcgctatattgtttgtgcaagtgatcactgaaagtttgcagtttttgctttctgcccccatctttagcatgtatgccaattggagacctataaaggctgtcatcttggaacattttgctactttgaatcattgtgtcctgtaagagggagatgaaaatatccggtcaggaaaaaagagttagaaatgaatggaagacagctaaaagataagatgacgagactttgttaccacttcgttctcaaagtcgttgagcctttccctgacatgtgatgtatctggttgaccagtatccttccatggagaggagcaccggtacacaaaagttctttcacatcacaagttaaataaatcactgatctatatcttaagtggtacatattactgctaatgtaagagaaaacagtataaataaataaaaaggaaaacaaacaaaatgcaaacaagtcccaagaaaaaaaaatactcgtgaatgctaatcacctgtctgatggttgtggggaattaactggagtttccgtgtttattttacctaatcctgaaaggagaaagttagagtcacacgagagaggcacagtaggatatcctcttaaagactgatcatgatctaggtacacatggaaagttgaaattttccactactctgtgatctctaagatctataccttcgactgaaaatgccatgtgagcctcagacggagaacat

SEQ ID NO: 53904 - DNA, 927 bp, Arabidopsis thaliana landsberg
ataccaaatgttggcatatgaatctgaatatacagattatcaaactcctcacctagaatcaaagtagaagtatgtacactttcttcccagtaaacatataaggcacaagacagatcatcatgtttgttttcagatacaaaattggccacaagcaaccaaaaaaggaatgaaatccccccttaatgaataaatcaaagaagaatcgccaaggcagacaataacacatgtggaataaaaatctaatgaacccaaacctcattgattagctcttgggtccattttttcatctacttgtatgtataccacaattctgaccccatcaatactcttcaatctcagtcacactttcctgaaacacacagcaagaaaaaaaagatattgatggatcagtatcaggttgctaccaaattacatccacatgtcagcagattaatagaattaatcaatgcaagtgaaaacgtatcctttatgatgcactgttttctcctacaacgcaatgaccataagaaaaaagacatcttttcattgcaatgagaaattttacagtgttctcttattttgcaattgacaccattgctaaacgatacgaatatttaaagctaaagttaagtaaagcatttttcatttgctcggagattcaagcattttgataatccgattaattctacggcaaacacttaaaaagctgaaccaacaatcaacttgaattcgcaatgattggcacagtaaaatttcaatgaaattaagaaatacattggacttgtgaacagaaaccaggcattattaagaaacgcccaccttcaatacacgtagaagacggagcagtaccggaatttcgccggcgctgacgtgaggactccgagtttttcgaacatgaccaagttaacgaaaatgtaatctacaattttaaaaaggcccaataaactg

SEQ ID NO: 53905 - DNA, 922 bp, Arabidopsis thaliana landsberg
aaggagaaatttgggtgaatggtgaaagcattggtcgttattgggtctcgtttctcacccctgctggacaaccttcttaatctatgtaagtgtcacacacacacctggaaacacaaaattatgtttgttgttactttttgatatggaattggatttggttaatgcagatatcatattcctcgggcgttcttaaaaccatctggaaatttattggtggtatttgaagaggaaggtggtgatcctcttgggatatctttgaatacaatatcggttgttggttcgagtcaagctcaatctcaattctcctgaagattattttttaaaaaatggtttttgggtaattgggggtgttttataaaccaaacaatacattatattgaaatgatacaatacacaaattgaatgaaatatacaggtttcataaatcttagtgtcacatgtaaagaaacttcagatatatcagtttcacaaatttcgtttaatttgctcaagtactcaaaatattcaaaagatgcaaaatactagtaatctatacacgtttggtagtattgttccatcctttcaataatgaattaatcggttgataaactatacatacggtgacaactgaccacatagaagaaaacgttgtacattgatggaatggaatagattaaatttttttaagaagaaaaaacaaatagaaaaaagagagatccaccgatcacgctcgtatcccaagtacgaagggtccagtctagagcctggctttgttggttcggcgaatccagctggctcttcaccgaggccaaattgcctgacagttgaaacgcgccttgtaaagcccgatgcattttgcggtaatgaagccttgcctgcccgtttggctatttatctaagcgagctctagccctcacatgaagcggaccggttttcccatatt

SEQ ID NO: 53906 - DNA, 558 bp, Arabidopsis thaliana landsberg
tcgtagtccgcacagagagcgatctccatctgcatgccgccgcgctgcctgctcgtgccgctgtttggtagggtcacagtgaatgagcttgatggtggggccggctactccacgcgtcatcgtgacatctgagggctacgcatgcatctactgatttttcaaacaagttgcgcaattcgcatatattgcacgctgcagcatcgtatcgtcgacgtcgtccggcggggggttgggatgcgacatgcgcgtcacagtcactctctgcgtttgacttgtagagcatatataccggacagagtcgtctcgtcaaagtttgccgctctgtatgagactgctagtacaagtttccttgatggatccattgacggagacagcggaagatgtatgcatctgagtacagcaaacgtgcatggtccacacagcctacacgttctcgataaatactgtacatagcatgcattattacctgaccaaccaaaattaggccaaggtatattgttaataaccatgtggtgcaatactggtcacggcatacacatacacaatcacatttagggg

SEQ ID NO: 53907 - DNA, 1167 bp, Arabidopsis thaliana landsberg
agtccttgcacagcaagctgagaaattattgataaactcccttgtcctaacccaaagatgccatctactgctcttctaggcctctgtaaatctccagattgtaaattgctacacctgttagcaatattgaagacaagcatcacatattttgaaagttgaaacagtacagaaaagatgatttggaagttagatcatattgtacttcctggtagatgttaattacttaaacataaaactaatgagtgtatttgataggcagaaatattgtttctcatttggccaacattttctcccccccgaagatgcagtcattagttaaatttagagaaggcaatgcaccatactaaagaaatcatcattatcgaaaggggattccaaatgcaagataaaacctatgggatatgtacatatatataaaccccacgtaaatacacaattctttgctgttagcttacccaaaaacaaagggagcagaggaatttatagccaaggtactggtaataacagtatcaaaggacatgaaatctgagatgtagtaaccagaagtgccacttccatcaccgtacttaaacgaataggaacagagattgttgggagaacagcctgattctgtctggaaatttgagtaacatctcctgtctgaacatgaaactaatgaagctgaggatgacactccaggatcaaagaaacttagttgaatctgaaaatccaaaaaaaaaaaacacaaaatacagggaaaacaagtgatcatttagacaaatcataaagctaaaaccaagaccatgaggaaaatgttttaaaagctaatatgctatagaggaaagttagcaagaaacatacttggagttcgctagtcttggggcagccattgcaggaagtgcagctaacccacaaaacatcacttccagtgtcaatttgaacattaaattctcttggtggtgtcccaagtttaacctttgtgtagtaaagcctgtaaataacagcaagattctataaataggaatgggaacaagagtcaaatatctctaaattcgtaattgaacacatgatgagacaacagtctagaaggctcagacttcacaagccaaagcaacgttcatttatttataatccaaaatgttccctgatgaaaaactgcgtcgaagattaagacaaaaacgaatcgca

SEQ ID NO: 53908 - DNA, 637 bp, Arabidopsis thaliana landsberg
  unsure (1)..(637): unsure at all n locations
ccccccttccccccccccccccccccccccccccccccgcggcccccccaattcatttcttccaccccccccccattcccccgcgcccccaccccccccccccccccccccccccccccaccccccccccctcttcccccccgcccccccccccccaaacaccccctccccccccccccccccccccccccttcccctccccctcccccccccccccccctccctcttcccccccctccccccccccccttcctccccccccccctccccccccccccccccccccccccccccccgcccccttcctctttttgcgcgtttgttctccggnnnnccccccccncccccgcgcgcgccccccaaacaaccaccaaaccttccccccccccccccccccccccccccccccccccctcccccccccccccctccccccgccccccgcctcctccccccccccctccccctctcccccccccccccccctctccccccccctccccccccccctcccccccccctccctccccccccccccccccccccccctccccttccccccccccccccccccccccccccccccttccttccctccccctccccccccccccccccccccgccctcccctccccc

SEQ ID NO: 53909 - DNA, 546 bp, Arabidopsis thaliana landsberg
tgcatgcctattggctatatatgacaggctccccactctcaatgggtgtgtggtgattcaatccattcttccctctctctacaataccgtcttctttttgtttgtatcaaacaaacaattgttccaacgcattgacagaacaccatatatagtaggtgtcatcactggtcccaataaaaggaaggagttactaccgcttgtattaccaaaagaatgattggtatatttgtctcttactctctttatatttagctaattgtccggttggggcgaaacgagtacatcttaattagaagttgggtagaaactttattcattataaaaaagaagctgatatcttttctatcatgcggacgagtgtcctagagtaaagtaagttttgaacaatcaaaagagttcaatatgagtgaattgttctgtgtctttgctgtgcaggaccaggttaagcgtgggaggtaggaaaatgtgttacgtggcgtattgtggtctgcaggagtcttatacgggacattattttgtcttctccatcctgacgaagaatggaga

SEQ ID NO: 53910 - DNA, 902 bp, Arabidopsis thaliana landsberg
ctataggtgctccctttcctatacacgcttgttcaacacgaatcatgaccgatatgtcttcaaaaaatgaaatatgaagaagagaagataacgatcgctttcattgtttattggactatttcatacttttattggacaatttcgtacttgtgttgcaacgtttagtttttttggggattttaattcctacgggattcatttggatactgtaatttgtttatgtgaataaacagtgtcgaaaaacagaaataaacagtatcgaatataaccttaattgacagaacaaattattcaatctgcatctttttacgtaaaaaataaataacgtaaaataataatagttgaaaaactaaagtttacaatagattcttgtgagctttcaatacctttatttggtttcttttactcaatacctaagtttcaacataattcgattatcgatttctcgtggatggtgtgacatactttgacgtccttattgatgagagtcatattagtaaacggtcgattacgtactcagaatttatggaaattatttcaatgttctttcttttttttatcaaattatttcaatgtttttgttctgtaaatatgactattattgcaaatgttaacaaacacgaatagttatttatttcctaaaaggcgagtacagggtatgttgggctactatgacatcttcgtactttatttttttcatgttttatatactttattaaatatttcttttttgtttataaatcattacccaccagaaaaagaaatcgctattgctttgctttttctttacaatactgctgaggagatggcacacgaaaggagtgaaagctcaatcacttcaaaaagatttttaggatccaaacacataatatgcaaatatatatgatgaagcagtcaccaaa

SEQ ID NO: 53911 - DNA, 729 bp, Arabidopsis thaliana landsberg
gcagcaaattcaaataaccacacaggacatgagaattggatcaaaggttgtttctttttattgaccggagttgttcttttcagttcttggatgcttatacaagccaagatcaacgtgaaatacccttgtccatactcgagtaccgttattttgtcggtctttggtacgcttcaatgcgcccttcttagtttaattaagactagacatttggaagattggatccttagagatgagcttaccatcatcaccgtcgttatagcggtatataagacaatgtttcgtcagacatataaataatttggatccacacaataatcagatattgatctattgttaatatatgtttatagggagtggttgcacaaggtatgtgtacggtgggcatgtcgtggtgtatcaaacaacaaggacctgtcgtttcctcatcatttagtcctgtcgtgcttatgtctgcaaccgtgttcgatttcttgattcttcatcgtgagatttatttgggaaggtatattattaaaaatctaactgtattaactttatattttaactatataaacctcttgaatatattatatcatgtgcatgttatggactaaacttttattattgttgcagcgttattggatctgtggtggttgtgatcggtttatatatatttctatggagtaggagtaagcaaatagtagagtgtaagatcatgaagttgcctaccaatccggtggaagcagtaaa

SEQ ID NO: 53912 - DNA, 222 bp, Arabidopsis thaliana landsberg
gactaaccacggttcataatgcttgactaacctaaactggtgtcgaagaattttggatgattcattgcatgtgttgtggctagcctggtaacactaattgggctaggaagaaccggttgactgcctcactttatatgagaatgggttttaatgcaagttgtggaaggcaatattcaagggattgctgaccataaggcgtaattataactgggtgtgatgcaa

SEQ ID NO: 53913 - DNA, 1861 bp, Arabidopsis thaliana landsberg
agtgtgttctgtaactcatcaaaggtaagggagtagaccgaggactgcctagccaagggcatgacactacccgttggcttcatctggttactactcccttcccctccaggatgaccaccacctcctaagttgttgaaattgatgtgagttcccataatccttgtatacactccttctacttctttttcaatgaaaacaaagcatccaagccctaaaacccttgttctaaaatcaaagtaaagcagttagagtgtatattacataatgctaagaatccatgaaaaagagaacttccgaggaaaataaaaaggagtgaactatgtgtcactaatgcatgttcacatccatataagagaaagaatactaaagtgaaactggacaaaccacataaatgcgtgcgaacaaatgtaaaagcacagtaaagtcaatcaataaaggtcagatctttggataatgtttataaaaaaacgtaatttgatgactttttttgatggaaaacgaattcacaccagatacagagtttactcataaaaccaaaaacgagaaaatcagcaaaacccaacaagcatgagaaggatctattccagattccacaacccatttctcttaaaaaaaacccgatcgaatcaaatagacaaaaccctaatagcaacaagaatcaaatcgataaatttataacaaatatctcgtaaaaattctctctttaactctaatttgataaccaaaagttacttcagttacaacatgtacatcatcatgattcataaacgaaacagaggaaagacaacaaaaaaattggatgatccgacaaagacagatccagaagtcagaaaacggataataaaagagaaaggagctcgaaaatatgttttaccaaattaatttcttcacaacaagattcgtgactgcgaaaactccagagaagctacagggagagacgacaagtgtgttgctgccgcctcgacacgagcagccattttaaggccctgaaacctttttttttgttcttcagatattatttttttgtgaataattatctgttaacagtattaatttaaaaagaaacgtggacgaatgagaaaaaagagtttaatgttttaagtgcttgtaaagacttacatccaattaagaatgcgacgtggtaaaacattggccgtttgtttccgacagtgaagattcgagtggttggagatcgtgcttggaatttttttctcattggagttaaatcataataatgattattctttgtttttaggtcaattttttaaaaatatattacttcttatgttcttttagttttcttattttagatgtatatcaaaaattcaaattgatcttcaaattgacatatgccacaattgtaatcttcaacaatattgtgatatattataaaatctttaatttgtaaaaaaaaagaaatcaaaatctagatttgtctctttccaaaatggttgacgataaggatgattcatttttcaacatccaaaccaatttcatacatagataagactaaatataattatatacatgtccatattagccaagaaatactacctatataaaaaaaaatctttattggtaacttttttttttcaattatgacatagatcatagatatttgtttgtcatttttacagttcaaaagccttttaatcatttgatatcatcagtattgtttagacactaaatagattgaatatataacaaaaactatgaactagatgttataaaaaaaaagtaggaaacaaagcaaataagcaaacattgtaataataccaaatgaggaatgaaaccaaatttctgtatttggaagtaatgatcttagactccacgcgacagtgttctttactcctaccaaaag

SEQ ID NO: 53914 - DNA, 3128 bp, Arabidopsis thaliana landsberg
tacgtattaagtgggaggtctatggtgtatgatgtatttatgtatccttaggctctttttggttaatttagttatgttgtttactgtggaacattattagcttcacacctacagaattcctgagtcaccaatttatgctatttctatttttcttctgctagagtttcacaatgaacataacaacagtgcaaggctttgaaaccttcacgtcgagcttgacgaacaagtcattttgtcctagcaaggagggcggcagtggtgtggatcttgttttgagttgtgtcgataactatgaagcaaggatggctgtcaaccaggtagctgttacttctttctcgaaaaaggcctttttgttacacattccacagttcttacttcaccatcgagcattttttatcttacattctacataattcaattagttgggaatggaaaatatataaaaagttctagattggctctgatttgagtttattcttatgaaatatttgcttgcaatgagttacgtcaaacatggatggagtcaggtaaatagtatgttaataattatatgtacttcttattttcatttctcttttggctaacaaaaaaggtgatattttgtgcaggtgtatccgaagatgctgtttcaggtcacatacagctcttggttcccggagaaactgcttgttttgcttgtgcacctcccctggtttgttttttttccttcttatatcactcttacaactctaacctatgatgccctgcattagtgcttgaggaatgtatcagtggaatatgggggattttaaggattctgtgatccagggtattgttaatactactttttggatttgctctaaacaatctctttactttgtggtaggtcgtggcatctggaattgatgaacggacacttaaacgggaaggggtctgtgctgcatctctgccaactactatggtaatttcataccaccttacaatacagttcaaaatttggctatgttgactattaatcaaattttctgctaatgcttttgtttgtttaagcgctatctatatattttaagactcttgtttaattgtcaattcagggtgttgttgcggggcttttggttcaaaactctctcaagttcttactaaattttggtgaagtttctccatacttggtaaaggctttgcttcctccagctctcctcacatttaacacactatagtttatcgcagaatgattataatttaaatcagttaaagcttactagttttatgcctgttacttgatcccatagggttataattcactgaaggattttttcccaaccatgaaaatgagaccaaatccacaatgctcgaatgtagcttgtctagagcggcaggtaacctgattaaatgcaaccacaaaactatctcagctcgtctttgttttgcgccttttgtttccatccatgttctggtaaaaaaattgaaatcccaaaatgcagaaagaatacatgcttgcaaaaccagaaagggatgccgctgctaaagctaagatggaagctgatgcatccacaactatcgatgaaggtccactccatgatgataatgagtggaacataaggtaataactccgtaaattagttataaatcaaaatttgtatttttggatcatattttctcctttccagccatatttgcaacaagaaatctgatgtgtatctcatgtctttttgtcagtgttgtcgatgatgaaaatgagaaggatactacaaaagctgcctcaagttcaggtaattccaacttgggactctatgtgctatccatgtgaaaatgtatcaaatataagtcctcttcttctgactgttatctaaatcctgtgtgatgtgtagatacattgcccgaagggcttactcgggagcttccagttgcagatgagtatgagaaagcaatagccatagcctcaggatcaggagaaccagaggaggaagatgatcttgaagatctgaagaaacagctcgaagctctcaacgctgcttgagtctttatgagggagaaaaaatagatattttagcatatttatacatgaaagaggctacaagtgcaattgtgtatgcaaaaagagtgttaggattggtaaattggatctcatggacatataaacgttttggatgatgacttctcccgtttctctagttgttaccaaagacaaaaagatacaattttgaagatatttcatggttatattgtcataagtcataactatccgaactagaacttagaaattcaaattagaaaaagattctgtccaatgatgatgatccaagtttggtttgtaatgtgtaaaccagctttttttgaggtaagatattaattgcgcggggaaatcaactagatgacgtgtgaatcgcgaattacaattacgtttttggatggagaactgtctttttttttcctttttatatccctaaaatactttttgtacattcatttatatcaggaaaaacagagttgtaaccaaattattacagagatattcaaagatatttcaacctatcaactaaagatgacgtgtatatcgagaataacaattgcgtttatgagtgggaaaccaaattatttcattaacatgatctttaggaataccgctaataagagattactaatcattatttgaggttttaatttaaatctttgtagtcctgattttgaatatttcgttttagctaaatcagctccaatttttcccagttatcgtttgtcgaattcatattactgttaatttagttaacttccgaagacttaaaccaacatttaatctttatgtcgttctctcaaaaattcaacaaaacttggtctcgaccgtgtgagatatttgaaatgtcagaacaccacacgtgtcgacataagcccgtaccacgcttttcgtctggatatatccaaattactttacagaaatcacttgtaattgtattgtttgttaataaaaactttgaacctttttgattactatattattcttttggaatttattctggtgacattaatgttctatcctccacgcggttctcataaaccgacttggcttctttacttttcctttatctttctctatatatttacacacacacgcatttgtacagagatattcaaagatgtagaaacatgctaga

SEQ ID NO: 53915 - DNA, 512 bp, Arabidopsis thaliana landsberg
tataaattggatcgaaaggagtataatttatcgaatattttggctgggtccagtctctcgatataagatagctagctggggtgaatgctaaattttacatccgaatacatgtggttatcttgccaaacaaagccacaatagatcctgtgccaagcctacgcaattaacaaccaccctttttgacaaaaaaaaccacaccggctatctggacccccacctcaccgggaccggggatcggaggtgcaggtaagatcggcagactacgaaagggtcggagaatttggcaagaaaacccacgtccgcgatgaacccaggcagtagcagatcctctttagatgatgggtacgtaacaaatatccggcttcatctacacaaagtagaataattaggctaattattacagagtttaaactcacacgtacagaaagtagagtagcatcgaggtctttaaacgagccaagcgaccaaaaaaaaaaacacgcacacacagaaaacaaagtctaagaataaac

SEQ ID NO: 53916 - DNA, 440 bp, Arabidopsis thaliana landsberg
aaggtgtaaatgaagacacgtttcctttttagttatttaatgggttgatggcctctttaagcaactccctattacgtccttaccagtttttctctctttctctcttactctttttgttttctgtcagcatttgatttgtttacatgcacatacatgaaatgataaatgttagatagttggatccaactaagaaatcgaatggtggaccatctgtgccatctttgatactcccaataacctttgttgtttttgttgctaatgcccccaaaatacctaactttatttcaaacaaaccctacaatcaatagaccaaccaaaaaaagtagattaaaaatagatgaaaataattcacaccaaaaaagatgaaacgtaattcaagactttcaagtggcttgctcctctgttgtacttgtcgtattgatcaccaaaagtatcaaaat

SEQ ID NO: 53917 - DNA, 643 bp, Arabidopsis thaliana landsberg
ttcgtttgactgcagattatatttaatggccatggagatttaagactgccatggagacttaagtattgttaacaaacaatgtggataaaacgcattattcaatacaagaaattctcatgctatttatgtaatcatcgtcgaacagaattagtaagaaagcacatgaaaattttgaaaaacaataaggaaatgtatggagtgcgtattttacgctttagtgagtgaaaattgggaggaacaagacataatacatcaaaagggtaagaaaatgccacaatctgctagctttgccttctaatactgatgccctttaacccaacccgaaccagtaaactcgggatctctctagccctgtcttgtctacaagctcctgtaatcaataacggtcacttcttcctctggagcatctaggtcttggtagctgcaccaaatttctcatacattagtaccttagagacactgcactcttgatcatagggtaatggactcatagcacagagtgaactacgttacctgcgcagccgtctaggatcttgtctaaaggccggagacaacagaaaaggggcaggttcacctttcctgctaacttcaaaaggaaggttgggttcaataggatacctgcacatactgttaacaaactgtt

SEQ ID NO: 53918 - DNA, 1343 bp, Arabidopsis thaliana landsberg
tatttgtttttaaaatcgttatagttaattatgtaatatgtgttaggtgttttaaagcaaaacaatttcttttataacccataattggctttcattatatttttcagtcacagtctactttattaaagtaaagtttcttctacttaagtttatctctaattaaaaggttaagggtaaaggttcttttaaaccaatgctaaatcgtttggtgattcttaatattattaattctatttaataaatattttgtgcagttgagtgaaacaaattttgtcataaggcatcggtacctgcttttttcaagaaaatgggatgctttgactagtatgatatataattgtgttttatatatcaatcatgttatatttactcttggttaagattattttttattgttaatgatatcattgatacaatgatacttaagaaaaactaaaaatgttccaaatgtattctataaccaattatcatttgagctacattgttctctatctaatcaaatcaaaatcataatattaagctattatggtatataggaaatatttgaactcaatcctttttttttgtgcggttcaagcttctaaagaggtctcaaaatttgtgtgcagtctttcttcacactttcactcaccttttgttcctacacataattctctttgcttttaattatataatactaacttgatacaactagccatatcacaatttgctaactcccaagaacaaaagaaaactgctttcttgcattcttggacttttctctcacttttggtctcttggatatgaatctcctactattttttcttctctccaccgtttcagttttcgccgttgtctctggcacggtggaggagacggcccgtgatgttattgatgcattggctcatgccccttttgaagaatggtcatcggttttcatagaaaccaatgaccggatccgcgccgaggttatcccatctaccctcttcatcccaaactcttccgccaacgggagcgatgatagacataagttggcttcataccacattgttcctcagaggcttgagtttgcggatcttctcttgaagccaagtagatcgagactaccgactcttctcaacggctcctccattctggtaaccaacaattatgctacttctttttctatggacggcgttctcatcatcgaacttgacatctacgtggattccttcatagccatccatcgtattgcatatccgcttgattacacaacttacggcggcggctctaagcttatatcgaaatgaccgctcttcacctttatgcttgttacggttgtgtggttcatttaatcatagtgatatgaatagattgtgctcatt

SEQ ID NO: 53919 - DNA, 919 bp, Arabidopsis thaliana landsberg
agagacttagtcgtggaagcttaccattgccgaagaaacagaggtcgcgatcgagacggagagaattagggttttagtgagagcaataaagcgtaaaatcagtctttcttttcccccttgtctacagatgaattattcaataaaattttatactattacaagagtcaataattgcatgtggcaagactcacgtttcttatggtgtctgcaacaacaaaagaaaataccaataatcgtaatcagtcccggattgatatttccggtctgcggtctggttcggtttaataccgctaattaaatattttgatctgtctaagtgtccatgaatcttcggtttggttcgggtaaacagaaccgataggcacatctaatcttaacattaaaagtcgaagcagaaattttgttttgaacgcagttacacagcatcattatccgattttgaaaaagaaaaccgagaaaaatagaatatcctcaaattattttgcctcttcactcactcacgatctctacattttgcaccccaacaaatatttgacgacaatcacaaaagaatgtataaaaaagaaacaacacagttaaatgtacaacaactcaaacaacactttcagctaatattattcaggatcaaaagaaaccccaaaacaaatgctgaaatttacattgaacattcacattacgtggttaaagtgtcaggaagagccatggaatgagctccaatgatcttaccaccaacatctgggaaggtctcgtaatcaggaagagggcttactttaccatcaacgtctacttgtagaggatactttattaagtgaccttgtagctctgagaatttcgggtctatgaatcttttccagttttcttcagagattgtgttcaccttcttcagacattccagatctgatggctccacaaactcatc

SEQ ID NO: 53920 - DNA, 500 bp, Arabidopsis thaliana landsberg
tataacgacccaatcgcttgatgagacatagtcgtagaagtagccattcctatgcgtaacaataacaatcaaaagggtttaattctataatcaagaatcgtaaactcaatgactaaagatcccaactttggtatcccaaacgcgaatcaaatcgaatgcagaagaaacatacctgttctaattagaaaagactatggcgacgaaaccaaggaaggagaaaaaaacccaccaaacgtcgaattcaatgatgtcggagaagagaaagagtcgagtacacgtcgatgttaactaaatctttgacccaaaaaaattgaggctttataaacgatttattgggagctagagaatgaaaaagatgtttcctttatggcttttacgtgtagaaaagagacaagagttaaaatgagaacacgacgatagggttgttgaaggaggcgttttatgatttatgtcgatttggttcttcttagtggtatttaatctattagggtttattgctt

SEQ ID NO: 53921 - DNA, 793 bp, Arabidopsis thaliana landsberg
  unsure (1)..(793): unsure at all n locations
actaacactggcagttttgagaatagactattgcaagtaagttgtaactacattagggtttcctgtttaccaaatctatctggaagaaaaatagtttttgtttttagctcctcatttaggcccattgaatatatcactgaaggtttatgccaaattgacatgcccatattttgaccatggctgtcacagaattaaattgtcttgtgtatattttgttttcaggatttacaagaatcatattccgttgttgctaaaagatgacatagagggtcgcttcctcgatgttctctctcagaatctggtatgatacatcaacttgaaagtgttattttatcgatgtcgttctttctgttcaaaggaaaataggaaagaaagtactgcataatttagctccaatttatattatttcttcactgtgattaagtcttgatgtttagcatatgtaactaatgagacgctaactgactttctgatgggaaggccattgttgaagataaagccaaatcgctcccatttcctgtcccacttttggcagttgcacgccaacaactaatctctggtataaatcaatatgatcacttgtccgggacaatgatttcgacctctttccacttatttatttctattcataactttcccttctccaggaatatcacagatgcagggagatgatacagctacttcattgggctaggtcctgataacgttttctccattcctagttctttggaaactngtgggaatcgtaacttgaatggaaaactactgtcatagaccatttacatgatacatg

SEQ ID NO: 53922 - DNA, 1039 bp, Arabidopsis thaliana landsberg
agcttggtacctttgctgctgctccttcgcgctcaaaccttccgaaggaaagttccattacattttttctaacttcttttcatttctcgattccttcaacagtttcaacttctctagatccatcgcaagctcctcttcgagcgcctccattttttttacgaggtcgtggagccttcgtttcttataagcttcgacgaggggtctggtatcgtctctctctaatggttcttgtctcgaagggttctttaaccggtcagccacttccttcatagacggatgtgcgaatgtatagggcttcttgggttgagagaaaatcaagaaagccacttcaacgtcacacattgctacgagctcgttcattttcttaaaaattccggttttacgttttgagaacgtaatcatcctatctccatagttctccaccttcttcatctcgatcttttgcttcccctttgtttttcttccctttgcttgcttcgtagatgacatgtttgcagaaaccagaactagtgtttgatttcttgtaggtttgttattttgtatgtaatgataaaaccatgcgcaaaacacaatctatttatagaccaaagaaagagataggattacaaagtttggagacattaaatctaaatcttagttatgaagaaagtgtattgactaatttacaaaaaaaaaaaaaaatgttgactaaacacatttggcaaccactttaacatcttcattaatcagtcaagaaactattatggtaacccaattggtgtaatagctggtgtaaaggctaattgaccattcaaggaggaatgttcttttaggtaattacgagtttgtgtatcccttacagggaacatacctcagatccaaaattcttttgttacaaaaaaaacaggaaaattttgatataaaagatatctactacaaaatttgtccataatattctttttttttttgtagattagtcatataatttttttttaaaaacttcaaaatccaaatttatcttatttttctatcaaatttcatttaaaaaataaaacttttt

SEQ ID NO: 53923 - DNA, 345 bp, Arabidopsis thaliana landsberg
ctttttgaagcttatcctcagaaatactagatgacatatgacttttggtattgactctgacttattgtgggtttggtaaagacgttgctaactatgttagctacataggaggtatactatgcttgtgtatgaccaaggaccatgacacataaacatactgatattaggaacaggaggattcttctgcacatgatagatatatgattggcataataataaagaacctgatggacatatgctgattgaacagataagggggcttgctgcgtctggatataaggatcataatagaggtcctaagagagggttacctgagcaattacgatttatagaaacaacacattc

SEQ ID NO: 53924 - DNA, 1269 bp, Arabidopsis thaliana landsberg
aacttaatgatttgtaaaaggacgagacattatcattaaatcttgaaactaaaaaactatgagtgccttgaaaatctgagaatcactgtttttcttttgaatttcatttctatgtacatatggtgaaatctcaattctccaattttcttttagtattgtttttatactttcacaaataggatttaatttacttagaattgcctctatttttttcttggttttactatctatgttcgctttccagaattttatacgttattcaaagaaaatacttgaccaaatacatgtaataacatattggttatctagaaacaaaagacgagtacaagatacaaaaaaaaaaaacaaaggggacaaagaatggtgtggagaaaaaagtttgaagaagaaagaaaaaaaagtgaggaaattgtgatgataatggtaggggtggtggggaacatatctcttctttatcagtttccctttttttttctctctctcaaaaatcatgtttggagtttcttttggttcaagctaaatctttttctcttcttctttctaatagtatctatttgtttcttcaaaccaaacgatatctacgcaatacatgtcggttattgtgataacgacattgtttggatgtttcgggttcaaaagatttgtatgaatgtgtatactatatatgtttttggctcaatgataaagacacttgataagagattcaggatcgtttcaaattatttttaaaaactatatataatatgaaaaacactttaatacttaagaatactatttgtaatccgtaaaaatttaagttctaaaaccattaattaaaaataagaaacaagttacgttgtacatataaactaaaagacggaatggaatatgatttgattgtaaaaataactttggacaaaatcttccaattataaaagagagaacaaagagttctaatcatattgattggtaggtcatgaagaagcttaaggagtgattgtagaagagtggaagtggaggcgacaaagtgaggagacacgtggaaaaaggcacgtgacgtggggaacgtgaaatgttgtcgatagtgtttactgtctcgtgcttgcaaaactatatgtatgttttggagtgtgagaattgtgacgtatcctcagtccttagtccataggcgaagcatctctcattagctcctctctttaggttacgcattcattactcatgcttcccttctctcatattctttcttttctatattcccctctattggttcttcgcttctaattaatacat

SEQ ID NO: 53925 - DNA, 778 bp, Arabidopsis thaliana landsberg
atgctctgggaaccaaatatttagcaggtcagtgttgtattgctctcacttaaaaaagtcaaccgattttctatgctttaaacagcagtaacttgaaagtctgtgctacatctagggattgggcaacgaactgattgagaagcaggcgaatccgaactttaaaactaggctagcaaacgcgcttcaggtgctcacaacgtcaaaccagctatcctcatcgttggaccgtctcaactaccaaagattcagaaagaacctcaacaacttccttgtcgaagttcgtgggtttctgaaaactaggtgaccgaattttagaacttatttgctttttttttgggttgtaaaaagaatttacttggtagaagtggttttttccgtttgtaacaattaaattttacttttacaaatgcgaacttaagaccaatgtgatcatctcttatagtttagaaaatgtagtttagtaaaaaaagtaatcaatacaatgcatgaattaatatgtatgtcttacaaaatactttttcattgaagccactggggcaagatttttcttttggttcaaaaagctttgcatttggtcaatttacagtttatgttagaaataaaaattatctttgaccaaattcaccagagaattttaatacatattccattaatttccaccataaatatttatctataaatattgaagatcagctaatagtgatataaaataaattaggtaaatttgagaccaagaagttatttaatttgtattgttacctcttttttaagtgtcttc

SEQ ID NO: 53926 - DNA, 462 bp, Arabidopsis thaliana landsberg
  unsure (1)..(462): unsure at all n locations
atccccgaacgcttcgatcactctgaagacgccacgtgtaaaaatctagccaaatagagtcnnnnnnnnnnnnnnnnnnnnnnnnnnnnnnnnnnnnnnnnnnnnnnnnnnnnnnnnnnnnnnnnnnnnnnnnnnnnnnnnnnnnnnnnnnnnnnnnnnnnnnnttttgcgtattctttttcagtatacacacattggatacggattgattttaaaatttttacacatgatagattgttttgtaaatataataatactaatattatgtcatcgaaatgcaccaagtcgttgtttatgataagatcattaatggaccgattaggtcttaattacccnnnnnnnnnnnnnnnnnnnnnnnnnnnnnnnnagcacgtattaattagtgaataaacaatagccaatacgcttgagccatgaattccattattgaccggattcacacatgacttagtctatataatt

SEQ ID NO: 53927 - DNA, 451 bp, Arabidopsis thaliana landsberg
accctgtagaaacagaaatgcggaaacacatcagtcaacgattcaacagcacaagtaattgtgaggtgtaaagaacgacttcaacagacaaacgtttttgtcaattagcgagaaattgcatcacataactggacagttaataagggaattttccattgttaaaagctgcatactagcttagatgaaagaagtcaccacctgtgtctgtgacccaaattcagctccctgagccgaggctgatacaaaagctgcatcagcaaacaagtccgcctcttgaaagttctcgttgttgttggtggaagatgtttctgttggcccagaatccaagaagtcaccaatcagatctcctccaaaaaggtccacttggttggcactgcatgtggatggctctgcagaaataaaaaccatacaggtaagacatgcacatatgtctatcataaatacatgttta

SEQ ID NO: 53928 - DNA, 542 bp, Arabidopsis thaliana landsberg
catacacgagggtgtatgcaacttatccaaacacttaacccttgtgttttgatggtttgctgaagttgcacttttagcccttcaattcagctcatatggtcttactacctccaatcagtgctcatgctcatgttaagagagttagtttaagacgatgtgttgagcatttaatcaccaaaacaaatagaaatggtccagggtcataacccacacctttatataaatcactatactacgtttagttcttgatgttataacctcgtagatacactctatgacattattacttattttcttatacatgtactctacgacagtggcggacttccggtatagccaggtatggcttacgccataccttggatccggaagtcccgtctcctgtgtcgtatccgcttaatcgtctggatggctctctgctttttgttgcccttggttgtcagctctgtacaccatgtttgcggcatgctccgctccatccagacatctaagcgacacgttgagtcctgaactgtccatcgaccgtagctgttgacatagca

SEQ ID NO: 53929 - DNA, 608 bp, Arabidopsis thaliana landsberg
  unsure (1)..(608): unsure at all n locations
gaatgcacctcccgtggatttgttgatagagtaattggggttaatggtaacatttaccaagagtctttcgtttaaattacattgtggaattactgatcccgaatgtattgtagtctagactacactgattgtttttaatttctctccaatggatttgccgattaagtacattaaaggtctatagatgattttgaaggttgattgtaacgcttggataattttccacattgatgcatccccacatgctacattacttatctaatcggacatagatttttacccttttcggtgtgtaccatacacagtataactagattaatgagctcaagatgttgtgcccctttttctgttcttgcaatgaattcagtatgggattctttggtaaagaaactcaaaattttaactaagtctacggccaccttatatatgtaacagtagcgtagttgatnttttaagtagatatctatcgtcgatttcgaccgatagggtgaaactagtagactgttatcatttcttcaactttggttgtggatattcctaaccacatgaccttntaccattcgtctatctagaagaaaagctaactacttctacttctctttagaaca

SEQ ID NO: 53930 - DNA, 1103 bp, Arabidopsis thaliana landsberg
gtgtgatgtattaaacaaattgtattgaaccggtatatgagaacattacatcgactaatttatgaggtatatatgttgcagtgccttttcaggacacccttgaacaattatgacgcagttattcttctccatagagacaaattaccttatccacgtcgtcttctgtttccatctgaacttaaccaaggttccaaacatttctctctctgtctctatttattatgtctatatcgttagttccaccatttaacttctttcccatttattgaacagggaagcatgtagcacggggaaaagcgagtagattgttcaacccatttatgtcgcctggagatttgaagagaagccatgaagagcttaagaataagctaatggtggacttcgagccgaccaagtgcttgttgagtgggttgcaggcaagtgttgtctcaaaaacataaacaatcatatttattcaatttcttattaaaagaaaggaacctatcacgcgattcttatctttatgcggttgtttgcaggaagagtttgggacgttgaagccatggtatgatcatataggaggcgacgcaattggtttaacatggaacaaacacaattcaaaggtaaacaaaaatcttcttagtgtcttacttaaaagaaacactaaaggaaaaatcgtaataacaaatgtaatgtttgattgcagaaacgagaacgagatgaagaagaagaagaagaagaagaaagtaatccaatggagatgttaaaggcggtaggcgaaatgggtaaagggttagtgagggatatctatttgctcaagcctccacgctttgtctaaatatcaacttgtcttagtttctttaaaatgtgtttgtcaattttgtttactcatcatcatactcaaactgtctaaagcgactaaacacattaccagttttgcttcattcaatgagtttaatgtgtaccaaagcttaatgactattcgttgtcctactattctgctttttaaaacaaacaaagctcaagacctttcgggaaggttatgtgacatgccaagacatatatacaaaacggagtagtatttgtggagattggagaagaacaatgaaaatgaaattacttgt

SEQ ID NO: 53931 - DNA, 117 bp, Arabidopsis thaliana landsberg
ccccccccccccccccccccccccccccgccccgaccctgcatttttttacccccccccccctcctgcggggggcccgcccccccccctcgccccccccccccccccccccattttt

SEQ ID NO: 53932 - DNA, 912 bp, Arabidopsis thaliana landsberg
ttgcttttgggataaaaattggtttccatttatttaactttgctacgctgtacacatttcaggctaaggtccttggttgctattggaactcatgaccttgatacattgcagggtcctttcacatacgaggtgattgtctgttattatctttcctcttcttttttcgtgtctacagtcttcctctacctctcgaagaagtagaatactgatccaactttcatacaatctgtttcctttgatttatgttgacacttttgtttagttgagcttttttcgtgtctcattaactctatgtatattatttttcaggctttgccgccaacggatataaattttgtacctttgaagcaagtaagtcaatgtcattatgggttcatcaactagtatctctgttcaaaatagttacatgtgcctgtgtttctttgtttaaattctgaatcattctttctcctcggttatatagataaatgatttttaatgtaatggttatttggttatagcatgttctttttttttaacttctggtacaatttctcacttcttcgtagtgacaatctagtttgtttcatgtttgtacctaataccaatttcttggtcgcagacaaagagcttcagggctgacgaacttattgaattctacaaggtaaacagttaatctgttactttctcgtattgtgttatgacatttgttactcttgtgaaatcgtaacttctttggagcaaataatcaacgaaagatatccccgaacttatggatatgtatagaatgagatgaaataattgtttactcgctgaataactacttaggctttccgaaggcttgtccttgatgtgtgaaagattacttttgtttgcagtctgatatgaagctgaaaaagtttctacacataatcgagaattcacccgtcttcc

SEQ ID NO: 53933 - DNA, 708 bp, Arabidopsis thaliana landsberg
ttttctttctcggattttctcctttcccagttaatatactgtctgtcgcagtatatttttcatatatgtttctactactgatttaatttttccaatggataacttattcgtttattcacaatataccataaatgagatgtgtctctgaagttgtgtcgataactccagaatttttgtttacgtccattataatacataaatggagaagtccctttccgacgatcaagagtcaagtttgactccagcagatgcataatatgcacaatagacaaaatcgatcgtatatttaaattaaaaacaaaaatgaatacgacgaatctcatgattggcccttatgcaatttaaattcaaattaagtaataaaactacattcatatgtcaactaaatctgacgttaccaaactggtttgaaaaggaagaaaaaaactcgaggacgcctagtgtttagactattttacaatttagcaaacgcagacaaattaatgttttgtttcctacattttattatgagcaatcgggaataatttggtttgataaatcaagtagtcgacatggtgtaagcgaggcactggacggtggcacgataggtgagtcatgatgactcaagaaggcctcacgttactcacagtggctggatcattttattatataattactctctgagttgtataaatcctaatctataattaacaaatgtatagtctatat

SEQ ID NO: 53934 - DNA, 821 bp, Arabidopsis thaliana landsberg
acgtgaactaaattggctttggctattagtacgtagtgtggtatatcattgatgataaattgcaaaattagtttgtatttcgttttagacagaagtaatagtaacaattatggttgaagccaacaaacacgaaagagagtaaaaaactaaaaacaaggctggagagtgaaattagttgattacttgaatcaagacatatagacataaatcacagctgtgacctgaaaccggcactttggaattaccctttttgcacatttcttgactatgcatttatatccttctaatgcaaaatctaactccctacttgattagtcttaagttttctcaagtggggttctattatttatttattattgtaacttggcccttttgttactttggacagggtctatcatcgacaaaagaaaaaaaaagtaatattaccactaatcaaaacataaagaaatattacattttttgtcaacataatcataaatacctaaaccactaaatacaattcaactaaataatttggtaaataatctggatgagaaagaaaaaaatgttacaaagatatattttttggattttccttaaatttttttttttttttttttctagctaagaaaaattgaaattttgttgggttgtcaaaaatatacaagctatacatacacgtatacacaaatatagagatagacatttcaactttcccaattgccagtatatataacaaatgccagagacaaagggagaaggatctaagacatttatcaaaaacaaaaacataaacaaaaagagttgataaactacagtaatggaaaatgggtttcatgatc

SEQ ID NO: 53935 - DNA, 1378 bp, Arabidopsis thaliana landsberg
tgttgcaatttaagtatgactacacacaaacacacatttacattcggatgattcagaactatattatactagttaattagagcatataaaatgtcatgatttattgtgggaaattacaactttgatcaacttgggatacaacaacaaactaagtaaaacataagtgtttttttttaaaaagaaggttttgtttagaggagcttatttctagcaaagtatcaaggctcatgtaacgattatatgattattaatcccaaaaaacgatacacgctctagtacatgtagaattttgtttttaattggtagagacgatcacttcatcagacacaaagcttttctgaacttcaagagttagctcctccaagcttaagtgacactccaatcctatctgcacatgtaaatttaattccgtcgaattcaaaacaaaagactcatacaaatattatctgatccatatatatatacattgagcttaactaataatactgatatatcttttggtgtaaattaaagaagtacaaatcaagttaaatagtcataatttggttaagtaactaaatcgatgcaagacatcggtttagcaataattggtgtttgatcattcattaggagcattttactttgtaatagttctataacaccaaattccatctaatttcatgatagatataatgagttttatcggttgttcaatatattgactaacaatgtatttaatttgtatgtagatgaagatatgtaccttaacaacgaaaaagtataagacagtctcctccatgctactaatattgaggtgaagaacttgaaaagatagcttctctaagacagagatgatctttacgagctgccccacgattcgcctagagacaactctcaatacaacattagaacctgaaatctttgcttctacgttagcatgaggggagttacagcatgctcctacttccttgaaagtacttgtggtcatcacattttcgattcgactaaacggtactcgggtagtggcggctcctaaactggatggctcgattgtctggtgatcataagggaaagatggtcggtttagggtctttcgacgtttcttggactcaagaacttgaaccaattgctgcaactctttgatgaactctatcactcctccgatgatcgaagcttgatctccctaataccgatcaatcatagaaaacaagaccacatgattattaaacagattggtgcatccgagtagtttgtttaaagaaagttaccaaagagaaatatacagtctatgcataacatatacaaacaaggaagtctgacagtgagaatataggattaactatatatgtatgccacaacattttgttttcttccaaaaatagtaagttgggaaatccga

SEQ ID NO: 53936 - DNA, 1138 bp, Arabidopsis thaliana landsberg
tatatatgtaattacaatattaccctctcgtctttattagatgtcgacggtttcgtttttttgtttttttttttccttttctccctcgttaattttcagtttattaaattgttttcgatattgaaattatcttttgattactcaaattttagaacatattctttatattattttgacaaaagaattggctcaaaaaataattatgaaagaaaaatatttttaccacccattcagctaattttttggttaatttatttattttaaaattaataataagaaaacagaagagatttttttttcattttttctgatcaaaatacacaaaataatttgtttggttgttaattttttttttgtcataatgtagttaacttacgcttctttatcaacctaattatcttgaacatggccaataatagaaacaaaatgattaaacatatgacaaaaataaaattcataaaagagagaatttaaagttttgtcaataattggttccactctaaatattaacgatgtttttttttgtatggttaccaaacaatattgttttgcatttctaccctctatttgtataatattaccgtcgtgaccggtcgtctatatcttttactttaatcgcactttatttcaaggtcagttacaaataggagatcaccaaacgtaactaaatttaaattccaatcatttttaagaataaaataaagtagaaaagagtaatacaactagtttgacctttgaccgttcgatttattaagactctgctttgaattaaatttcaacggcgtgctctttttgccgttgggaatctctctctcatcacccaaacattaaataattagaagaattcttttaaccatcggaataatttaattagcaataataaaaccagtccatgtctaattattgataatgactcgtggctaaatctagtccaataaaccctactgtataggggttcaattgtaatattcacctttgttttgctcctttttgtaccatgtcctacatttttagccaacttggcaatattatgtgcatttttttcacattggcattattattttctgccagcctatatatgcatttttataatgtaacttaaattaatttatttcacataataacctcttaagtttaa

SEQ ID NO: 53937 - DNA, 714 bp, Arabidopsis thaliana landsberg
atgactgagcttgaactaggatagtttactttatatttcagttaagctatttatcggggtttgtgtagagtatgtgctctgtatagtatctatcggggttttgcagtccatggactgatttctgaaatgggcatttgaacaggtggacagagcatgtgccaatgtcaccgctcgagggctgccctactgtttttcaagtcatttgcaacttgacgccaggatatcatcaggttaataatcttgtactcgacctgtatcatggcaaattctttgttaattaatccctgcagaagcatttatgtccttgtagtgatttagcgatgtccataattgtgcttcatttagtctctggatacttaacctatgcaatgagaatcttatatacctctgtcatatttgtatgactgtggctgaaaattgcaaatttccttgctaattgatcaaaatttgactttatacatcaccatccacataacaaaagttggggtcttcatgctgtgtgatacctaaatcacttcttttaataaaggctacagtgtgtgtatagagattcatatattttggcagttggatgtactatatataacaagattttaattattacaatgtgagatgcttaagaagccactaatgttacatttatgttatttcattctcatgcagtataagtttttttgtgatggggaatggcggcacgatgagcaccaaccattt

SEQ ID NO: 53938 - DNA, 470 bp, Arabidopsis thaliana landsberg
  unsure (1)..(470): unsure at all n locations
tagcacccgaagtcacgtgtgctaaatataacgccccagtcagcggacatattcctgtgcatccaacgatttttctgacgtggaaagtccttcacgtgtcctagacgcaactaccgtgacgcaaagctgaaaacacccggaagaagcttcatacgcatgacacggagatggaacagtgcctctcacggactcaactaccacgtgggtttaggtgctgttggagttgagaaaaaaatgttgatccaaattaatttaaattacgtctaacttaacttttgaggccttaattataggagttcctcttgaagatgccgttgctgccgccgcgagccgacttcgcccgtccccttatgctcgtctgctcagtggcgaacgtacgttcaactttcagtgtcagttgacatcgacgagttccaggtaagcacttacacccactaattttgaattagtatngttatgttatgtgtaga

SEQ ID NO: 53939 - DNA, 1118 bp, Arabidopsis thaliana landsberg
actagatggatgagctgtatcttatttcaagtgagagtaaaaccgcctattagattagtaaggagtagagtataacagagctaggaaatgaatgaacagctgatttcacctttttcattcatttgttaccatttctccggtagaaagacaaaaatacaaaaaaaacaaaactcacagaattcctacaaaaaggtaactaatgaggaagaagttctcccacgataatttcccacactgaaactgagttcttggcaacattcacattgcctaatatataagcaccaatgtccaaattcagaaacaaatcgacagttttcgcaagcaaattcacaagagttccctacttccaatgtctgtctaagtgcacatcaacagtttgagccgttgaaaatgtcaattagccatggctagagaagaagaagaaaacatagcacacaaaagaagctgaaacggccattacgctttattcaaacaaaaccattttgtgcaaatcgagcaggcagagaaaatccagccacactcattataaaccaaacgaatctatcaactcttgagcttcaaaagaatctaacaacaacaaaagaatcctaatttttcaacagtgagaaaactcaacaacacattatcatctccaaaaagtcaatcagattatttcagaaaccaaacacacaatatatatctcaccgcccccacgtcgacaaaatcaatcaacgaaatcgccaaataaccccaactactatcggaatccacgagaaaagcatcatgatccagcgacgtaacacttgtcactgatgatcaaatcctttatcaattgatcatttcgcgaaaacaaaccatccgacataaaatcgaatcaaaaatcaaaaaacgaagccgtggaacgaagactctgaaaattgaatagagaatgagataagaggaagaggaagaagaaaccttgaaggtagaagaaaaacgagaggaggatcggaaacgagaaaaatatcgccatggcttgcaggcgaaaaggatgatgagggagatgagaagcaacataagaaccatgaatagcccaataatgttcatccctatcatcgccatcgtcttcgcttctctctctctctctctctctgcacccc

SEQ ID NO: 53940 - DNA, 344 bp, Arabidopsis thaliana landsberg
cgtaaccacaaacgaatgatgctagcgctgacggctcattgtccacacttgcatatgctcagtaccgatattcacttgtctaatctaacacctaatcatcttaaacatttatgactcgccatcacactaccgatgtcactggggggacagtcaaaacatatggctcacacggctttggagggaagggtacttaaaagaaccacagcacattccaccttgcctagctggctcctacctaggttaaagttggaatatgtaacatgactaatacaccagtatgcgtacctcatagtgtacaaactatgatcgaagcactaatctagttgcccatgacaacatagccc

SEQ ID NO: 53941 - DNA, 1286 bp, Arabidopsis thaliana landsberg
aaatatcaaaacactaaaaagcaaatcaaaccatctgacccaccccagacactatatatatgcatcattcactttccctttgatactttcataaaagtgtgtagctttgggaccatatattaatttcaattttaaacgagagaagaagaagaagaacggaatgtgttttgaacaagaaaaaaaataaaagaaagcgaacaaggcagtcagtttcttggtggggacagtctttgattgtatttgctatcaacacgaccaatcattttcaagtgcctaatgaaatcagagtttcagataagtgacaggaaaccacaaaccaaaacaaaagcaaataagtaattcaagaacaagaaacagaactgtgtattaattttatcatagaagcagaactgcatatggattattttataattgcaacataagtaagagataaaaaagtttgattctcgtaccactaacaaacatatcaagccatgtttatatatattaacctgataacactagatagtagatatatatacacacacaaagctaaacagatgcagatgccacttaaatctttgaagaatccattgacaaaaacacacaaaaccataatctgaatagtgattaaggaatatgctattataatcaatgaacaaaaagaaatgattccgcgtatggattattcaaacatgagatcattgcagtaattggtacaaggagctttacctattatacttctactttgatgaaaacatatctctctctctcacatgaagcatgccactgcatagaaagaagagaaaaatacaccaccattcaacttgcctaggaatcttcaataagatttatacactttgataagagaatcatattaagctatagattcccactatagagatatgcatgtcctaaaagacaaataaaatttgtaaagaaattatcttttcttatggtgaatttgaagaatagagaataaaaattacaatatcctctcacaagaaacaagaaatcttcctttcattccccaatcatcttttttcagctttttacttgtttttatgtaagccttcacctgaaagccactattctctgcaacaggtactatttcactcactcactctcccaatgcttctacaaaagaagctaaagtatcatttacccatgcatttatgtattaactcaaaatggggaaaaacatacaaataatgtaccataaaacaaagagaaatgatcctacaatcattattgaggaaaaagcaaatgaattttgtgagatcagtccaaagtatgattcaaaagaa

SEQ ID NO: 53942 - DNA, 470 bp, Arabidopsis thaliana landsberg
atttgtaatgatggttatagctgtttgttgtcgtgacattgttatttgcacctcattgaacacaaaataggacgctggaagtataaagtgtaaagatccagcggtagctaatgagtgacgtaactgagatcaattggcttgagctgactgcaagaattagagcccgggaatcttgcggtgtgatacgccagtacgaatgggttaaagcgtggggagaggtggtttgcgcattgggagcagggtggtttttcccatcattagtgagatgggtaaagctgattgtcctaaagtatggtgtgagagagttgcagtaagtgccgtagatggttagttcagaaggcgaaaatgatgtctgatggtggtttgaaacgggtccgatatcttctctatcacacgaatagcgtgagatagggttgactgtcgttgtagtttggaataagacgctactctcacagagcgtggactcaacg

SEQ ID NO: 53943 - DNA, 1109 bp, Arabidopsis thaliana landsberg
atttaataacctatatatcctaaaaatattttttttgttcgtaggattttattgtttgtggtaggttgttcatcataatcacatatattgtaggttgcagatataactattgcgtgtggagtgtgagtccatagaaatcggtcggtattgaaaactgcagaaataattttctagtcatatggaagttagattgttcatttgtaataggataccaaagttaatatatcttcaaatgatgataatacaagtgcgataaaagaatgaacaataacaaaacaaaacatgacacaaattcactactaagtttttaatacggattaacataacgacggcataatacaaccaagaagaatgttttatttgcggtgataatataacaaagcttgcccttgcataatacaaattaatttgacaattatacattatcactgacgtcttactttaggttttggagcttaattgacatgatttggtaatcctttctttaagagagcaagtttcatattcttgagagattcctctagttcatcacatagcttgtgagcgtcaataatcattggatcaacagcgacggaaattatcatcttgtttgcataactcagataatgtattgtcaatgcctaccaaatcaagaaaaaatgatgttagaatgaaaaggccgaaacaaaatctaaaagcttattgttagcaagttgtaatcaacaacaaaataagtatacttgtggtagtccatagatgcttggagcaaagtaagcgatcggatggccatggaaactaacttcctcagtcggaccgggaaggtttgaaatgcacatcgttgtgttcaacatgattttacgctgaaacgctactgcgacctttgaaaaaagaaaaaagtagatgttttcttgatattgttagtggtgaaaaccaaaagaaaagaaaatatttcttacattgatcccgaaagctttgatgacgaactccgaaaatgtgtatataatataagtaataagagagtttttctttcgatctatcatggatttaacatttgagagatacactaatggatcagattgcaaggcgatggtaaacgggaagagaatgacgctgatgtagttaccccatct

SEQ ID NO: 53944 - DNA, 775 bp, Arabidopsis thaliana landsberg
aacagtaattaaatagctctttttactgaaataaatgtaatgtaatcgttcatcttttaaatttaaaactctatcacgtgattaaaagaaacgtaacggctaataccaacaagtaacaacgttcaaaattctctacttctatataataaaaaggaaactcaagaacactcatcttttgttacagccaaagaaaatgtttgagatttttcaaaattcagtcgtctaattatatccctctgctaattagattgtagtcaatcacctgatgtgaatgtttgtaggagatactcaatttcaaggttagataacctctctctatctcattcatctcagatttgggtttactttttttttttgcagatttacttatttgcagaaattacctatcactgttttcaatatgtatttttgtttttctctttattttatcttccaataatattttttttaaaaaaaaatattccaacaaaaattttggattcccaattcaacttcaatggtcgatgtgccttcaatattatgagttagaagtcaaaatattccaacctgtgtactgtccattgtttattaatattttgaagtattaattttttttttcttaaaatatcacatttataaggttattatcaaaataatcactatatattaggttaataatcgctctatagttttccaaataagctaagaagggcggccattcttttggagaagacacgatattcaccatgtttgaatagtttgtaaaaaaaacctacattttagttgtgctgtcaat

SEQ ID NO: 53945 - DNA, 1120 bp, Arabidopsis thaliana landsberg
  unsure (1)..(1120): unsure at all n locations
ctgtataggcagttaatacttaccatttgggcttggatctgttgatatagcctctccatgtcatcttttagttggttgacaagacctctctgtatgagatagaaacgagaacaagtattacataaaacattgggaggatttgtgactattataaagctcagtggacaccatgtcttatagcaaacaatatataacatcatgcattctcaaaagtagacaagcccagtaaatgtcaactaggtagacatcctgaagcaccttctccaaacacatagtctaacactgtgtgttttcgcaacaaagtctaaacatggtttaattcaagagcataacgctttaacgaaagactcaaatcacatccatccacatcatgaataataaatattcttatatttccatttcccaaggatcctanaaccacatgacagtatactcttgctaataattaagcatgataaatgcaaataattagtcatctactataagtggtcaagattgttttctagtacaaaaatcagagttggccagtattcaactaggatgccataagcttgcatgtacctgctggttataagtgtctgtcattgaagaattctctgatgctaaggattctgccagtgcacgtgaagcatcaagatccctttgcagtgaaaacttttcttgtgttaaatcctcaatatgctgcaagtgaaaaatgaaactgtagctcagaaaagtcacaggacaaagggtgtacaaagacaaacagtgttagctaacatcctaaagaaaaatcaaagagcaatccaagacaaggtaagaagattatgatccagccagcgagaggcatccactcaatatctttgacgatttggtcgtctttatataacatcagatcaattccccacttagttcttctaaatgagaagaccatactaagtagcaattgacaatacattaacaaaataaaagatggtgcaagaaataagtatcttacctgttccagagcagtaaaatcatcaatttgttttggcatagagaaatcagtaaaacctggcattactccattggcagcaggatataaagaactccgaaacttttcaaatggattaggataatcagatgctccgcttgtcaaaga

SEQ ID NO: 53946 - DNA, 1216 bp, Arabidopsis thaliana landsberg
ctcttgattgtgaattgagtatgtcagtttctttctctgtttatgattgcttaaatgtaagatatcacccggtaaggaaaatttgatttttcaatttcaataagaataaattatttggttatacgtatggatgaatgatgataatattttgatcggaattatgagaatgagtggagtatgtgtgtgtacatgaaaacgactacttggaggctttttgagaaaagataaactacacgttttgtaattcgatttgatttctaacattttttacataacataaagtaaacaacgatgcgtgataaaaatatcctaatgttgtattgcatacgttaacgtgtgacgctgtgttggattagtcggcgttgacttgattttttaaggtctcccactaatatattatgaggttttcaatgtctgaaacgtcacaagccccactttatcatttgagtggtctcaaaagcttttaaatcaccattcacaaaagtatattttgggaagattaaagaagagaagaaatacaaggtaaacttaaattttgttaagaaatgcactgcactttcatacatcgagtttaacaacaatactctgtagtaatcaaccactaactattcaggatcatagatgataataaagttatgtcacagcaattagcagacgtagataataatgtgtggagttgtggaaaagagcaattcaagtgaagtacataaaccaagaatacaaactttccacttctcagatgtaaatctcataatgggcctgattaaaaactgggcctaactttttgcgcccatgtctactactgtatggagagaaattttgctattactaagcttggagttcgaatagagttcaacaattgaagttccgtgctttcgctgtgttgaaattgacaatgcaatagatgctttcatccatttatcatttaactagaatcatacgatcagagttttttttgagcgaatcggatttttgatgtggaatatttttacaaggtatatatatcaaaaaatagaaaaggaacaatatggttttgacaattgcctaatgaatattaactttatgtttctacaagactacaaatacccctaaacccctagccttgagccttcatcttgagacaatttgacattcaccctgttaataatgtatcccctattatgatttcactttaattcgttgagatttctaaagttagcatccaacaggaatatct

SEQ ID NO: 53947 - DNA, 1324 bp, Arabidopsis thaliana landsberg
tacgcttgaataaatggttctggtttatatagtgatcaacctgcatatatgaacagtaaagaggtaagaaatcaaaagatctgcctaactcacgaagagaaagcaagaggcatgttgtcttcggtggaatgctaacctcctcaaggaagcataatgtacacagccctccaatctggttgaaagatatatctaccacaatattctctaccagacacttaattatcttcacctgaaacattgtaccagtgaaaaatcattagacgatccagtacgtcaagagactcaaccttacttggaataaatatcaatggttcatacagcaaacatagaaagaggagaaaaaagaagcattctaattcgcatacttctgcttgtatatactggacttctttgacatggaattcagcattctcattcttctcttccttttcaagcatatcacgaaccaaattagcccaagaatccttcagattttggttagcgctaaaagccgttaagtcgatatctccatcaggcaaataagtcttgagaggtacagatccaaacataaagatctagaagacacaaaatagttacttgttacattatctcaaggaataaaaacaaaagtttaaaaacaagaaagttaacccacctgaacctgagggaagcattccatgataagcctcctgacgtaactggcaacagcattacggcgatcttcggaaggtggatttggctggatgcaagcaatgagcttggcagttcgatcctccgccttggcccatcgctcagcatcgagtggcctagtcacagatgcagccttgcctggtaataaaccgttgggatgtaagccagagggtgacggcggagaagccgcccatgattcatgctcacccatgcaaatctctgccgtgacagtcaccgacgaaagcttacccctctaatccaaacaaagaccttaaaccaaccgttacgttttcttcaacggttgctaataagcaacctccctgatgaatcgtagcttcaaagtcaccggaaatggggaaaacaaatcaaatagctacgagcctaaagaaccttggatctatctggctaatccaataaccccaaacagacaaatttgtaaagaatcaaatcgaaatcggagaaggggaaatcgaattgaagaagaaggaaaccctaggaggaggaaacgaaggagacgggagttagattctaaaaacagagagtgggtggcggaaatcaataagaaccctagaggataaatcgagagaaaatctagcagtatcgacgaatcgagaggcaaatgcgagattgatcaaagttaccactggcggactga

SEQ ID NO: 53948 - DNA, 1001 bp, Arabidopsis thaliana landsberg
tgtgtgtgtattcatcgtggtacagtttaattggaccgttcttcttacacaattatggctaatcaagaaaatgtaacctgaggaaattttactcctctatcataattgcacaaaacagaattaataatcttttcaaaattataataacactttagacaaaaaccagagagatttcataacaaaaaatctttattactcttaaaaaacaaaatcatatgtggaatttttgaaatattactagtttactactcccttttataataatgaataaaatcacttttataatagtaaattagtaatgagtaaaatctgactgacgtcaatcaaaagtaagtaccgatttgggaaagagaacaatcaaagagaaaacataaaaacagagctcttttgagtatatatggagtatcttatgtagctcggctactgtcgccgttggatttctcaaatgtcgtaatatgatgtgagagcgaagctgacacaactctctgtctctgctctggaagcatttttacttgttgttctttcacacatacacacttcacagaaaccctccattacaacataatagtatatatttactatacattccaaaaaaatcattaggtttacttttacatccaaatttcatacttttaacaaagcgattatgtgcaatttaatcctctatcaagttggattttgaggggttaaaattgtttgaagtcaactagcaaaagtctcattcttgagaaatattcgtcttgcggtaatttttgctatagttttattaaaacgtcaaatcagtaataaaaacaattaaagaattgaggagctcgagaaaagttcttcacatacatctctttctttctgcttagctcttaagcagtctctgactgtccatttcatatcaaattttaaaactattgactatactagatccttctctgtttctttcgatcccttcatctaaattgtctcctctctttatttattatttattcaatgcgataacgtatataagt

SEQ ID NO: 53949 - DNA, 601 bp, Arabidopsis thaliana landsberg
gtcctactcacataagcatcataagtatgtcataagcgaccaaaatcaacttaataaaaaaccaaagtggtttaacacttgggcctgataacttgtatagctgtcttgtacagtgtaataatcatcatatatattctcttcttaagactaatgggttattcaacattttatccaccatctatttcagattaattaatagctgccgtcaaaaataaaaaggataataataatgttgtgatataagatattatagaatatatattttaatataataatattttacgttcgtaaaatagaaacttcccatgtgattttctcctctcaccgccggttacggttattgtctttttcttagacttgaaaatattaaatctttttgttatggaattttactacacagcttgtattcatatagttttgggttaatagttaaaacttaaaacatatatcgtgattatagtttactcacattttacatgttgttacactgtcgatatctatcaaatatattactggtgtaatttcttttcaaaaatactgttctaatttaatcctgcatccaatatactttttgaccagagagaaccatatatatatcagt

SEQ ID NO: 53950 - DNA, 174 bp, Arabidopsis thaliana landsberg
atccaacctgattgtctttcgaggcgattacttgcgcaagtgatccctgcacctataaattctgacaatcgaatgaagcatcaaccattggaaatatggccgaaaggaagactattgaccaggatagaaaagtgctggctaagcttctatgctaagacctgctgagatcatata

SEQ ID NO: 53951 - DNA, 1440 bp, Arabidopsis thaliana landsberg
ttgcttatttttggccaatttgtaggctataagattacaatttacaaggatgtttcttccactttcctcatcgccgttctatgctcactttctttggttggatttccaattacattgttaactattagtggtcacattttggtcatataattttttcatgacgtggatcacacttctctttttacatgtctatctccttaattagtatctttaattaatagctttcgacatcaaaagctaatatctatgttttacactctattagttgtttaatattcacaatattcaatatcaaatctcaccgtatttggaaaatgtttattagttcagtacatgacacactcgtaatcaacattttgaattttttaaaatgttttatttgttcagtacatgacacactcgtacatttcgaatggcttactttttttgctttaacaacgtccaagtacaaaggagattctctaagactacaggatttgactttttaccagagaatctatcaggttaaaaacgatacacacacacacacacaaatttacaaaaacaactctagtttctctacttctaaaagtttaataatttgtttttaactttgaactacaaacgaactccatttattgtttcttggatcacgttaagtaacgtggcagctgaacgctgacctatgactcaaagtgagtcccactctaactatcatcttgacggctcagagtactccacgagtgtgaagtgtcaatcggaggagggggtaaaaccgtaaaagcttccgacacgtcccacgaaaaaggattatacgagaaggctcttctcatcatccaccggctcacgattaaacaagactagtctcgcttctgtctcttctcacacccgtcgatctgtcttggcttttcagctatcgccacctcttctctctttttgtttatctcttcaatttttcggatttaaattttatgaaaaacaaagaattaggataatactatttgtctctctaattctgaccataattaatttttattttcatatttgacttttacaaattcaagtgtgggagttcctttattcttgttgtatcactctcaatgcttaactagatttgacatccacatatgtgtttgtccacttcttatacatatgatgatatggaatatatcataagcagaaaaattagtatgctgttttaattttttgttggcgataaaaaaaaatcagggaaatatcaagaaacgtaattatttatgaccatatttgaacaataacatcgcattttcaccttttatttttaaccttttaaaaactttccttttaggtcttttaaatgcacactggacagacacgcatatttaagatacctgtgtatttggaggactttaaaaaaaaaacgagataatgatttccccaaattacataaagaacaaaacaaattgattttcccaaataaag

SEQ ID NO: 53952 - DNA, 1600 bp, Arabidopsis thaliana landsberg
gaatgggaaatcatattccatttcactcccacaactaaaaatgatgtatgtcctatatcatgatgtttcgtgagtttcaaataaattgaaacgtacatatatcagtttttcatctacgtgactgcgttgtatagttttcgttcttcacttagcatcatgtgtattctagctccaagtgcgtttcaaacaaatatagttatttttagccaattatatatacggttgtgatcagcttgttcactcaagagattattttagtggtgatctttcatttccttctaataaatgacgactttgttcataaagtttgagtgttaatgagaaaaaggcttcatgtgtttaaaaatctaaatagcataatgtatgttaaactcctacaattactttcgaggctggtcattccttcagaatatcatcggaccattcctctgttcgaccacaaaaccgaataagacaaaactatatgagactctctaactcagagagagactctctaactcagagattctctaactcagagagagactcgacccatgtgacactcacgtgacttttaaattcccttcccgtgaagtgatccgtgaaccccattcttcaaaacttaggacagagacaaaaccctttaacgggttctaactatggtctatggctgcaactaccgacagccgaatgcaaggagcatcaagtacaactgattttgaatctcagagagaaaagacagtgtcacttttctatttgacacttgtcaattttctatttgaaattaaattagggtttggatagtactcctttcacactggaatgaagttttaacaaagattttccacacaaaaaaaaagcattggtggggaaccggtgacggagtaccttcctgtgtcgggctttaacaaccaatattttttgcaaattagattgcccagccatctaggtcacacaccatcaaatgtcatgaatgatatattgtcgtgaagctatgattatctttagcttatttactctattatcttgtacgttcatacaaccattcatatataatctttctcaaagaaaaaaaaaaagataaaggaggcatgtcacctgaaacatattggtcatagcataatttgcattgttagaaaacaatagtcgtataacaactctttctaaattgagatatttcatacttacccacactcttgaaaaatatatgtacgaaaaatatctttgtcgccagtgattagacagctagtcatatctcaaattattcattttatgagtttcttgcttaaacgcaacttcatcataataagtgaagcattcgtgtgattatctcctcaccagatattttttgagatgattaataacttcataatgtatatatgttgatataagcgcgtttcatcagagtgagatccgtcgttgtcattagtggttcaataaatagtaaactgatatctcctccataccataagaagtaacagatagaccaataaatccaagttgacattaacaaatatttctgttcttaatcaccccaatttcactaattaaacaggcattaataaactagaataagacgagataagtatcgatgaatgtattttcttgggctcttcttgtc

SEQ ID NO: 53953 - DNA, 1179 bp, Arabidopsis thaliana landsberg
taaaaccaatgtttttctataaaagttgacgaataggagacacactttcaacaaaaatgagataaattatgacggtgtccgcgtacgatacggaccagattgtgatgattaacaagaccacgaaagacaaaagttcgatattgtagctacaagttgcatcaccttaattaaatccatatggtaattaacacttagatataaacaagaaggtggttgcattctgtggtgggctaggttgattaatttatcttatatgatccctaaacctcagtgcttaagtacccaaattatggaaccaaccaagtcatcttagtattttttaatcttaatttactctaataatcatcatgtatataccaatttgatgtatatattagtcggcgacatggatgccacatcggacattgttgaggatacaccacccctgtagattgttatgatatttcctcattattttaacgtatcgttccactaatctcactctcaatatccaattacaaacgggactatttagtctgatctactctaggcaacatataatattaattaaagcccaagacacatgatggagttaggccttaagctagtgattttagatgacatgtaaaccaccatacaaaaattaacacaccttcacgaaaaaaagttaaccacacggcaattataaacgaataaatgacgtggcggagtcaagttacacacgcgttcacacaacattggttgactttataagtcaaacatcataggcgccaatgtccaaacgtttcattttctttttcaaacgttagttaggcagaaactataaaagagatactgtctctcttcgattgtataacataatgtttatatatatgtgtgtatagtcaaacaccatttttgattctttgttgtctcaaataaacacacatacaaaaaaaagatggattcttgttctttgttgtttgtctcgttcttgatcactgttatgaccgttcttgcttctaaagagaacgatcatgagttaataaaaagtgatcaaatctctttgctttctttcaaatcatccattgtttcagatcctcaaaactctctaagcagttggatttcttcttcttcgtcttcgtcttcgtcttcaatgctcgttgatgtttgtaattggtctggtgtgaagtgtaacaaagagagtactcaagtaatcga

SEQ ID NO: 53954 - DNA, 609 bp, Arabidopsis thaliana landsberg
aaatacaccgttcatacactgtatgatcaggccttccaagatgcaacttacacacaagcggtcaagttgtatcatccattccaattccttatgcggaatagagattattctttactgaatagaccaagtctacataagggttacctatgtgcttggggacatggtcatgataaaggtgaacaaagtacagcgcatatatttagcctagacgaatatttcggctacaccgacactaaatccttaatagatgacaaccctgataagggcaagctttctattattggcacaaagaatttttctattaaagaccgtaacattttattttcacaagaaaccccaggccatatgagaggaaaacttgacattaacgaagctaaaggaactaataattcaactctaacccctcagccagtggtgcctgaaaaaattgagagagcacgcaaactaaaaaatgactacaatgtaagatcggaagccaaccatagtttatctactattgcatcatcacaatctactattaataataatttaacgaataataatgcacccgtctaactggagaggatcaacaaactttaccacatccaacaggtggactatgaaagcttg

SEQ ID NO: 53955 - DNA, 848 bp, Arabidopsis thaliana landsberg
ctctcttagggattgttaaaattctccatcgattccatctttcgtgatcgattcaatgattttttgattggtaaatcagattgtgttagagctgaacctgtgatttacaagactctagaggaatttccagaggaggtgaatctaattcgtgcttacgccggagaccgaccgacgtggcggactccggcgcatccttggagagttgactctcggtttaagctaaccggagtaccaactcttgttcgttgggatggtgactctgttaaaggacgtcttgaagatcatcaagctcaccttcctcacttgattcttccccttcttgcaccatccacttgatttgatcgatttctctggtaagagtttgttctcagagactactacaggatcgacgatcagatatctttatatgtatttctctttgtgttgttttccaataagtccttcacaatgtgaaggaggagtgatgcgactgaaactttgtttagtctgattggtatggtttcgtgctcaatgtacttttacttctcgaataagttacgctgacattagctgaattctgaacttatttgggtttggagttgcgattttatacgttttatcgacgaaataaaactacgagattgatattgttctattgactctatgcaacattgttctgtatctaacatgactgtctttcactagataactctcgcattgcgtcctttgatgaactcgtgttaacaccacaagaatgcaattgccttatgcagagctttggtgttttgctgatggcttaacctacaatttcattttaatttattccagttcccaattatataagcatataaaacccaaatttgtgaaac

SEQ ID NO: 53956 - DNA, 575 bp, Arabidopsis thaliana landsberg
gtcttttatcctgtaaattgctaaacagagcagtatctgcttgctaactatgagtcctgtgattattggttactcttgctggatttaggaatggcaagtttgcaacattggtggctacaaatgttgctgctcgtggtctagatatcaatgatgtgcagttaattatccaggttagttactgcccatgagctttattcatttttggttaatgcctcgttggtgttctaacatcacatcttgtttaaatgtgttacagtgtgagcctccacgtgaagttgaagcatatattcatcgttcaggccgaacaggaagagctggtaaagcacagaaatttatttaaactgctctttaatatttttgcgcagttgcttaatgatagtgtaaggtttgcttgctgttgccataatcgttactttgtttttgttgcaggcaacacaggagttgcggttacactctacgattctagaaagtcgagtgtatccaggatcgaaaaagaagctggtatcaaatttgagcaccttgctgcacctcaacctgatgaaattgccagatctggtggtatggaagctgctgag

SEQ ID NO: 53957 - DNA, 772 bp, Arabidopsis thaliana landsberg
gaatatacattattgtaattagttagttaattacacgtgctttaaagcattttaaacgcacaaatttgaaaatgatggcaaaggccctgattgattttgaccgagacacaaacacgcaaacatagaaaatttaatcagggatttgtactcggttacatagctgtcattctgtgttacgtattaattacggtatttaactaatcacccacgcagtagatatactataactttacttgattaacaaagataatagcatccataaattggggtcaagatgtttgaactcataacgagttactttgacatttgtagattgtgtgtagttggtacgaggtctactagtaagtcataaccaaatataactaatcgtagtagactaattcaatttcttacataagtcccaaattttctatacctgttctgcactaatcactcctctcattcttatcaccattggtccattgccatctcgttaatccgtcaatcttttattaatttaaaaaggccacctgctctattgttgacaatagaaggtgaggaaaaacaaaaccaatcaagccaaaaaaagacaacctgtctacatcattaagcaccaaccttatacaaacgtataaatcgaatttttaactcgtgtatgattgactaggcatccttcattttccacatgggccatcctgttaaaagatgtttcattattgcatggattactataataatcacaagaatttaaaaggcacaatcaagtggtgcttttctttatagttttcattga

SEQ ID NO: 53958 - DNA, 613 bp, Arabidopsis thaliana landsberg
  unsure (1)..(613): unsure at all n locations
cccccccccccncccccccgcnggcccccccccccgcggcgccccccccccccgnnnnaatccccccccccccggcggcccctctatttccccnnccccccccccccccccccccaaacaagccccccgcctttttttttttctnaggggggggggggccccacaaaaaacacaaacaaccacanccccccccccnnncccccccccccccccccccctttttttcccccgngcccccccccccccccccctcctttccccccccccccccccccccccccccccccccccccccccccccccnnccccccgccnnnnttttttgggggggctcagataggggggggcnccnnccccnncccacagaaaacaacaaaaccccccccccccctcccccccccccccccccccccccccccccccccccccccccctncctttctccccccnnggnnnnggcccctcgcccccccccccccccccccccccccccccccccccccccccccccccccccnccccgtcctcacccccccccccccccccgnnccccccccccccccgccccccccccccacccccccccccgcccccccccccccccccctacccc

SEQ ID NO: 53959 - DNA, 976 bp, Arabidopsis thaliana landsberg
atatgtgttggaaataaaatgtctaatgaaaaatgaaaaattattttttattttctgtaaaagttaactgaagagtaaaatctttcaaactcgtcttcaaaaatattcaaacaatcatattatctttacattgctatattttaattaatttctccttctcttattaagtgaaaatactcttgaaagatgtagtagttcataatcttatcaatttgggtcagcaaaaacctagaaaacgaatcaaaacatgccatgtggcatacgataaattatgtacctattttatttaagtagaaaaataacattgaatggggaaaaaaggattgacagattgtttaagatataactttttctaaataagcttcctttttactttttctttatggtttgaactaagaaaataacttccttataagcaaggctcacaccatattaccaaatatgacaaattgtaacgcacatatatataaacctctaatagaagaaaatggtcacgttggtaatgtgcattgtccaagaacatgactctcattgccctctacatgatataaattatcttcattaacgcaaatggagaatcctaataaagatctaatggaaaccaatccaagaaaactaagatcatattcctacatatggctgatagtatgtatatttgtattggttgtttgtgcaatattgtccagagcagaagaaaaacaaggaaaagacgaaaacaatgatcatataccaaagatttactctgttttggttgaaggggaaccattggcctttcgagcttctactaatatcaacaggtctacatcaatacatttttcttcgaaatttacagaatctatcatattattattttttaatatacttgggttaaattcatatataagttcttattttctcatcttccatggtcattaactgtatgtctttgacttttatcattgtgtaaatcatttatttattgaggaatacttttttt

SEQ ID NO: 53960 - DNA, 432 bp, Arabidopsis thaliana landsberg
agtattttcgtggacaacgggttgctgcacaaaaacgagttcaattccgtgcttgaatcctatttagacctgggactgaacgttaaaggagttgacgcgtgcggtaagtattacgctgtattgagcggcctgactgatcccgaagtaaagcgcacagccattggataaagctgactgtggatgattttcgaccaagaattagaagcttgtaaacggatgctcggctggcttggacagggtaactatttacccagaggttatcgagtcggtatctgtgaatggtgggccgtcccaaaccattaaatcgtaccacactgtctgcggtttgccggattacatgaagctgaaggtgggtggagccgttttgttagtttttcaaggacaaattgcgcccagtaggacgttcgttaaatattacggataacattctga

SEQ ID NO: 53961 - DNA, 1203 bp, Arabidopsis thaliana landsberg
gatatcgtattttcatttagaatgcatgcctttgcaccaccttcttttacttctagtttaatttctacacttgtgccacttctttgttcttaattaccgcgtgtcctcacaagaaaaaatggatttcttttactctttattaacagataatacactgatacatacacaaagtaaaaaaacattgaatcggacatatactggtggaaaggtttagtttgtattgagatgttttacagttttcatggatcgatgaaggaaaataagtacatcaaaagccgttttttttggcgtaacatatgttttttactacttactattagcaaacatattgggtagtatctgattggaaatctacgaaatttcgaagtgatgaaatgattatgtgatttcgcatgtttctatatgacatcgtttttgtgtaattatgtttcacatcttctatcctattgattttgtaagataaatgacaacattgacaagtaacaaaatataaatagttacgacatagtttgtagttgaattacaactttttgttttccttaatcactatgtcatttaataccacaaatttctcattcgtgatgattccatcattttccttgatcactagtcggaaccaatttccattggttaatggataactttttgcatgaaatataggttctacaagaaaacataaattgatataacctttggagctagcaaacataaagttcagttgttcagctacctggacggctcattaagattcctcccgagaagtattcttaaattatattatttatttttaataaagagatattcgtaaaatttcggctctgttttgtaaagttaacaatatctcaattcatattacaaacttcattaaataaggttttacctaaccaaaaaattgctatagtgacaatattttttctatgaaacaaacccacttggataacacttctatttgtggttttgtttggacaaacgtttatttttatggttcatatatgcatatccacatatacattatctccgaagtcccaaaactgtggaagcagctggaatgaaaatgttggtgacaaatgcttgtaggcgcaaatgttaggctacaatccgcataagacatgcatggtgcatgccccatttaattacgaggaaagaaatctaactcctacttcgatttgcaatatgggcatggggtatcacgttagatacaat

SEQ ID NO: 53962 - DNA, 654 bp, Arabidopsis thaliana landsberg
gtgcgtacgtttgcgggttgtttctccctcgcttcttcctggcggcggaagatagagaagggcaagaggccgcgcggaacatcgacgaccgagaccccctcgtcagcaactccatctgctattctccctgacggcgttcctggcagcaagatacctgatgcttttgccttcattgttctcaatagatgagtgctcatgcgttacaacggggatatataatatcacggtaacttatgtattatatgtctccgttgcaacgcacgggcatatacctagtaaataaaatatgtacatagagatccttggtgtgccaataaatgggattaactcgattgtgtgtgatcttagtcttagctgccactgtcccattagcgaccaccggccgaccagtggcggcctgagggtggggcggagggggcaccgctccgggtcctaattatatagggccccgaacctagaacctagttatatatttagtaattagactatcagacacaatagtttaataatgaaatatcgaataattagcagctataaaatgttcaaataactcggtcgtatttaaacatgttaaaagacttgtgaagataatactataatagccatatacgaataatgatatatttattggtttgtatgaatattttagatgtg

SEQ ID NO: 53963 - DNA, 1242 bp, Arabidopsis thaliana landsberg
tagttcttgcaagtatcttacaatttgatgcgcataatcttgatatgatatttgccaatacatgagatgtagctaacacaactatatgtctatatctatatactgatgtcgcatgcacttaaccctaagtatcatccaaacgcaacattttagacttctttgatcaaagagagggaaaacatattcaaatttggcgctaaaacactaatcagtcaaaaaagcaacaaccgaacttttgtctcagccaaaagcacttctttttctggtttacattgtcaattacgaaattgcccaatggatattaggttagggtaggttgcactgtatttagaatcaaagttaacatccttgctataaaaaggaattttcaatgcttttgaaacgagaatgtatgagctgtcttagctacgtcagctaattctcctcgggatttttctgtccattcaacgtcttgttcctacgagttacacaaaggctgttttttttcttgtgggctgtgtttttttccctttaagctccacatattttctttaaaacaaatcgaattattcttaaagaaagtcacgtaaaaaagattatcataaaaataagaatttatcggagaattaacgacaccgaccgacccaaccaaatcctcgtggacccgttttcttttggttgattctgttgccttaatccatcgtcatgatcttaatatgacgtggctcccaccggttacctattaccgtccgttcccgtttccggcggagaatcgttcacattttcccgctaaatccgacgtggaaagacagaacaagagacaaaataatttttaaaagagccaaaatattttcgatgttttcttttggatgcacggaaaagatcataactctttgtagttgttctaagattctccgcctacatatttcgatttttgtcacatttttaatttgcaacagtactactattggctgtcgagttataaaacttaaatcagattttaatactcaccaaattgtcattaatgaaaaactacgcattaatagctaataaataggggagaagaatcgtctttgtccgttaagcttgacgaatagttaaatgcttctgcagcttttggttactgcaacgcacgtccaaggatgtatgaaactaaaaaactcacagagtcagagagaagtgtgtcgtcgcacgtggaaaaatctaagaccgagcatgattcaagatcgttaagacatgtaaactgcacgtgacagggtcagg

SEQ ID NO: 53964 - DNA, 1020 bp, Arabidopsis thaliana landsberg
attgacttcttagaccgtgccatgttaataccatttaatgttactggaaacaaatactaataaataatacgtcacttaaaacaaaatgtctatacaaatactattaacataaaacaaaatgtctatacctgtattacatcacatgcatctcttacttataaacaataaacttctttattgtatgttttagggaataaatatatgagtttgatgtcatatcatgtttttttttgttatcttcatacttttgtgttgcgtttctgttgattctccttttacgtatcctctcggctctctcgttaatcttttattacataaactcgtgcatcaacataaacacaaaacagaagcatgaagatgaataacaacgacggccaacataataaaacggtgacatttcctcgaaaaagcatcgtgaaggctactgttttcatcgtcgttctattcatttcagctgctctcttagacttactgggctatctcgatttcgtgggttttaattcaccttacatttttagtttatctataatataaatcgcagtagttaacgttaatcataatcattgtcatattgttttgttttatagaatgcttttgcaggtttaaagctaacaacaaagacagaagaaccaaatccttacgggtgcgacttcgtacaaaaccaatcaagtcaaactcctatctcacaaaaccgcaaatcgagattaaaccccaacaacagttcaaaatcatccacgtgtccttcttatttccgttggatccatgaagatctacggccatggaaacaaacggggataactagagggatgatcgaagaagcgagtagaacggcgcattttagattggtgatccgtaacgggaaggcgtacgtcaagagatataagaagtcaatacaaacaagagatgaatttactctgtggggaatcttacagttgttacggtggtaccctggtaaattacctgatctcgagctaatgttcgacgctgatgatcgtcccgtcgcccgaccagttgacttta

SEQ ID NO: 53965 - DNA, 102 bp, Arabidopsis thaliana landsberg
ccccacccaccccccccccccccccctccacacccccccccccccccccatcttcctcaccccccccccctccctcacccccccacaccccccacccccccc

SEQ ID NO: 53966 - DNA, 452 bp, Arabidopsis thaliana landsberg
aaatagtcccgctatgcttggttacagcatcgccgtcgacggtttggcattctttgaggcggcacaaaagatggggttggaaggcattatggccaataaatcagacagggaatattaccctggcattcgcacgcgcgactggctgaaaatcaagatcaacaagcggtaggaggtgatcattgcgggctacaccctgaacgaaggctccttcaagttattcagcgcattgcttttggcggcttatgacaaaggtgagctgcgttatggccgcaaagtgggcaccggttccaaagaacaacaagtgaaggaaatgatggtgctcttcatgccattaataaccaaaaagagttcgatcaaggaaagcgccgactacaacaaaccctctggggtgcgaccgaacctgccgtacgcaaatgcgacctggctgaaaccggaactggtatgcgagagca

SEQ ID NO: 53967 - DNA, 553 bp, Arabidopsis thaliana landsberg
tttcttctcaacatcgtcatctccatgcctgctacgctccgttcttttgcgttcaagccacacttgacatcatcactctcttcattacaatcctcacgtgacctctcctttttctgtttcttcctaaccttttctttctcacgttctctccatcacgatatctcatttcagatattttcctctacctcagacacgagcgcggagtcctcatcacttgtccacacctcagcgtggactattacgcacgaaatcttcttcttcaaaatcgctactatatctatagcaccgtatccgtatcctctcatcttcctcagaatcgcatctctgaactctcgagcgcatctccgtcgtatcacgccgagcagtcactgttcttactgcgatcacgatctttgcgagtcacttccttactggacttagaattctctaacatcatgtcaaacgcaacaaatcccgatacgaaactacgtaacagatacccatattcaaatcagattaatcaggcacacaagagctacaacgatatacctaaaaatgttgcggtgaagaagac

SEQ ID NO: 53968 - DNA, 998 bp, Arabidopsis thaliana landsberg
  unsure (1)..(998): unsure at all n locations
gtttattcgcgggcaatcactagagagcagacagcaatgataacgcaggattatataattgaatccataggaaaaaaaatactaataaaagaaaaaaatttagatggttagctgttaatgttaggctttgacttttgattaaaagaagttatggacaagtttgaatagtccaaaaggtccaaaacatattatgaacaagtattaaaaaatggcaataccattttgtgaattgcaagaatttctaataaaactttctagtaaaaactgtattacaaactacattcataataaacttgatttgtagaattataacgattgtataactagataaattaataaaataataatatttttttagagctatataaaattattcatttaagttagaaacgacagattttctttgagggaaaatcagtctggagtagaggagcttatatgggnnnnnnnnnnnnnnnnnnnnnnnnntttctttgcaaaccaatcatcacaaatattgtttaaacatgaaataaaagataataaatgaagaaacctaagctttaaaacattaaaatcctctaactccttgtaatatgtatcaaaagcaatataaaaaatggataaagatgcaagagaacacattacccacagaagagcctcaaactcagtatgaagaggaaatacacactgacgaagacactttagtccaagattggatgaatgactatcagagccaacaagaatccatccaatacaacttaaggaggctgcgtttaccccagagcaatcgatctgacaagtaagagaattctgatcggcagacactgatgtgattttggaaaccgggtgtagaaaattgatttcatgagaacgggagagtataatacaggaactattctgatacaatattattagcatcaatatctgaaaaaaattcagaatgatctacgaaaacagtttatagagtaatgtgaagtgcattttataatctcgttaagaaaatgatggccgaacac

SEQ ID NO: 53969 - DNA, 602 bp, Arabidopsis thaliana landsberg
  unsure (1)..(602): unsure at all n locations
agaccttcctgcgccgccgcggcttttccaagccgagaccggtaaggtgatcgaaatggtgctgtttgattagggcaggccgccggaatcgatcttcgatttcgtccaaggcatcaccgcgcttgctcgcaccaggaccaatcaggacgcgcgtctcgatctcgaaggcaaggccaggaagctgctagaaagcgctgcctgacaggttggcgcgcctggcccacagatccggcgcgactgccaacccctcgtcatctcagagcccggtcaggcgccgggcctctttgtatgggccaccctgtgcgtgatgggctatccccgatcatgccggggcaatcttcggcaccccgctttgcgcttcgcagccgatgggaatctcgatcttctggaacgcctcgatgggtcgacacgccttaggtgctttgcggcgtcggctgcagttacggcaaacacgtctttgcgtctttggccatcttcctgatgcccacccctntgacctccaccgcccgacgccgatgatctcatcggcgttatgaacagccagacacgctaagcgccggtgatcatcggcgcttcttgctggcgatcgccgatcccttctt

SEQ ID NO: 53970 - DNA, 1078 bp, Arabidopsis thaliana landsberg
agtttccatacgatttaacaaaacatattaaaccacccattatacatctaaaacacaaatgaattttggcatcatggtttgtcattaaattagaattgaggtataagtaagtatttcatgctataatttatatttaaatctaaaattttaaactataaaacaattgtaaaacgatactattttaatttatttgaaaaatggagagcctgttaaacttacgtaaagttagacaatgaggcaagatttgtcggatcataatcacgggactgtagcctttttttttctcacgatattttatttaaaattcaagtttcatatatgcgatgctaaaaagtgtgctagttttgaagactataatatatacatggtctacttgaactctaggaaagttacacaattaggtgtaacaggtaattttcatcgaaagaatgtgctgaatataccaatgaacacaattagtgaaataagtaaaaaacaatatttcccacctattaatttgttgcaagaagtgggatactgaaaaaaaaaagaaaaaaaaaagagttgaagtggatttctccttttcactaattttccttttgacgggccatttgactaaaaaatagttatgtaatgatatttacttttccaatttctttttaatatgtcttctcacattaatattatttcttactctgtttccattttatcaggtccctggactagtccactccactctatgaaattttgaaactttatatggtatttttaatatacgttttggtagtttgtttattatattcagtgttgtcaatatctcttacctcctcggattcaattttccagaagattcaaatatgcacaacacgtatccaatttgtggacgactagaagaaatacaagtaaacggtttgatttgtccaaacgttcttaaatcaaaagcaaacaaaatatggtgaacccttatttttacttttcattaacttacctttgttagcattatatctttcattattaaccttacctaatccattacgttcaccagataccaaccgtacaaatatgtataaaataatattgaatacgactaatcttatct

SEQ ID NO: 53971 - DNA, 946 bp, Arabidopsis thaliana landsberg
tgaaatttggcaaagcataacattcgtattattagataaccataagtcacaaaatttatcggcaaactcatcccaaagaccaagattttaaaagtgaaactggtcaacccgcaggaacttaaacatacttttatagtttgtgcttaatcgcaaaatatgatttttatagatcaacgggacataattcatatgcgtacacaagtttttcaaaattaatcaactacacgaaaataatatatttaaaatcaaaagcgctaggaattgaataataagtatatatatatataactgtatcattatagaaattgttcagtaatacagaatatgatgatccctgtctttcaaaagaatatattcctatgataagcctctctatttcaaatcatctctctctatatataattaataaccagagacgtaaaatccctaaattaaagaggaataatttcaaaaagttgccaaattattcccataaatatagttccttatataaatataagtggtacttttaaacacctgctcgcttgtaagttattatatatttcatggaagagaccttaccagttcacatcagcttacttgtagggaaagtaagatctgatgcatcagtttccagtgacaacttcaaacgttgaagagattcttgggagcttcttcgggtatgatggtgaagggaaacgtcaagccaagaggacgcttagctgcaagtggcttgactggaaaaggggatgggtaggcttgtctgtgacttggcgaagaagcattagtatcagtagcagcagcaagagcaggcaattggggccatgcgaacatccccacaggcctgcagattctgaaaccagtgttggttattagtgaaagtggtgatctttcttgatgatcatgcttcctttctttttctctgttttgaggtgactctttgatttggttacccttgttcaccaac

SEQ ID NO: 53972 - DNA, 164 bp, Arabidopsis thaliana landsberg
ggcgaacaaaaaaaataaaacacgacatattttggctactttttttaatttcttggcaaaaaagtactttattcctggttcaaattttttttgattgcagcacaacacaacatcgtcgtttcagctgattctttctcttttatcgtaaaataaaactcacaatt

SEQ ID NO: 53973 - DNA, 1553 bp, Arabidopsis thaliana landsberg
aaaatatattacttttcctatatataaaatagaaaataaagttgagagataacagaagaattaaagttgagaaaattcgaaataaaatgataaaaaaaacattaaattactacaacaactcgtgggtgaaaaatgactttaaaacatattttaaaacttaacaatatcctattttaaaatttcaacaaaaaaaataatatagatatgaaaatccgagcattacagacaattagcttaggaaagagaaacatagtcctaatcaccaaatgttaaacacagtgtaagagattttgtcttctttcttttgtctaagattttaaaacaaaataaaaataacaagagagagagagagagaaagattagtttaagaagtaaattggtaattaaatacgaaacagtaatcttctcttcaaatgcttataaaaaggcccttcacaatctctcattcaattcacacttcacatttggatatctctctctctctaactctctctatactttcatttctcgtttcataatatttggtaagtctaattaaatatctcatctccttaatttttttattcgctcactaatctctctacacctttcaactaaacacaaaacaaccaaaagctcaggttcttgtgttttggtcctctgtttatttcttgctcaaaaaacaaccaagagctcacttgctcttaatcacaaactgagacttttctcagtcttcctctgctttaactagtttacttgggacagattctgtataacataaacttaaatcaggacatgtaactgaaacatgtcaagtttctaaatttaacttgagttctaaaaccgttaacacaaacacaaagctgtatgctttcctctctgtttctatgctctgttttccattttttgctctctgtcctctcttgcttagtaaggtctgtttttttttttgcaggaaacttgttagtgtttaaggaaacaaaaggaagaagatgaagtatgtggttgtttcaggaggagtagtgagtggactcggcaaaggagtcacagcaagtagcatcggactcatcctcaaatcctgtggcttccgagtcaccgccattaaaatcggtcttattttcttcctcctctctaacaaccatacttgtcaattctttcatgtaaaacgaacttgtcacaaaatttttttcctctcacgcaaagttcgttcctttttttgctcacttttgcttttgatttttttcccacaacttggagaacaaaagagaatagtttcagatttgattttttttcttcttggccccagtggttacaataaacatgaaaaaggacttctttttatttcctctaccttctcacgcgtgtgaaaaagggtacaacaaacaaaaagttcaaaaaagatctaagaatttccaaagatttaatattttttctatttcccctgttaaaccctgtttaaagttacatgatttttcttagaaaaagttgaacacttttttggatagttactgtactagtcgctgattttaaggttggattatgtgcagatccttacttaaacattgatggtgggg

SEQ ID NO: 53974 - DNA, 544 bp, Arabidopsis thaliana landsberg
aagcaccaaacagatgtcgagaattattgacctaataataataaaacttgggttaggaattcagaagaagatggatgagatcaaagacaagatcacggtggtgactccataaccggcgagcttgatcccagctacctcgtcttttttggtattccctgatgaatatttagaaacccatccatataatataagacacatcgttaatcatgcaaatagcacataaaaaatttataaaataataaaaaatctggcaagtttcattttttagtggttttgtccgaattattcaagtcaatactcgagacaaaataaagtacacaagtaaaagctggcattcacactctgattatggttattatatagaaaacaaaaaaagagagaaacatctgagaaaattataagatcgatttagagtatcaattgaataattggcttgaataacaccatttgattttggtaattaactctactaatcaaatcagtcgaataattcaattaatacacagtcaagtcgatctatatttcattttttttttttttgcta

SEQ ID NO: 53975 - DNA, 2445 bp, Arabidopsis thaliana landsberg
tttgagccgcctatttttctataaatagaggcttagggcatggatcgtgtttcttttgctcattcatctctcctcgtgaagagacgagagaattccagatctggtcgtgtcaaaacccagagagggaaaaaaaaacggaaaaaagtttagctcaagtaactgtaaactactgactcacagattcaaacaaattggcaaaagagggtttaattaatttttgattccccttttaattcacgttctagggttttcgatttttgattcgtctttgatcggagcttagccgccatggatacgaggtttccgttctctccggccgaggtctctaaagtccgggtggtccagtttggcatactcagccccgatgagatcgtaatgctcctttctctttctctttctctttcaggtccattgctccgccgtctgtttagctggcggggatattggcatgaatagtagattggtttagttagggagcatgttcttttctatctattgatcttaattggaagcttcaagtaagaaattgagtttcactggttgctaatggcttttttttcagaggcaaatgtctgttatacatgttgagcatagtgagacgaccgagaagggtaaacctaaggtgggaggattgagtgatacccgtcttggtacgattgatcggaaggtgaagtgtgagacatgtatggctaatatggctgagtgtccgggacattttggctatcttgagctcgctaagccaatgtatcatgtcggttttatgaagacagtgttaagtatcatgagatgtgtctgtttcaattgctccaagattttagctgatgaggtatgtaggagcttatttcgtgtcagcattgcttgttttgcttatgtctttgtttgacgtagctgttcttcaattgattatttttatgaaggaggagcataagtttaagcaggctatgaagatcaagaatcctaagaataggcttaagaagattctggatgcctgcaaaaacaagaccaaatgtgatggtggtgatgatattgacgatgtccaaagccacagcacggatgaaccagtaaaaaagagccgaggtggatgtggtgcacaacaaccaaaactgactattgagggtatgaagatgattgcagaatacaaaattcaaaggaagaaaaatgatgagccagatcagcttcccgagcctgcagaaaggaaacagacacttggtgctgatagggttcgtcttttctttcgaatgaattttacctcttgttcttgtttggcgtaatctgatggcatgtgatattcttgcaggttttgagtgttttgaaaaggattagtgacgcggattgtcaactcctaggtttcaaccctaagtttgctcgtcctgactggatgattcttgaagtccttcctattcctccaccccctgtcagaccatctgtaatgatggacgccacttccaggagtgaggtaagtcgactacggttttctgaataaaacttttcttagaccaacatagtgtgcccctgagtttatgcttattgttgatgcaggatgacttgacccatcagctagctatgattattcgacacaatgaaaacttgaaaaggcaggaaaaaaatggagcgccagctcatattatatcagagtttacacaactcttgcagtttcatatagctacgtattttgataacgagttgcctggacagccaacggtaatgcttttgtatcctttcagatatctggtatgatacatacggatattgctttatctggattggcttttattttcttcaggctactcagaaatcagggaggcctattaaatcaatatgtagtaggctgaaggcaaaggaaggcagaatcaggggtaacttgatgggaaaacgtgttgatttctcggcacgtactgttattactccagatccaacaataaatattgatgaacttggtgttccgtggagtattgctctgaatctcacatacccagaaacagttactccctataacattgaaaggttagtacgtctggtgtttatttcattttctgagagtaatttttccgtgttttactaacaatttagtttggcagattaaaggagcttgttgattatggaccacatcctccacctgggaagactggagcgaaatatatcataagagatgatggccaaagactagatcttcggtatcttaagaagagcagtgatcaacatttggaacttggatacaaggtatgtactactttcttattctatccactcaacgcacaaaaggttatttctggaagtcgtcatttttatgctttcttggtcacaggtggagcggcatttacaggatggtgattttgttctgtttaatcgtcaaccaagtctgcacaaaatgtctatcatgggtcacaggattaggattatgccatattccactttccgtctgaatttgtctgtcacgtctccgta

SEQ ID NO: 53976 - DNA, 137 bp, Arabidopsis thaliana landsberg
gggaggactggggctggctattattcgaagatattaccagggtagatgcacgtatttgtcgcatggcggttcctccaatctagacggctggtgtttcccggtgaggtgagacctacatgccttttatcctttcttat

SEQ ID NO: 53977 - DNA, 606 bp, Arabidopsis thaliana landsberg
ttgtggattttcgtggtactcacctccccagtcggattgaatagttttgatttttgtgcctaagaggcgttcaatgtgtgtatggaactggcgaaataaacgtgaggcttcagaacgatcatgcatcaagtaaacccaggtaaatttactaaaatcatcggtaaaactaatgtaatatttaaaaccaccaacagattgaggggcaggaccctagacatttgagtggatgagttccaaagggggggggacaaaacacgatgactcgagctaacatagggcaactgatgactcttggctaattgacatgcattgcatacttgcacattggactttggaggacacgatatattattcatacgcaaaatcgactgcaccacttgaggagatggatgactaaggcgtgcatgccattgagcacgactaggagacgaccgactaagaagagcttgcttcaaatctgcaacatccgatggctttagagagtagagaccccttcacattgtccggctaggagcattttctgggagatcggatccttaatagaaaatgtcagggatagaatcaaagaaactttattacaaggtagaattatgatgtgaacagatg

SEQ ID NO: 53978 - DNA, 238 bp, Arabidopsis thaliana landsberg
gcttgcgattcctccaaaacgccctctattagttaacactcagattcatctttccatttataaccagacaccacacaactgtgttactccacatcgatttatggcccaatgtcaactaaagtatggaggagtaaaaacataatcatctacatatattcatctttggtacaaactaaagaacatggctgttccagaagacattgagaacctaaagacaggatcacacaagacactgtga

SEQ ID NO: 53979 - DNA, 506 bp, Arabidopsis thaliana landsberg
  unsure (1)..(506): unsure at all n locations
cccccccccccccccncccccccccccccccccaacctctttacccaacggccctccacnccaaccccccccccccccccccccaaaacaaaattttcccaaaggttaagccccccccaccaaacccccccccccccccccccccccccccccccccccccctctaccccccccccccccccccccccctcccccccccccctcccccccccccccccccccaccccccccccccccccccttttttttcctgttgccccccccccccccccccccaaaaaaaaaacccccccgcccccccccccccccttccccctccccctcccccccccccccccccaccccccccccccccccccccctcccaccccccccccccacccccccccaacccccccaaccccccccatcccccccccccccccctccaccccctccctcccccccccccccccctccccccccccaccccccaccccacccccccccctccccccccaaccccc

SEQ ID NO: 53980 - DNA, 1099 bp, Arabidopsis thaliana landsberg
ggtacacatctcaagaagactgacctatagagcatccgcagataagcagaggatcttgacatttctgatccccttgaacaaggttgtcacatcaccagggtcgatgccgctataatgtggtatgcgcatgtattttaaaagcggtcaaatgaagatcaagcccaggttcaacaaggctgtcaaatttcagattttcatacttatccgcaaccatatcagaatagtccaagtaaacaagactcggagtatcaaacgaaacacaaggtttaggagcagaggaatcatcatcacttctatatacaagactcttaagcgttcgacttgaagcagaaccattccaaaacttccacttgttagattcatgaacccgcaggctttgaagtgaaggaaaagctaacagaatctgtctaaactcaaccttatcaccatcacgaaactcaaccaaatcaagaacaagagaattaagcgtcggagaaacaacatctgaaggaaactgagaaagacggatcattgttccaattctaagtttgaccaaagtcttgctcctaaagacattaaatggcaaatgaaagattccaaaatcaatgcatagagaaagatccaagacaccaagatcccttactgttgttagtatccacttgattacacaatctggttcaacacctccttgacgacacttgagagagactctttgaacatgtgatgaagtctcgactcgttgagagagtaacctatcgacgaaagccttgaaaaaaacattttttcgttgacccttttggggtttcagtaacacgggaatcgtcgaaatcgagaataggtatcgatagaagtagattcgaccagcgctttgagagtatcgatgttaaagctgcctcttttgttgaaaggtaagataagattcggcagagaagatcatttggtaaattgctaatcacatcgccataactaggtttcgcttttttgttagcttccatagagagattagggttttcgaaaccctgagaaattgacaattggattcgatccccgaattcgcaggtctttcgcgtatgagagaaaaaaaagacgatgaacatttcaatatttctcggtttaggtc

SEQ ID NO: 53981 - DNA, 713 bp, Arabidopsis thaliana landsberg
atcgaacgaaccacaaatatgtaccaaaccttttgagaaatgaatggcaatttcgagtatcttcagaagaattcagtggaagcgtaaccataccgggatcgacgaatgttctctcgccgtttcttcaacacataaccaccgaatccaaccatactcgcggctgcaatcgatccaacaacagcgattccggttttctttcctcctcctccgccattttcaccacctacggatgcttcttcgcctcccggtctggtactatcagtgtagttgagatcattggattccgtaagttgagacgatgacggataatcgtaatcattagacatcgtcggagatggagacatttcggtttctgattgcggcagagacgacgaatgctcaatcgccggtgaaatttcttcagttgaaatctcaccggacaccattaaaagagctacaccagataccattacaagagctacaatgatgaagtcgaacttcatctccaaaattcaaacctctctctctctctctctttttcttctctctttttgatggttgatgacactcaagtagagagatggtgattttatagggtacctatgacgaatggggattcgccacgtcagaagtgttagaagctagagcatgaactgaatttattgattttcaaacttaaagatcctatgagtaaacaattgctttggcacctagtcacctacggaagttgtgcc

SEQ ID NO: 53982 - DNA, 233 bp, Arabidopsis thaliana landsberg
tacattttcacaagggtatgcaaagagtttttgtttaatctaatggttaaacattgttatacaagttaaactcaactggccgttatttcaaatataaagttagcgtgtatttaccattttaattgatttttagatgacacaaacgatctagggttttatgaaacaaccatgactacttttaatatataaatatcttcatgcttaatattattcatataacgaaacatacctgg

SEQ ID NO: 53983 - DNA, 553 bp, Arabidopsis thaliana landsberg
  unsure (1)..(553): unsure at all n locations
tgctatttctttggaagccacgaannnnnnnnnnnnnnnnnnnnnnaagtccatttgcagggtctatattccggagcaatataacatgacatccaatcttgagcttcaaaacatgaggtggtagcccattaggcgtcaatgtgtttaggaactcgggtgggtagtagttatggggatcatccatggcgctatcgaaactatggtacaccatatgctccccttgaaaacgatcaatcatcttaacatttatcaaatcaacctagtcgttccatgttgacagtatcgcccttgaagtgatgtaggtggaatcagacatattttcgttgagatttgggaaagcgaagtctattaggttgtcaagatcgttgtcactcccactgtaaggcacacacacatcatcaagaagacgaatgtcgccgtcactatttgtttcctcagttccaccgcctacgcgcacgaaaaactccgcaaaccaagggtcgttttttgctctcatgttgctaacaagctttaagtgggacatggactcccataggtaagacatccgtagaga

SEQ ID NO: 53984 - DNA, 391 bp, Arabidopsis thaliana landsberg
gcccttcccggtctactcgagtgacttgtcgcgcagccgccggggcttggcgccctcttcgcccatttcgctttttcttgtcctgctcgtattcctgggagcggccgtctaagaacaccacccgcgaatcgccctcgaatgccaggatgtgcgtggcaatgcagttcacgaaccactggtcttgggtggagaccagcacgctgactgcgaattccagcatggcgtcttcgagggtgcgcagggtttacacgtacaggtcgttcgatggttggtccagcagcagcacgttgacgcccgagagcaacgccttggtcaggtgcagacgaccgcgctcctcgtccgacaggttgcccacgcgctcgatctggacggcgcccttgaagtagaagcg

SEQ ID NO: 53985 - DNA, 600 bp, Arabidopsis thaliana landsberg
taacgacaccggtaccctcacgctcaccttcttcagcgcgcggcccgactacctcgtgaagctcttgccggttggtcagacccgctacgtctccggcaccgccgagttctatgacggcatgctgcagatggtgcaccccgaccggatcgtcgacgagaagggcttcgccgcgctgccgctggtggagccggtctatccgctgaccgagggactggcgctcgggaatgtgcgccgcgccgtcgacggcgcgctcgccaagcttcccgatctgccggaatggcaggacgaggcctgggtcgcgcgcgagcgcttccctgcgttttcggaagcgttgcgcgcgatgcaccggccgcacgaaccgcacgacatcgcgccggataacccggcctggacgcggctcgcctacgacgaactgctcgctggtcagctcgcgcttgttctggtgcgcgcgaacatgcgccggcaggcaggccacgaacatgccggcgacggacacctgcgtgcgaaaatactgaaggccctaccctacgcgctgacgcagtcgcagcagaaggcggtcgacgacatcgtcgccgatctgtcgaagccagaacgcatgct

SEQ ID NO: 53986 - DNA, 1485 bp, Arabidopsis thaliana landsberg
tttcatgagccccaaataaagtatacattttccaacttgtaaagttaatttcacaattaactatttttcctttttagggttcttgattaagtagtgaatctagttatattgataatctctaaaatgatagctagttattatttgttacggctcaatcttgagatatatatatatatatatggattttaaaggaattctagaatttttgaacccgaaggcctcaaatatatcaccagtctagatggtctagcgagagcatgacctttcagaaataactgtccacataataaactttattttctgatagatattatcaaccattcataattctagaatttttggcaacattaccaaagaattaactctactaggaaaatagacatggaagtttttttcaagaatcataatgtcaagagagtggagagtttcatcatgccaaagtaggttcttgcgcctatcctatgaatggtaaagcattatgatggacatagagattcttagaactaataacactttcacgcatagttgtttgaagattatcttagaattcctttaaaatccaaacatatgatattcttgaatctgaatttggtatagtgatctgatttcactaactagaggacatgcttccagagttccaagtccatttcgccagtcctttaaagagacttctctcttttcttcgagaatccttgcgtttataattataagtaatcacactctgcaagaacatcgttagtgtgctcctcctctagacacgcattttaggtctatctcgttttcagagagatagaagtgccttcaactacactccttggaagaaaagtagctcggcagtcaccggcctagtcctctttcttgtcctatgtgatcgtcaccgcttctcttagagttccaatacaactccggaaaatggtttttctaaatagcagattaggcattagatcgtcttgactagaacccataacatttgccccactagtcctgtattaatggcacttcgtctagttacattgacaacattttgaattgagcgtttaaattttatcctcccggagactatcctaatatatcgtactaataagataagatactgactccaagagacggtcgaatgagctaaaaattcaccaagcgtctacaaaaatctagcttggttcaccctgtcaaatcacttgatggctaatattgagtaaacaacgttctcatgataaacaaattccatcgtccaggatctagagaagttcatttgatcaatctcattacgcatataacattttatttatgtgaaagttgcagatataaatataaaatgaaaaagttatatataaatgacatgacaatgcaaacaaattatttattaaaaaaagaaaagagaaaaaataaattttatagtgccgacagttttctttttccctttgaatggttgtaggctaatatatctatttatgtcaaactattagatcttcttttttcttttctaca

SEQ ID NO: 53987 - DNA, 645 bp, Arabidopsis thaliana landsberg
cacgatgattacacatgtatgtaaccaaatcaaatatataaacaactaacagaagaggagtaaacacctcgtgaccctgatccagaatctctacagcagtcgacatgcctgcaagtccagctcctataatggctactttcagcttaggtcccttgtatggtacaggctctggaggaaataacccctttggagctgtattcataaccagaccatttaaacagtaagagatgatcaagaatcacgatgctccagaaaattattagaagaagaaagcttctcataacatgaaaccttaaatctaaatttgattccttaacagctactacttcccatggataaactaaactgattatataaacaaaagagaatcttggatcgaccgtaaaatctcgaccaaactctccatttccattactatgccattagtatagagaagccacaagagtttcatctttttatctaaaccatgagagttcagaattcatctatatgccaggaaataaatagattgagttcatcaatatgccatgagaattgaaacatcatcctcttcaaaagtgggattgttcgtggcataaagctaatccttttaatcctagtacatgtgaatttctcaaatttaccactaaaaagacaaaatttacc

SEQ ID NO: 53988 - DNA, 331 bp, Arabidopsis thaliana landsberg
aaggttaggaaagctcgaatcagattattaatttttggtaatgtgaactaaaagtttagtaaaaaatcgtttcaatctttttcttatctaagtaccatctaaaatgggtttaggctcaattcttcacctaatttcatttcgaataggttttgatcatataaaaaagaaaaaaaattggttaagcgcactgaagacagttgttagcaccacagagttttatgaggagagaaagcatcatacatcatcaaacaagtttcttcatcgctcattgttagtcattagtactttacttcttccttcttcctcttttattataagaagagaaagaaaa

SEQ ID NO: 53989 - DNA, 588 bp, Arabidopsis thaliana landsberg
gttttttgtaagattccgatgcttatgacaccaaggaacctccagacgcaagaaggggacgtccatttaacatgacaggataaacaacacatgttagaactggaaagtatcgaacttccattagctatagaacggttactaccaaaagttactagtaaaattacaacctacactaatggatctcttgagcctgaaacatgtatggacaattctaattcatgaaacaatgggtgcatagatggtaaagctatgtaatggaaaaataaatatttagctccacttaaagacaaatggacgaaattatttttggtcactacactcataggatatctatcagcaagaaaagattgataaactattatccgctacgaaattagatttaaaaggtaataaaaccaagaagcgctcaaagattttacaaatagaactacagggcttaggtgtttacctgtactgaaagacaaagcagtaacagcacctcgcgaggcatgttcaaatgttacgatctcttcgtccaattttatgttatgtacatggatctttccatcagcacaaccaattgcaacaacatccagggcaggggatgaa

SEQ ID NO: 53990 - DNA, 1271 bp, Arabidopsis thaliana landsberg
ctagttcaagcagcaccgaggtcgcacactctttgtttttcggggtgccttgtctgatgaattccacaagtgtttcaatgaaggagagttgtccaatggcttgacgtccttcagggtgtgatgcaagcagcaacagaatcgaaagcgcttcatcgatcatccctaagtttttatctttaagaaggttaagcaaaggttgaacaataccagcatcgatagctcttcctttattagctgagttaagagacaagttaaagagtgcagtgagagcatctttcttccctcttaatgtcccatgttgtagtaaatcgactaaaggcggtatcccattcgataatccgatagttactttgttctcatcgagcatcgataaactaaacaaagctgcagcagagttctctcttgcctctctgtttccattttcaaggatttcaataatgtttggaatagctccttcatttgaaatgagtttcttgttgacctcgtcgatagatagattcaacaatgtcgttaccgcgttttcttggattcctgaatcagggtaagaaaggagttgaactaacaaaggaatcgctcctgcattcgctattaaaacgcggttctcgggattttctctggctagcaaacgcatctgcttcactgatcttcgttgttcttccagttggcttgacgataacgcttccaccagcaaagagacctcatctttctgctcattttgtgagtcaggacttacttctttctctggaatcttgaaattgttcttctcacaccactgcataatcaagttctttaaagcgaagttaggtgcaagagagagatgatctaactcctgtcttgttttaggacaagtcttatgtcctgcgtcaaaccatttctgtatactctccttctcatatgtctataaaacaaacatattattatgttagtttcaagtacgtaccaaggaagtttgaaccaaaccataagttcaattacctgtccagtggcgatgataaccgggtcaagcattatttcgagtgttataggacacaaaaactcatgaggtaatattagagacgttgacttggtgattgctttattgatgacgggttggtagagaatgtcggtagcttcaagaccttgaagcttcttgaacttgttaagaagctcaatgatatgcttgttagtctctatgttcaaacctccttttgtcttggattaagctttgtatggctatagtttctgtctttaaatcatcaattgttttagctcaagctttttcgctagccttt

SEQ ID NO: 53991 - DNA, 453 bp, Arabidopsis thaliana landsberg
ctaatttgaatgaatcttcgtattaagaacaattaattcagggatattatttcttacttgacggttttttgagtactgtacacgagatgaggatctctaatgtggtagcttaactcgaccggtttcttgcaaagagccaacccgccaatggaaccaatggcttcatattcttcgtctgcttcttaaccatcacttggttcttcatcttctttgcccacaatgaccttcgttaacaatggtgggttagcaaactttaccgcacgcctgttctctagacgatcaccatacactttatttcgatcaaaccggttcatctggatctcggttatgctgtccggttcgttaaccgtggattcctctataaactcgaggtcatcttctacttgagggtgttctgctactatttctgacgtgagtgattaatctttcctttagtggctccaagctcttgtg

SEQ ID NO: 53992 - DNA, 506 bp, Arabidopsis thaliana landsberg
  unsure (1)..(506): unsure at all n locations
tagacgactttctcgttcggtctgacgtcctgcaccacgccggagacgcggtgttcctcgctgctgtcgggatcgcgcccatncacgaagaaggggggagccacgcgcgcctcgaacaccgcctcaatgatgttgatctttccagggccaaaccagcgcgcgatttgcgccggttcggtccaggcggcgaagacgcgcgccggtgacaccctgaaccgtcgccggatcgtcaggctcggcgagatgattggctgtgtggcgacggtggtcattcttcttcctccaggaaagctttgagctgatcgagccggaccgtccagaagcgctggtagcgacccagccattcattggcttcccgcataggcccggcgttcaaccggcaggacacggtgcggtcgctcttcttccgggtgacgaggccggcgtctttcagcacgtcgaggtgcttcatgatcgacggcagcgacatggagaagggctcggctagatcgttgacactgaccgcg

SEQ ID NO: 53993 - DNA, 473 bp, Arabidopsis thaliana landsberg
attgccttctgtcctcgtttgttgtcttgttgtgttgttgtcctaaactactttcactacatatatttttgcttatgcttcaattaaagagattgataatcgggtttccgaaagcaatatagaattaccttagacgtcacaaaaagggtagcacttaatcctctgtgtcttactattcttgcaacatcaagctggtggatttctcagtaattattttgtcggaactatgcagaagagagcatctcttgtgacagttcctgctatcgttcagacatttgtttcatgtgaggcgatatgagaacacactctccttgttcctacattgatctatatacctcgaatgatctcaccgatcatgtcttgcaggaaaatatcaaaccatacaccagaaaatgggaaactagtataatggaaaccatacctgagctgcaacttgtgacatcagatatgcagcttcttggccacaagcgtaa

SEQ ID NO: 53994 - DNA, 451 bp, Arabidopsis thaliana landsberg
gtataacgaagcatagaataactcaagtttttttttttttttttccgagttcttggaggacatgtggagctagcatttttggtcgcttcgaccagtcagtcatgtgcatgcgcgttgtccgtgcacgttgtcttttgtaatgctatttagatgaatgcaaacaacaggcgtgactcgacaaatgatacctctgcccgtcagccggcccgtgtatgccaaatacataaataccgtgttttgcacattctcctttcattgctctctgctcatccccacatcatctccatcatgtcacagtcaaaggtctttgacctcaagtaccaattgctccagtatggttcccatcaccataacccatggaatgtcggaattcatctgacatgtattcctctcattctctggactggtcttgtctttgctgcaaagagtggtccactcattgccgcacctt

SEQ ID NO: 53995 - DNA, 911 bp, Arabidopsis thaliana landsberg
tgcctcttatcagtaacgccatcgtgaaagctaccgggagtggtatgttcgatcacttctcatttctccatccatttcttatatgatgagattatttggaactgtctttacatttatatttctgctggaattgcatagaaacctgagcattttgatgatggagctcctcctactttcccttagcaaccctgaatctatatgatcccaaccccatttctctgcacattttatatagatggttcacggaacctttaaaccatacttactcttatgctaaacactggttacttagaagagtaaaagactcgaagtatcaatctcgtcattactttacgcaaccaatggatactttacattgcttgtgaactaggtttattgttcttatttagtgatatagcaatctttttgcaagtgaaatagagttataacggggtttaccacttgctgtcatattctaaagtaatcttgccattctttctggaatctttaaccattttaaggtgtatgattctgactctcattcgttgttcgaaactatttcatcttcatcagactcatttaacttattggttaacaacggcgcagcagctggacaagtcatatttcacgttagcacatactgacttccccaactttccatttctcttatttcttgacgaaggaagcttctactaacagttccttttttgtttgcatttcagacacacattcacataatcccgcgtaaggaacgtgactgcttatgggcttccgaggtacaaaacaagatcaaaactatacattttgaaaggtttatgaaagttgcctgatgtgatagtcttttgttttgtttgtgatgacagagcttacggagacactctctgaaacttgacaaggaagcatttcaactggtatcgtgtgttcgacgacac

SEQ ID NO: 53996 - DNA, 481 bp, Arabidopsis thaliana landsberg
tgatagggttaccatgcatatttttcgtggtttgttggtgatcatccaattaaaaattggcaataaatttgggcaggtaatacaataaacatgctccagattattccaactcaatcggtctaattcggaacatttgattttcttgcatgatcactttactatcaattgagatgcttatccaagtattattcttgcttttcacaggatttttcagcctgattttatatgtatactcatttacatttgtgagttctataaattatttcttcatggatgtttttatctactatgctattattttttctcgcatttattctcacatgagcgtcagtctcagtggatctattttgctgcacatcatctgttagttaattaatgaccttagtgctatttcctctacatatactaatagtctcgatatgactattattacgatatattagccttgtcccctatttctttaggttgcatacataccatc

SEQ ID NO: 53997 - DNA, 907 bp, Arabidopsis thaliana landsberg
aaacagcaaaaacaaaatccacatgtcctaaaagatagtctgatttttgtccataatgctctggtttttgaaagataataattgtgttgtatgacaaatgttttttttttggttaaagtggtatgacaaatattcattggtttgagaagttaacaaaagttggtggctacaaatggtttcctattcgagttgggtccattatcccttggcgtgtacggaaataatacctacccatcataatctgatcaaggatgaggtagtctttaaataaattttgcggcttatatcaatctttatgtactataaactgtgaactctttgttcttcaggacttccaaatcattgcccaatccggttataccttcgctcgttaatatgttaattaacattaaattaaagagctaacatttcttaggtagtaaaatataagtttttaactactatactactaacatgtgaaaatactttagtcacaagtatgacaatatacaaatttattggaatgcaaattcttgaatttcaattgtttgaagattatatatttctacataacaattctttttaaactaaaattattaaagtttcatggctatatgtcaaatatttctattatttatataatttacgataaattagtactccactttactataattactcaacactaaaacacctttttaactccgcctaacatagatatattttcttttgaatgtttcggttaaacatgacagagatttgttttcttgctttcgctcaagacatatttgtgctcctttagaaaagtagtatttcctaacaatccaacattttcatagttattatatcttttaaatattatcatgggtctttttctttcgtcatgtttggcctctttaaaataattcttgaattgtatgagcattaa

SEQ ID NO: 53998 - DNA, 462 bp, Arabidopsis thaliana landsberg
  unsure (1)..(462): unsure at all n locations
ggcgcggaaacggcggcccgcgagaagaggcggccgcagaccggnnntcgcgtggaagggaaagggggcgcccggtgcaggatgcgcgcgtgggaagggggcgtcgcgcagaccgcgcagtcgcggggaagggaaggggccggccgaggacgggcgcctggcggcggcggcgcaacgctccgagggggaggcgcgcggcgtgattagcggaacanngaggaacagaaaccttctcgtgatactatgatagaaagtgatttctcaatattattgtaatacctcagcgtgtatatatatataaggacgaggtaatggaagccctgggctttcattagtaccaggaagccccagccaggtatagccacgtcctgtaccaacatgcgtctcatcgggcacgagttcttactcagacatgttttagcgtaaaacacgaactanaacagcgtaaacgattacgaattt

SEQ ID NO: 53999 - DNA, 660 bp, Arabidopsis thaliana landsberg
  unsure (1)..(660): unsure at all n locations
gggcgaaagaatacacaatgagctaaaaaggaagaaaatatttgtttggaaaaaatcagccatcatcttccatgcatgccaaatatcctactctataaagcctaaagaaggacggaaaacataaaaatcaaaaagtgaacgaatactcgatattcacttttctccgatataccattcagcttttagatattgcatcgtctaggctgaggagatttttaaccccaatatagtttggaccagagtgtcagcctgataaataattactaccaggaaccagttctagttgcaaagctagactttatgttcaatgccttaagaggttagcaacaataacaatggtggaaatagatagggacatatatgccacaacataatgaaatttctattaaaatctatctgagatctttaagcaaggaacaaaacaagaacaagtcgatcaccaaagtcactagaattctccaatctactttaacagtacgatatattcgttgcagcttacatgtcttttgactatatgattctccagagtcatgactttagaagcagtaaattttactcacataaaagtttctaccgtagaattaagatcgattccttctagaaaataaggcatatcaagaagatgttnataggtagtaatgtaataatttcatccaggat

SEQ ID NO: 54000 - DNA, 1053 bp, Arabidopsis thaliana landsberg
  unsure (1)..(1053): unsure at all n locations
ctctttctatgtctgtgcttttacctaccttttctgatcacttatcttgtagtcgagcagaatctctgtcaggttacctaaaattttttaagccatttataaccacatacaataggggtagtccaatgtgataatacgaatgaaatccgagcaggtttctctaaccacactaaaacgaaattcagatatgggtaatgtgtgtgcgtttgtgaagcatgaagtccattgtatcatccctagctgttcattcactttgttttacttcatttcatttaaactcttaatgttttaatgtcccagcaaaaccatcggaagagtcaaagagttacttcagtttggagggttttcagagtgtgattttctgcagaggacattggctaaggaattccaacacatggagtctaggtattttctttacatcttcacttcttaaaacataaagtttcttaaaaatgctgcatcatggagcacaacgttggtaaactgatacgtgtaaaaggctatggtagagacaaaggtccgataccatggctgccttggcattttgaaatacaacatgaacaaccatatttatggtattggagtttacttgcaaaacaaagtgtgctgagtctttataatctggacatactttctcatggctttctctgactagacgtcaaattctgattttaatgctttaacaattttagcttcaagatggctcttcaaatgccctttacaacaatatcaagaaagatatcatgtatgaagttgttgcctctttgccctcttcagttgtcaacaacgcaaacacctacaacaattcccatgtctctttccttctataaggtacttgcagcaacaatcttaatgcactttattatgatcccatagggcatccttaggaagagattgctgattgctatctccaaagtcttcatttgctcctgatatactaaagtctctgtttgcttgtgcagaatgaactttctgatgatacaccttgtcaaagtgggtacactgattacatatctntttcagtccccgatgagaccttcccaaagatttcaa

SEQ ID NO: 54001 - DNA, 1154 bp, Arabidopsis thaliana landsberg
agatttattggtgatttaagattcaaaattgaaaccattccaaaacgacttgggaatttttcaatttgtttttctaaatcaacactagtcattattaatcctaatgttcacaacttttatgggccttcgagcgaaataatgggttttagcccaattacttagcatttgcttcttcttgtattttttttaatgtagataatggtacaataaagaaattgaataatattcattttcgtctatcattgcataattagtggaatgaaattattattctatgcttttttttcatttatctatatcttgctcatcttgaatccatcaatttcgctaacgttttacctgtaccatattagatcctttgtgttatctttaggccatatttcaccagcttgaggtcaagtacttatacacatgtatgtaacgatatatgtaagatgacgatatattattgaataacactaaaggcctagagcaaaaatagtaattgatgagaagttttaaattctaggagcagtaattaagaagaagaacaaagacaagtcctaaaacaaagcatatcagtagtaaaaccttgtagcacaaagcagagaggcacatacatgagtgtaataaatgagctatgcatagacatggacgttgagaacaacgagaaagaggataagaaagagaccatagagaacagtgtgaacgaaaatagaagctaccgtcgtcttcatgttcatgaaacccaccggagattctttccccggaaactgcagtatcaaccctggcgacagaaacgcgaacaaagccgaagctatcaacggtgcagcccaatcatgcatctcttcttacaagaacaagaacaaaagaaaaagaaaaagagaaatggagaaagaaagaagagagtgggaaataggtttggatgggtgaaaaaggagatgatggaattgtgagaatgagaatctgataaagtctagttctttacgattaaaggaagagagagattttttggaattttgctttaggtgaggtgtcttaatttaatcgtaattggctatcgaaggagagtttgaatttgaaacgattctagcttaagcatatcaaatgctcgatagtattagaataaacatggtttgagctgtatatctattctatgcggtttgagcggttta

SEQ ID NO: 54002 - DNA, 1149 bp, Arabidopsis thaliana landsberg
tctttttaaatcactcatgatatctacaaaattgacacgtgtgtgtttgtgttttctttccaattttgactcttcatatctaccaattctgtcattctgagttttatttaatgcaatattttattttattttaatcaaaatttgcacaggaaaaggaaaaggtcctcggccatgatctattcataggctatatagactgtagccgatgtaggtgttcagccccaggctaattatacatatagaaatataaattttctctttacggctatttttttcccaatgattatttggcaatcaacatatgaaaacctgctcactataacacactgttctacattcctgtgcttgtattttatcattgatggaataaacttgggaaactagatccctcttgtaattttatttgtttatcatatctcttgtaatccttcttgattagtatctttacatatgaaatgaattaaaaatgaactcaacccaaggatcatgttttatcgtctaaaaaaaaaggtcatgttttacaagctagaaaacatgcttacttttctcctatatttatctttttctttgttcgcaatctcccctattcacttcttcaccaaagtttctcctatacgtagatttttaataattatgtcttaacttaacattggaaaatcaaaagctattggggtctcgaacatcaaaacaattcttgatgttcatgaacgcaactaagcggtggtttgagttttcttaaatccatttaattgtttggagagttcaaggtcatcttgatcacattaaaaccgccgatcaaagctgttgagttatggacgttgcgggacactaatgaagatgcagatctattgatcgagatgtttggctaagcctacagagtctattgcacaattttcactagatgataaaatagtgcaatgtcgccccacttgaccgagtaaacgcaaacatggcgagcgggaccataaaaaactcaacattcacaaatgacaaactaatgaagttatagcatcaaattctctagatcactttcttgttttttttggggtatcctctaccattgctttggttatttatctcaaatacaaataaggctatatccaatggatttaatatttttgggtattagtatatataatttgaatacaa

SEQ ID NO: 54003 - DNA, 483 bp, Arabidopsis thaliana landsberg
agcggccgcgcgctggccaccgctacccgcacggtgaagcagcgcccgcggtagtccgcgagggcacggtggtaacccggggccgccgcccgcgacgccgggtccgcgggcaccggataggggttcaggggcgaggccgtccccggcgtcgcgaggtcgtccagctccgctgcgcggtgctgcagcagctgtcggaaggcggggttgtccgcgtcgtagggctcgaagccgatgctcagcacggtcgtgaacggcagcgccgcgaagttccgccaccacgcgttccacgcggccccggaaccgaagaacccgtggcacaccgtgtatgtcaggccggtaccgccgcgggtgatccggccggtcgacaggtgcttgcgcaccttggtgaagccgcctgcctggcggggataggcgagccaggaacgcagttccttcggcgaggtgatcggccgggcggccacgtgcggcggcagcgcgccatac

SEQ ID NO: 54004 - DNA, 1347 bp, Arabidopsis thaliana landsberg
gatgccaaatctatatgctaaagagagacttgtggcagaattataatcatttctacctacgcaataagattcttatgaattgtttgtcttataaacaggggatacaaaagagattgattgattggttcaaaagccaaagttccatataaatatgcaacttaacagatactgatataaggcaaatctataggaacatggaaagataacaaaagttcaaagaacaagtcataacccagaaacagaaaaccctaaaaatattgcaatcttccccaaaaaggaaaaaaatgataacaagaagaagaagaggaaaataaaaattatacctttttcagagatttctcacaagatttaatctgatttcacaaactctagtttccttctagatcctgcatatatatattaggaaaacaaaaatcatcatcaactaaaagaaagaaatacttttttatatagcccataattattatttttgtagaaagaaaaaaaagaggttaagaaatcgagagagacaaaccgatgattcaggatcttgacagggaaaaaaagaagaagatgctattgtgaagatgaaacggctatagaagaagaagaagaacaaaacccaataaatttaaagccacaaaaaaatagaaggaagaagacaaaagaaagaggcaaaagaaacggaagaagaagaaagaaagaaaggaaatgaatgaatgatggatgtggtaagcaaagcgggtgcgatggagcgggacagtggtggaagaagtgggggaagttgggttggcgattttcgatatgaaattattaataagttttttttttttgaatcattcaaaacaaaaaaaaactttgagaaaagaaacaaaaaatggttgatagtaaatgtaaacaccaaacaagaaccgttggtggtgctttctcgtcttttctttcgtgagttgtgtatttctctttcattacgccaacttttcattattaccttctttttttttgtttttggtttccttcttttttgttacaaatcccataaaattataggtttgactgatactatattaattagagatgtgtaatattaggatatggaaatgaatagtcaaattttgaaaacaattttgcttaatatagttcggaaaacgttacataacaagttttactaaattcatcattgatgaagttatattgctaatgcatttatggaaggtatatatacaaccattaaagattttgaataaaatagtgagattatttttttaaaacgtgtttatcaccaacattgttatttattaaatgacttgatgaaattactaatttaaggttaatttttgacaaattgttttgactaaaacaaaaaattaa

SEQ ID NO: 54005 - DNA, 1078 bp, Arabidopsis thaliana landsberg
  unsure (1)..(1078): unsure at all n locations
taatctgctgaacttttagagcccttccgcgcaataacaattcattttcccgccaattttacgaaacgctaccgtttcattttcttacatatgggctttcaggctcaagtccagcttaaggtgcgattcaataatcttctccgatccttgtgattctgttgacaaccggtttccatgatatcggttttccttttctggttcaattgatttcaattaaacgccggtttgatttctggttcttacaatgtaatccggttgcttttattgttacgtaagaagatatagataggcgggttgaatatatgggtccaaattaaaaagacaaatgaagaaagttggggtcccaacttttctttttattgggggaaaaaatttaaaattcaacgagtaaacttgaaccttttatttctgatatttatttaaattctgaaaagaggtcattttcctaaatctatagaggtcacttgatcccataactntagcttcgtagctcggggacatggccacttgattcttttattgaaggtccactattcatcaatgtctcaaatttcacctctaacatattatccttggaaatcttttgagagcttcttaagtcaaatctttctcctcttttgtttcgtctataaactcgactacctaaagattaatatttgaaaacttttaacacaattagtacaacaatatacaagacctttttgtaaatttcgatttggaaaataagagatgcctaaatgagtgtagtgtaaacaatcacaataggagttttttgctcggcatatctttggacggagatgtttgcctcaatctttagttaaaaaaataaaccaagtgaatgagtgatgcatcgatactttcattttcgtatgtcattttgtagtttcaatcattatttttttaattttggtaattgacgtagaggaaaaaaaaaaaagaatagtcaaacttagaagttttttttttgttgttttaagatcacacttagaaatgtagtgtcactaaacaagtatagtgtcattgtatatcgccaaagaagattattaaagataatcttactcttggaaaggtagtgtcc

SEQ ID NO: 54006 - DNA, 1476 bp, Arabidopsis thaliana landsberg
tttgatcagctccggtttgctgcagcagaagctttagtttcttcaacctccgcctgtgagatggtaagagttaaaagtttattgtccaagtcccgaaaaagacaatgagatctacttctgttaggttcgatgatggcgttttttttatgtggattatttgtaatcctagcaaaaagtgtatatagcccaaacatttgataaatgaaaagaatatcttgttatataaagagtgtatctaattcggttttcgaagtttatgttttgtgaaatatagaaaccaattgaggaaaaaattaatacatttggttctgtttgacacagtctgtgtttcagtctgatctggtttttgagaaaatatttaaaaaaaattaggttttagcaggattacttttttggggtttgtttagtttcggttacggtttgttcaaatgcaaaagattgaaatttgaaaccggatcagatggttttgtactttggtccagagtttttggaatcggttaaagcgaaatggatacaactcagtacgagacacataacgaccaattcaagagaagaaaataaaaaagacagttacatgagagacctgaacattcgaacaactaactacttaagaagacacttacacatgtttagagataaagtatcacatgttcttcattcagacacgcgattccattttcttgacagcattttcgatggctggcatgtttttcttgaaggttgaccattgttcatctgttaagcttattcctggagataacattataacatatcagagaccagacatgaatcaaaaatattctcaatatggtccattttgagtaaaatggttgtcccttttttttttatctatagagaagaaaagatgaactatattcaaacccaaataactattctcaaagtagataaaacagaaactatttaatgacttttacacaaaatatcaggacttgcacaaattcaaagatgtaatacagaacaagcttaagtgctaggttaaactaaactaccataaactgaaagaatcattcaagtcaacaacttttcggccataatggtttgtaatcaccaaagctttttacttaatatacaaaactgaaacttaacacacccaaaacaataacaactctgaatcatcattgactccaaatttcgaattgtgaacaaaaatcactttgatgcaactctaaagtggaacttgaaagaaacatttgcacataaacacagaatttggctctacaatttctgaaaaattgtgatagaacaaagagagctttaaagcacctttagaagtaggaagatctttgccatctttcttgtaaaactctctgatagaaaccaaagccttccctttaaattcctgaatcgccactcttctcttatccgataactaacaacaacaacaacattcaaaattcagaacacaacattcactaattcacaatctctgcttcaaagataacactattagcttct

SEQ ID NO: 54007 - DNA, 232 bp, Arabidopsis thaliana landsberg
gatggtatcggataccgacacaaggactgaccgaccgtccgtccgacattattatcggctcaaaactttacaggagacatttccggcgatcagaaagggtgcatttttccgagttttctgagtagttcaccgcacataactggcgaatcgtctatacactgtactagctggcgtaccttccagtagctcaacgtaacgatacggtagcgcccgtatagaattgtcgaagctg

SEQ ID NO: 54008 - DNA, 963 bp, Arabidopsis thaliana landsberg
cttaagttaacgggcatgtaaagcattctttttaaggatttagatagagtcaagctttccacaaaggcaacaaaagatgcatgcacacgttggcgaatgtaaaatgttatttaacatattataagataaaataagataaagatgtttttaaagtaaagtaatttgattttgaagcactaaccgatggaaaataatggagaaaaacagggaaaagaacacaaaacaattggaaatagtatacactctttaaaggcaaaaacttaagtattaagtactttttaaaggcaaagcggctaagcgagggagccatgtgcaggacaaactttgcatccgcattacaaaacgtgtgattgtgttacaacgtacaagtcacaaagtcacacaaataatccgaaatggtgttgacagggcgaccagaaatagctataaaccttacctagctctaacgtaagtaatcactttttccttctcagtaatttatttttattgcttctctttgactctggagatggactcaacctcttatacaagctccatggccgattaagggactttgttggaccgaactccatgaataatatgccgtaatcttagataaaaattccttcttatcattctatttaatttaaatggatgttttcctatcatgctgatgtcaagtatgaaactcatcaccaacaataaccatgagcgaaagatctcgcttaaatttgttgcaaactgaatcgctaataccgaataagcgaaaaatatcccaacaccaaccattaaaaagtgatttgacgttatatacatccttaacttatataaaaaccaagcgtttaaaactaaaaccaacaaaaacacacttgtaagaagaaaaaccatagcatgtccattgcacatatgaaaaaggtgtctttagcaacatttaaaaaatttaaattacaaaatattaataattaaatgtgagaggtctttaaa

SEQ ID NO: 54009 - DNA, 632 bp, Arabidopsis thaliana landsberg
agattctactactctgctcgaaagtgattcatctaatacagctatcattcctgaaactagacaattaactcttgaaggcttttcattgagcgtcccagctgatcagatgagagtgattcataacattaatacgctgattgctgaggtagtttttatggatgattgatttgatgttttctttagctgtgagaagcaatactttttaattctcaaggtgctatcattttctcaatctggataataacgtgatgattattttgtttcttcggctgcagttggcaattgagaaggaagaactggtgcaagcactgtcatctgagttatctcgaagtgcgcatgtgcaggtacagtaacataacttcatggggctaaaaacatgtcttctttgacttgagtaagaattttctgtcaccataacatcatgcataagttctctggctgagctttctatatggtactccgagtcctcatagactcaaaatccaaggccttgtcttcttcttatactctttttttttccatgctggtccctgcgctccttattttctctgggtcttttataagttgcgtttcactgcttgtgcgtttcctcccgctccccaaatcactcatactttctcatgtttcatacc

SEQ ID NO: 54010 - DNA, 362 bp, Arabidopsis thaliana landsberg
gtgtggatttactaaaatttgcacgcatttaatgaagaaaaatacttttcttttataactggacttaatttacttaatggaactcacaagataagtgctatcttgcgcggaccacgtgatgtggaaaaaacaagacctatcttattttctcctgactggaggctatcactggatgtttaaaacttggcatgaggcatttctattaccgactccttttgtgcttataggtttctttgtttcgagattttgtagcgaatgcagtgttaaacccatgtctctcagttttagttaaagacagatacactcactttgaattgcgtatctgaatcaacatatccttgcgcgctttactcgtgcttagt

SEQ ID NO: 54011 - DNA, 490 bp, Arabidopsis thaliana landsberg
tgtaagtacctccatttataaaatcccttaataaaggcttaactaaaatttcaaactccaacgctgttggttatacttgaatatatgacacacaggtgttggagtcaacagaccatataaattcatgtaaaccactgagccgctcggatccttcgtatacagaggcgttgcagttcctgcgcaactcagcgcacagcgattaaaacctcatgttaaacgggaacctgggatacatgattgattaaccatggttaggttaaccgaagatgaaccaaaggtcattggttttggctaattgacgctatagtttttttcatttcttgtgtgtacataacaagaaccacgcttaggctcttttgtttcattttacacattgtttcatctgtattactggattacacaattggaagtaaatataaagattctcaatttcatttgccagtgttcttaaactcgtgatgaataacgaacgatgatgattttaataaca

SEQ ID NO: 54012 - DNA, 877 bp, Arabidopsis thaliana landsberg
tgctcatgttcttttcttttgtttgctttctaatccacgtaatctgtttgctaaatcaggtaacggcggtgtgaaacagtacaaggaaaccgcaagagtatcgatgtgatgcggagattgttgaattggtcaggctatgtgtttctcttaggaactttcatattggtttctgttttaggactatttttctacagtcagtttttgtctctttttaagattttcaacttggtttatgcattttcttattttaagacttcattgaaactaaataagctgtggttgctttgtctctggacaaagttttaatgttataaaaaccattaatgttcttatgctatgattcacctgttgtgtgttatttgatatgtttgtgttgctgattttgttttctgccttcggcacaaaacaaccttagttagtatgaacaatgcaaatttgtacgaaatgttggcaaatttttacgcttcatactgaaaactatctaatcaattatccatatatagaactttgactatctatactgaacaatcttaattatccactttcgaaaattgtgatcattttgggccaagtacatataacgacattaataccctatctatatttgaaaaaatgtaataattaaagttatctattttcagaagagaattaacctatttttggaaaactatatgtagaaatagaaaatattatctctaataagagcgttccaactatcaaaattaaaatattatctctattcacctatatttggagaaaaatatctcaagattcatgaccttttaaaaaataaacaataataaagtagctaatccaaaaaagtagaaaataaaatctctcactaattcattatattttttggatgcagaaaaaacaa

SEQ ID NO: 54013 - DNA, 409 bp, Arabidopsis thaliana landsberg
taaacttgccgcatagctctctctaggctactcttgcaaatctgggcgtttggatctttctagagtgttgctctaatgcgtatgaatgaatgtgttgctcttgagtgacttgggtgcttgactaggctgataggaggggtatctatagcccaaatacccaacaaagccattgaaggaaaactgccaaaattttgctttatgttggttcattggacaggtctggtgcaccaccggaccttaacagttgcctgccatcaacaggtctgcctcatacttgccttcccccagggcaccatactagtccggtccaccaagagacctgccacatgtcagctagtcgttgagatgaccgttgaaggctagttagccgttagaccccatggtctgggtgcaccacagactgactagt

SEQ ID NO: 54014 - DNA, 501 bp, Arabidopsis thaliana landsberg
gctctacgttagcagctccatcttcttggggacatctgtcctgaaacaatttaagaagataattccatggcgcatttgttttcttgatagctataatcactcgagcaacatcttcttaggggaaaattttcatttgaagaagctagcatgatcaagattcatcggtttctcatactggactgcaacacactgctcagtatcaacccaatcgccattcacagcgtatgcacagctctacaaatagttaacattaagctatgctcttgaagattttactttaattcattggaatatgtgagaagatcctataagaataataccttggaacaagtgtagacaataagtgtcatccaatcccaattatccaatgattgcttaattcctttatcaacaacaccttcatgtagaaaatatatttaatggaggcatgagttgtatctcaaagtgccctttgagagtcgcagttcctgcatttattcccagatttcattgtcttttgtg

SEQ ID NO: 54015 - DNA, 622 bp, Arabidopsis thaliana landsberg
  unsure (1)..(622): unsure at all n locations
gttcgtatatatatatatacgtacgtacgcgtacgtaccatgacggagagcggggcggcgtacatgccggtgccgaagaggacgcagaggatgccgaccaccatggacctgcgctcgtgcgtgtgccaaggctgagcaccagcgcggcgacggcccgacgaagcccacctcggcggccagcagcaggaccaccttgcgccgcgcacccccgcggagtagaggaggaagagcgccacgtaggtcagctggatcgccatgccggtgccgttgatggtgatcaccagcatgctgtgcgggtgcacgccggcagcccgtacagcacccacatcatgcagttcagcagcgtcgccacgtannnnnnnnnnnnnnnnnnnnnnnnnnnnnnnnnnnnnnnnnnnnnnnngaacgtaggcctgtacgtgtacgcgtcacatgtatattatatatatgtgcgtgttatatatgcattcataaatatgacatgcatacgtcccgcattgtatgtatgcacacgtactaactagtactatgattatattgttgcatgtgtttaaacttgtttttttgtccttactgtactgagagcaaaatgaatgaattgatcttacactggggagaggag

SEQ ID NO: 54016 - DNA, 590 bp, Arabidopsis thaliana landsberg
  unsure (1)..(590): unsure at all n locations
catgataggcattttcctctacgattagtacctttttgggatgcttactccaaacctcttccagtttctggaacatttctttcatctgctccatggcaatcggcttgctaataaagtctacagcacccttaagcctgctttcctttttagcttccatgaccgacatgatatgcaccggcatatgcctggtagcactattactctttaaagcttccattacttcccagccatccataaccggaagctggatatccagtaaaatagcgactggtttatacctttcagccaaaggcaccccatgatctccccggacagccacaatccctttatagccccttttgcgggtaaaattcagtaaagccttggcaaaagccgtgtcatcctcaataatcaataccaccttgtgctgattaccgtctgccaccaataaatctttatcatctggtacctcgtctgggatcgtcggtactacacacttactttngttagcttgggcggcagatccacgtcgagccttagtactagatacngatcttggtatatcaccatcaccatcaccatgaccataaccagaatcataaccatcacca

SEQ ID NO: 54017 - DNA, 907 bp, Arabidopsis thaliana landsberg
ctccattttaccatatgagagacgtcaggggactagcactccatactcttgcccttgttttatcagatactaggaatgtaacatctgacgtgaatgtattagcaaatccattggccgaaaccatgttcctagggccaatatacgatctttcaactgctaacgcagccatgtgcctttcttccatcttcaaagaaagcgacttcccaagagcaccgtcccagggccaaactttaagagcacctccctcagaccctgaccatatatctcctacacaattgataaccaaagttgtgtcatccgcaagggtgtcatcatttattcacattttgaaattgtacaaactgtactaacttcgatcatacactactgaaggcagtgaaactctaactcaacaacacaattacaagacggactctataagctatttataatgtaccagctactacatgactaaaccagcttgtccggtggaactagaggagccaatatacgtgttagccagtataacaatctgattcaggccgaccaaatatcatcaagatcactaattttgttcctcaaccaaatttccacaataagaaactcgatgtaaccattcaaaatccttcttctttcatcttaaaaagctacttaatctaacaacaaatctattcccaaactatgtaaacaaggaaaacagaaacttacaatagaacaacactcaccataagccgagatggcaatggagagaaccggaccacgatgagcttgccatgacaaagcttcttcaataccatgatcacctctcaatctccaacacctaatcctcccatctctatgtgcactccaaacaactctactaccttcatcaccaatcatacaaacaacagcagcagacccaaactcattccctaaactcttcttatac

SEQ ID NO: 54018 - DNA, 1329 bp, Arabidopsis thaliana landsberg
  unsure (1)..(1329): unsure at all n locations
gataaatatttccttgacaacattgcagtttccaccagcaccttgatcatgaatgctgataataggattcttctcacccatctcaatacaagcacgaacaacacggtacaacttctgagacatttcagcatctccacgttgcacagcattgaaatcaagctctgcatcattctggccactaaccatactcgaagctgctcctcctcccatgccaatgcggtaagcaggtccaccaatcttaacaacaagcatcccaacctctggctcccctttagttatatgagtatgatcaatctgtccaatccctgcactgaacataatcggcttcaaccattctcgtctatccccacttggcagtctcattccaaaagtcctagtatatccctgaatcatgggctctccaaatttgttaccatagtcagatgcaccattactagcgtcgatgagtatctgtagaggtgatgctaggttcgatgggtattggaaagacgagtcttcccatggagcataagatccctccatgttaaggttaccaacacagtaaccagaagtggatgcaaccacaaaagaacctcttcctgttgcatgtgtatctctgattcgacctccagcacctgtctcagcaccaggataaggagccacagcacaagggaaattatgggtttcagcagtgaacaatatgtcgagatcacgtgcactgacatcaagtaagcacacagaaccaggaagtagaggccgtagctggttcaccagaaagcctctaatagcactagagttatccttaaacccaatgacagaattatttcgatttgcctgcaaaattcaacacagaagataagagtgaattatacgaacacacatttcaaactataggaaaggagagaaattttgacttaagtcctttattgttacctcccaagtgctctttacaatctgcataagagacttatccattggctttccatcaataaccatgttcccagcaaagaaccagtgtcgactgtgctcgctgttggattgagcgatatcaaatagctccacattggtaggatcacgcttaatgtcctctctgaaaagtctagtataatactgcaaatcttgctcatcaaaggctaaacccatctcctggttgatttcttccagcgccttccgacccttctccatcacaggcacatacttcacttcttctggaaccacattcgtctcgaatgaaaccagcttttgagtgtacacgcactcggncattctatcatgaaccattgcagcaaaatcttttatctgaattttcaaaaggggctccttgctgaacaaaaggtacctccttgacct

SEQ ID NO: 54019 - DNA, 987 bp, Arabidopsis thaliana landsberg
attgatattcgcttatatgcttcaacaatgcgcaaaaaaaccagcttttgtaaactgtctttctcttcatcagaaaggtcgacaacaggtgctgatatcttaggtaagacaaactgactcgcagaagcaactgtgccaaccgcctttggactaaattcctccgacttatccacagacattgagggaattacatcgacaagaagttttccactgaaactcgcattttgatttttgcttgcagcctccacattcgtagaactcaatacattagtaacaagggctcctgacacatcatgttgagcagaagattccagtccaggtattccactttctctattccctatgtaatgcacattttgtggagacacagtattgctttcttcattttctggaaaagaagtatcacaggtagctaataagccaggtggagttcttgcatcttcagctggaaacatttgctggtccacatgaacagaatagacttcctcatcttcctgttattggtgagattttagtgtacaatacaactttaaagacgagaaggtaaaacaaggagcataaaatataacacagatagaaatactaaatcgagcaaagagcacccatacattgtgaggatttatcagggcagcaattggtgggaatgcggttgacaatgaaaggacacccgctacaaatgatggtggatatttaatttgtgcatcactgccaactatacacatgttcatcaccaactcatcggtgccatcagcataagaagaacaatttggtggaatattatgcatattagccatcacaacatcagtaagtaaatccgccgaaatacttgaaataagaatttccaaagatccaattgctttttcaccctgagaaaccaaggttccaaacaaaccaactaactgctgagcaggtccactatcactacaacctcatgatatcacttggtccggtcgaggtagaagcaacccgaggtagagagacccgatc

SEQ ID NO: 54020 - DNA, 679 bp, Arabidopsis thaliana landsberg
caaaaccggtttcaaaatttttccgaacatactttttttttaatcttttgttatcgattaatatatagaaagagatgtgttttttctttctttcgtagattattagaggttcattcacttgaaatctacgctacggttttgatacatgaaattattagcctcaccaacaattttcagaaataaaccctcacacatatggttttgatacatgaaattcttgatggcattcaagtttagttacatgtaacttaattcttatgcatgttagccttgatcgaagataaggcaagaagattcaaattatagaagtttttttttttttttcatctgttatatcatcatataagaaatatttgatttaatcctattatgatgtagattacctgcaatatatgcagttacgatgaatagcttccacaaacaacgattctacgatgtagttttctcctgaaccttggatccacgatggatggttatgcatgtacgacatccgatggacatgctctcccacaacacatgatactgggacgaatttctcggcctgcattattctaaaatctccgataccgatattctgcaagaaattgtgttatctagtattcgaaccccaaaggatctgtaaacccctaactaatggactaaggatgctttcacaaaggttctttaatataaaacgatg

SEQ ID NO: 54021 - DNA, 604 bp, Arabidopsis thaliana landsberg
gctctggccagatcgtcatgatgggcggcggagaaaacgtgatcctgctgagcatcgacctgtaacaatattttcaaagtcggttcactatggcaaatactttttgaacacatcttcatcagacgtttacattactctctccaagagtgatggacatatacttgtgaatctcttccaacgacctcgacgcagtctcacacttaatggctccttgcccgaccgtgcagggatgcgtctcggttattgtgtgtgatgcttttattttccccagatactggctaacggcaacagatcaaaccattatatcaccaatgatctctaccactcaagcccaaaatggcttttgttcgacattactacccatggctttatctagccaagacacttcagctgttgcattgctcaatgcaatgatagccgtggcaatgatccattactcaaactcgatagctgatgcaatgtcgttcaaactgaaagccgaacggaacttgtcaatatccctcgcaagtccgaggtcaaaatgcacatcaaccaatcaagttcagctggcagcagtaatgatgctttgcgtttacgatgactgtgtgaccagacatttcgttcg

SEQ ID NO: 54022 - DNA, 544 bp, Arabidopsis thaliana landsberg
aagtgctgggccgggtagccggtgatctcctcgatcgcgtcgttgacgaaatccacgctgtcgcccgggcgcgcgcggaacacggcgcccggcacctgggtcacgatggtgcggaagcgctcctcgcgccggccgatgtccttgaacagctcgccgatcgcgatgcgcatgcgctccatctggcggcccaggcggcccagctcgtcgctggtcctgagggccagcggcgtgtcgaacttgccctgcgacagccggtccgagaaacccatcaggacgcgcagcggcgccaccaggcggcgctgtagcagcagcgcgatcagcagcagcgagaccgccagctggccggccagcaccatcgcgtagcgccgctgcttgacgcgcaagtcctgctggctgcgccggtcgttcatctcgatcgccacgcggccgatcagctggccatgcgcgacgaccttgcgttcggcccgcagcacgttgccgccgggcgcggagcgggccgcgctggttccatgaaatcgccgtcggtctgcgcctgcacatgcac

SEQ ID NO: 54023 - DNA, 686 bp, Arabidopsis thaliana landsberg
  unsure (1)..(686): unsure at all n locations
ntgagatcacaaactctcaacagtcgacctaaggatattatcttgggtgacattggtacgatctttagaaccagccatttgtggccgattataatagatctagaatacacttgtcccaagtggagtcaccaaaaagtgtgttggcaccgatttggtaccaaacactagaatgaacccatctggcggtgttctctgcgggacgcggacagtccacaatgtaggaccggacggtcgcggcctcgctgcagaagctgatccttctccgcgtgcttccgtacggtccgtgtctggggtcaaacggtccaccatgacagagtcttcttcgtagaaacctaaatctcgcctcccgagaggggtcctattgaggagagatcatagggttgtcttgggaccgacaggccacccaaaacacctttagacgacgtcaagtcgaagagatgtgaagaaatatgttgaggaagcgtaatactagagctagattagtcttactcctaatgcatgaaaagaataaggcaaataagataaatatagtaaattggtttgattggaatgattatcgaggtgtcattcgatcataccctttcatttatataaaaggagagatctagatctgttagcagtcggtttctaaccanaccagtagagtttgctagcaatctttaaagaactataaccattattgattt

SEQ ID NO: 54024 - DNA, 502 bp, Arabidopsis thaliana landsberg
gccgtcgatctagaggataggatccccttggacgccaatttctggaaaacgtaggggctctgacgtaaaagaaactaagactcagggagacacccgagtgggttacggatttattcatgtgaagtgcggcgtctctttagcaaagtgtacccacgaaggggtaccggccatttctggcgttggatttgattcggtcggcacaaattagatctgcatttccgagcactggaatgagataggaaccgcccgatctgagatcgacggttcaccgtgcaccttcactcacgaccttcactcacggccgcacgatctaaaataaacggtggagccttaaaaccctacagattccccttggtcgtccgaagcctggtcaacgatgcagattcgatctcctcaaccggtacaccccgtttaatcagggttgtccgctctcagatctacgacacaacgcggtcatcattatcccgagcttcgtcgatggcgagaccggtgtggcatgacg

SEQ ID NO: 54025 - DNA, 979 bp, Arabidopsis thaliana landsberg
  unsure (1)..(979): unsure at all n locations
gatttctattccgcagtatgatcctaatcaatgtcacccacatagatccatccttgaaactgatgtaaaccaaatagatttagattttacttctatactagattctttcgatcctctagtagatgagtgccttatgaaggaaaataatagctttcttccaaaccctaccatgaaccttttggataccgatatagacaagatggattgggtttcatttatagaaaaccatagtcaccatgatatcaatatgaaccatatggattgggatccttcaacaacaaattacgttcttcctgaaaccaacatgatcataaattttcctgaaaaacatacaaacgagataggttgggtttcttcacaagtaggttatgttccttttgaaaatatgattccctctgaagtagatataaaccatataggcatgggttattctggaggaagtattccccctcaagaagaaactaatacatataatgtgggctttgtttcttgtgaaacacatagtgaaatccctcccaaaactaatattctagaaaccaattattcaaatccgttagattgtgttttccctgaagatataacttcactcgaaaccaataccatccaaaagagtttggtttcttgtgaaacaagctacgatgctttggataatatggttcctttggaaactaatttggaagagatgaacgatgctctttacgatatttcgattgaagatctgatttcttttgacattgatgacaatgagaaggatatattctcttggttagaagacaatggtttttctgaggaaaataatatgatggagtcatgcgataatatagaatctgtaaatcaagatgatatgaagatagacgataactntgatgattatcgtgaatgcatggattggattaacgaagagatgaataaagatgtatgaataatggtggaaaaggagaaacacaagattaaaagtagttattaatttaatattttt

SEQ ID NO: 54026 - DNA, 581 bp, Arabidopsis thaliana landsberg
ccacgctttccattcctcttacttagcttagcgttcacttatacaacgactggtgaacgaaaacaaaattattgttaatggcatgacgatgtgtgggtgcttctgggaggttgcggtatacgacagggaacttgagaggaggcgagtaattgggtcgatccagatccaagctagtagtaaattcttgaccaacctggaagaaggcttggtctgaccaatctccgaaccagtcgagcacacagcgattgaacagtgcaggagatgttgcggcacgagatgcaaggccaccctccggtggattcattgtgaacacaacatgcaggttcttcatgacctgctgagtgaaccacttgtaaagctcttcgcttgagtccagcatcaagccgtctctctgagctccttctttacattgagtcatcaatgaggagtactcgtcgccttcgaacaatcctgggacctcagcgttagccaacagtgtgttcatcctctccaaaaatccagagtcaaggacgttggacttatcgaggataaagcataccttctcgctcttgcaaccagcacgacgaaggacagttcggaga

SEQ ID NO: 54027 - DNA, 1015 bp, Arabidopsis thaliana landsberg
tctaaggtcgcgtctctagtgcctctggttccacgttggtcgtcaaaattgaaatcgcgtttctattttgttcacgaggtttcttttccccgcggcttaggacaatatgatccgaatcgttgaagaaactgtctccttgtgtctatgtttcgttttgatcccacattcctaaagctccaggtaccttttctacgtttcccgaattctgattagttgattcttcttcctcaatccgttcttcccaaacttgttgccgatttttggatccggtcatcaactttgttgtttatttgtcatcaatgcaaaaattgagagcgtctgtgttttcacttgcatgttatcaattcctaatgttgtttgccgtttcattaaccggattcgagactcttcccgctggatttctttttttcacgtcttcttttctattttttatggatttggtattttgacatgttaagcaaccttcgttaatcagtttaaaatcggtgctttccgaaatttttagaagaaacatggaagcttaaaattttgaaattgctatttggaaaagctatcatttcataggcttagtctttgtaattcttctttacttgttgttcattggcatgaatatatgaaggattttatatttgattgtgtgtttgtttatgttgttagaaattgatcaaaatgggagaagctggtcaatccagagacggagaatctgtcacgcctcttgttgtaagtattgtggcttccttttctcactttttagataatactttcagaaactatacttgctttatgctctcatcttaatggaattctgtttggagtcaacttaacgttctcttggtttctatatcaacggaaacatataagttgattaaaatggggctaaagaggatattcgtaatttttggttctttatgcattgagactaccattctaatatcagtaatttttccatggcccgggcggtggtaatggggacaatgcggttgcaccacaagtgtttaattctttaccagctctt

SEQ ID NO: 54028 - DNA, 807 bp, Arabidopsis thaliana landsberg
accacaaaaaacaatttgcagttatataaaacagaaaacgtaaacagattaatgagtctcttcataaaagagtttaataaaatcttgattaaagtaaaatccaataacatcaaaatttaacagagcttaataacatattgattgaataacaacaaattcctcataacagtagaacattctgtaaatcacaaaccaataacaccaccttagtctctttagctcctacttcatatcttttgtttaatgattaattacttatacaatctagatattaatgtttatagatgctttattaggtatctagaatataagatgatggaggaccaaaaggtgttgtacaaagacgctttcaccaaaaggctagatactgatattgctattcttgaggatatgaagaccaccataaaagacgaagaagtaaatattcgagcaagctatgcggtatcgactgcatggatattatccgatatattcgtggagcttatacttaacgattcaatttttatcgtggagttcattctcagaatgtatgaaagtcatgaaaaaattggtgacatgattgtggacaaacctttttacacttccacggttcttgatgaccttaccttgctcgagaatcagcttccctacttctgtttaagtaagttgttaaaccccattacaaagagattttgtggagatcagacgctggaccaagtcatcctccaattattttcagtcaatgatagtggcatgatcaatgagaatacaaagttcaatcacttcacagatttattccggtgggtttacaaggaatcacttggccag

SEQ ID NO: 54029 - DNA, 485 bp, Arabidopsis thaliana landsberg
tatttgcttgtcacactaacactatcaaattctttcaaaatacacaattcaatttcattctgtttttggcgtatttctgcattttagtataaacacgcgtgtacgattatatttacacgtaattgtcgctgaaaacacaaacacatggattgtttgtattatgtagattagtgacgtcatgatgagtcaaagaggactctcagggtttctccgcgtctgcaacgttcttgatttaaccgacgaagcactgactacgacaccgggttccactctcgagcccatcgggtcgaaccgcacatcttccgagtcaagtggtaacgaaggataagacatgttctggtgtcaggcgctcgctttgcaccgccacttactgtaatcgttaggaagtgaagaagcagcttgtcgacgacttgcaggagagtcacggaggtggtttcaactgactacacggaagctccgagtgaactttttaaaccgtcgggaag

SEQ ID NO: 54030 - DNA, 995 bp, Arabidopsis thaliana landsberg
atatagagatgaaagaggaatcatctggatcatgcggtgaagacaagatgatctctttcgaaagccatctagattacatctatgggactcagaacttagaggatttttcagagaaagtcattgaaaacattctctatctcgatgaacaagaagaagaagaggaagatgttaaaggatgtagtagtaatgctgctaagtttgttctgtcctctggaagatggactgttaaccaaggtaaagaaaaccggattttggtttgaccgtattgattcaatgaaccggggattcactaacttggtttcatgtgtacagatgattctactctacatgagacaaagaagcctaccattgatcaagaatttgaacaatacttctcaacgctaatgctgtgacaaaatgatgttgagactcaaaacatatatgaagagatgtatgtacacagaactgtactcgttctgttttgattcttgtcaaccttaaaaaaacgttcaattcaaagtgattagagagcttctttgaaatgtttgcaactctagtcttcaacttttaagatttttattagcttgcaaaactaatcttgcttatatatcttgttctgcctggatcagaaataaaagttagtataaaaaaaatctgagatgattatgacactctgatccttcatatgaaccaatcttgtgttcaagagtatccctgatgtatttcagtaccaacttaactgagaaatgagagtcaatgttctttaataagtttgttcagatgatatcttcttcttctttttttggttggtcacctatattcaatctgctctctccaaattatctccaatacactctcttctgaacataatacaaaaattcataactttttcttattatggtcaaaagtcttgttaatattcaacttgttcctttctaatgtaaaatctaaactgatttaataaagaaaaagatgatcgcttattgatattcttcctaggaaaacattttggcatg

SEQ ID NO: 54031 - DNA, 1159 bp, Arabidopsis thaliana landsberg
  unsure (1)..(1159): unsure at all n locations
aattaaaagatgaatttattactgatcttttttattgaagagctcctagagcatatttccggggtgaggttattcagctaattttctaacttttttttgtcgtttttaataaggactattttagataaaaaccaaaaactaccatatctgcgtgttatattacgtaaatgatttttagtttttgttttggaatacctgtttttttcctntatttaaaagttatgattctatgtatttgaaaacaaaatgatattactcaattaattatagtattaagggacatgtaaacaaacatacgactggctacatttgtttatatctttcggtaaatcgtatgattggatacttcaaaaactattttgtataatataatcctccttatattagtataaaaagatattttactataatcaagtgggtttgcaatctaatagtgttcgttctatcaactgaactcaataccatataaaaaatatcacagataaagaaattactttcaaccgatcgatgcacttctcacaaggttagctataatgaaaatttccgtattttactaactataagcaattgtatatctctagactctagatatgtgcatgtggtttgacgaatattactagtacttttatattggtaataatgaaaccattaattaagaatttagtctcggaactcataacaaagggtacgttcacgttgggactaatgtgaaagacaaaatacgagagggatgggtttatgaattatgaggaaccccatacttacaaaaatttccttccaaaggagaagcaatcaatttggagatgaagtgtatgtccatcttctaaacattccatctctaaagtcaaaaccctaaatttcagttccaaaatcgataagttatttttcccgatgcatgcacatgcaacactgtaattaatttcattcacgtgtcaaggtggactggatggtgatcatnnnnnnnnnnnnnnnnnnnnngttattaattgtgtattaccttttatagaaagttntcttgagcacacgataacgctaaaacttgaagttgcaataattggttacgagatattgtcaaaatattcgttgttacaaatnttttgattcatgtggattctgaattcataatttcatatttactgatatagagctttgaaaacat

SEQ ID NO: 54032 - DNA, 1227 bp, Arabidopsis thaliana landsberg
gatatggttgatgttattcttgactcatgactcatgaggatacattttcatttatattgtctgctctttaatctttatatagaagaggatacattttcatatcattagatgcaattcacatatgaaagattgtgtgattgtaagcattttaagctaacgtatattcctttttttaggaaatacaccacatgatcaaatctatcttcaacgttttcgtgtcataatacttcatgtatgacaaaattctctgtaccattttgacaactactggctttgtcttctcccaacactttgttttcaacatgatggtgttcatcagttatgtgatggtggtgacaatgacattgttcatgcccttgaccatataaatcgtaggagaaatatctgtccttttatattatcttgtcttactggaccattgaatttttttgtctctttcatcagattaagttatgtaaaccttttttcttcatagaagttcttatatgagctttttcttttttcctcaagaagaagattacacgggtatacatactagagatagaggtacagaggctaatctcttgacttgtaggcttgagcctagggaagacaaatgaaggtgcagtgtattccaaattagcaacatctaaaatttaggattttgccctacaagtctcgaccagggggtacgacactaatcacaatcatataaatctagtggaatattaagttttaaactattaatcaaacttagctctccatctatgacggcaaatccgatccttagtcaagaaatccaaatgatgtttcacacaaccacacagtttatcgtatattacaacaaaaatgttgagaaatgttgcaatatagtgacaacaaacatcacgcactatcactccttcctccaaacttgtctaacaaagtgataccaaaatagttagtacttcgtttgagcattctaaaccggaattttaaccaaaagacactcgaactatgacaatatatcaccctttcttttagcttatatcgattaatgcccggcccgatcttcggatcaaacattagacttcataactcaatagtgttttaagtgagttactaaccaactgaacaacaacaatccgatccaccaacttttcaaaatgtcaacccctcccaaaacacaattgccaataatgagcttaaaaatttatatttttcttagaatatttaagcttaaaatcattgccaaacttgaaattttag

SEQ ID NO: 54033 - DNA, 1187 bp, Arabidopsis thaliana landsberg
tagatcaaagtatttaaggttgttttttggttacagttgattccgcagagaacacaaagagcaacctctttcgctccatcttcatagacgtgtttcgtgggagaatcaaatccaaacactttgtctgtaaaacaaaatttaaaaaaaatcttagcatcatgattccacaatggttgaatcagccttgaatacttctgaacatcttaccaaatgtataggtagaggggaagagagacctctcaggcaaattgttattgcatactattgttgtgttgtttacacattcccaatcacatatatcattcctcgccttctctttctcgttctgcggccttacccttaccgaaaccaatatcttctccccctttccgccactcgccattttctataccctctctttcttcaatacattcctaccggaattggaaccccttgcttgaagatgaagggagagagaaaaaaggtttaggttgagaagaataatggatttaagaaaaagatagaattagaaggcaaattctaataatgggtgataattaaggctttattggggtttcttcttcctcaaacaaacatctatatattctctaaaccctaaaataagaatgtagacagatatatcctcagctaacctatgacctggctaagctttttacactattggccaaaaggcccaaaacgatcaaaatacagatattagagaaaattgtatccaatcaaatattgaaatttgaaaaccatgaatgcgttgccttgtcaaacacacaactgaaagcattggtggcatttaccaagaatctacccttatgttctatcttacaaataaaaaagatcgtataaattcattgttaatatggaacaatattacatattatatgagcgacatattatatgaaccggagaacgtaagtgaatatgaaaattaacacaaacacttcataaagtcgaaaaatacaagtaaaggaaatcattcacatcattattttacctctctattactctatatcgatgtttttcttttatgtacgaaattgtttcacaagcatatcctaagttgtattaacatgttattgagatttagggctttgagtgtttacttctcacacaagaaacatatagatctcacaatattatgtatgtggatatatgagttttctcttttagaactctctgtactcgtcgattta

SEQ ID NO: 54034 - DNA, 603 bp, Arabidopsis thaliana landsberg
taacgaacattaacctatatgttcgataaaatccataagttgcgtctatttgtgtaacaaacattaggccttgagatttatttgagatttaaatcatcttatggtccaaaaaacatgtgaggttttaattaatgtccgtacaagttggaggaaatgaaaacacgcaaaatgtacacggaatgataatgattcaactaataaccgcgatttcttggaagcttacatgtttgtgtagtgattaggctttgatgtgtacatcttgtgttgttaacaagttgcagctagaattggtcgatatctatattatcgaagtcaatgaaaattacgtacacatattgtgtcgtcaactaaatccgtatactatccataagagcaaagaactggtactccaacactatataataaagtctgataattattattaacattttttatatatataataaaaactcttatcaaaacaattttgcctacggctacttctcaaaaattatgttatcggtaccatcatttttaaaacattagactacgattgttaaaatggaagctttgccgtggaggatatacagtatattaaattgtgacatagagactttaattgac

SEQ ID NO: 54035 - DNA, 1153 bp, Arabidopsis thaliana landsberg
ccgatcgttccaggatgcagtctaacatcatcatccaaaaataacacatatttggtatctttgtgcattttttcaactccaatcttcaagaaaaagaagccagaaacaggaaaattcagcgaaagccaatgaatgaacaacaaaaatgaaaaatgtatgttggaagataagttagcttttcatggttgtgattacagttgatttaagaacagtcacaaaggagagataaaaaaaatattgggagaaaaaaaaaatcatacataccaactgattatgaattttctggctacatgttgttgataaaccagcaaccacgaccttagcttcaacatgatcctgtgtacattgaagacagattaggaaaaatgtagagtcagtagatacttcaagacaaaagaaggccatatggactatacttccatcgatagataacaaataacacgaacacaatgatatgttgaaacatgtctgctgtacctgatacatagataatagacgggaaacagcgtgatatgcagggtcttccgtactttctacaacaaaaaggaattccaatggcccaccatagagagaagtaatctacacatagacatggatcaatcttaaaatttaagttggaagcaacaaacttctctggcaaaaagcttaactatgatgcaaattaaaaaaaaaactctgcctagaaaggagacaatgatactgcaacatgagggactgacctgacttctccagttgtgtaaattgtgttctccaaaaccttttagaggcatgacaactgaaactctgggaagtttaacctgcctagagtgctcaagttcattgatatcttgataaagaaacgccaagctattgcccgcttttatgctgtttttaattctcttaacctcacgattccttagagatagaaatggaacacaaacacatttcagaagacaaaactcagattgtaaaatcaaaataagacattattaaggtaaagacactacctgacatattcagccaataaccagccgagagcaagtagtaagcatattgtacacccctgaagcatatacaagaaacattaagaacccaaataacaaacgcaagaaaaattcttatcctgatgataaaaatgctcaatcaaacaactaaaagagaacacatttaacca

SEQ ID NO: 54036 - DNA, 623 bp, Arabidopsis thaliana landsberg
gacaaacattagtatgatatgcaaaacccttgtagaaaatattatcaatatcacacaaattatttctaaagaaccaatatagatttttaatgataaacaaatgtgtcgacaaccgtacactaatctgtactgtagcaaaatcgaccctgcaatataaggtctaggcacgtgcttcattgcatttacaagagtagggtagaggagcacgtcgggcttcgaccacggggtcacaataagcacggtagggagaagatcacggcgcgggcaaactcgacacagagtagggtacgaaggagaagcgacacttggcgcacgtccggacgtcaggcgcacacggctcgaccacgcagcagtgagtgacgacgacgaacttggacgacggcaacggctttccattgtcgcgaacagagggcgctcacgaacaatgagctcaccgagacttttggcgtcgactgtgcaacacacgtcgagttggcagtaggaaacatgcgatgcaaaaaggagaagcgagtaggggatgtggctcagttgtggtgagggaaaaaggttgtgatcttcattttatagagcagagagagcaaaggcgtcaagtaatgagatcgttcaagagaagaacaagtctg

SEQ ID NO: 54037 - DNA, 950 bp, Arabidopsis thaliana landsberg
cccactgatgttgttgttgtcgacgatgttaaggaaattagtaccaaaagcgaaaagatcattgatgagggaattgagaagagctcgatcacggattctaaaaccgaaactgaatctcagcttgatatgcacaagcttgtggctatgttcaagaaactgaatcctttggccaaggagttttttccttcttactacgatccgaagaagaacaatcaggtagctaaggctaaccaatttctgccggctgacgattttgagaccaccaagaagcaatctggtgaagaatttgatcttgatgccaagaaggatgacaatacccgcaaggtaaaaatggatttgatgattccaatgtgagttttgttgtaaatctttaaactttgactaaggggttgttgtgtttattggtgtttgtgattatagagaagaaactatagccaagggagaaggaggttaactggaagaatttctaaggctcaaagagaggatagtattagaagaacagtttatgtttctgacattgaccagagtgttagttttgtttttagtcttttaaggttttgggaagaattcgagttaatctgcattaatgtaacattattctgctttgcgatttaggtgactgaggagggtcttgctggcttgtttagtaactgtggacaagtaagatgatccttaaaatctttaaatgttggttatatctttctatttcatgtgttttggacaatgtgttaaatttagactagtttttgagtccgtgccaaaggttctgttgaaaaaatgttactttggtggtatagttgtgtgtgtgaaagaacgttaaagtcttcttcttttgtgaagggtggtgactgtagaatttgtggcgatccacattcggttcttcgatttgcgtttggtgagtttgctgatgaccggaagtttggctgctgggatctttaaatgctttaaca

SEQ ID NO: 54038 - DNA, 940 bp, Arabidopsis thaliana landsberg
  unsure (1)..(940): unsure at all n locations
atataggtcttaagacgtaaattgccaaatcctaatcaaataccaactccatgataagactcttctagcataattatgctaataataggttatttgaaaatttataggtaagattctttttttctttttgtcaaccataggtaagattcatttgttacaattttacaacatactccttagtagtgtttttttgtcaagttaatcattcgtattgttttcgcttctcttacacagtttatttaaacaattacatataggtgggaggtataaaaatgagatgaagaatataaattccactcaaccttattcctggacccctcggaacttgataatttttcgatttcttggtgaatgtttcccgagaaaatagcgaaagtaagttaaactttatggtttacaagaataaaatctctaaatcgaagttgaccctttttcatgtttaaaatcttctgcaattatcattaccctctgaacccaaaagtcatttccattttacattttcctcttattttgtcttctaaaacacacaaaattatttacgttttattcaaatatgatgtcattgtgatgttggtgatatcaactttcaaaacttcaaaagtttaattatttatccatcatgtgatttttcaatcattactttaatttgactataataattagacgaacgaaccacattcctcgaccgcatttcatggaaaataagaatagcacatacttcgggattttacttcataactaatgaaaaatgaatacttaagagttttgtttagttgtagatacaaccaccaagccaccgacgtacacgcatgctatacatattcgatattcctagtcctatacttatgtacaagcctttgttttgttagtatcaagtttcactcgtttgtgccaaataaaaacgacaaaatcaatgtttnggacttttgatgataaatta

SEQ ID NO: 54039 - DNA, 1072 bp, Arabidopsis thaliana landsberg
ctcaattgcagatgaatttctatgccaattcttgtcctaatgctgaaaagattgttcaagattttgtttcaaaccacgtttctaatgctccttctcttgctgctgctctcattagaatgcatttccatgactgttttgtccgagtaaactcttcttttccctcttttttttttgttttctttatatagtggaacattctgaataactacgaaactaattaatgacggatatatatacatgtacatgtagggttgtgatggatcagtgcttataaactcaacgtcaggaaacgcagagagagacgcgactcctaacctaacggttcgagggtttggcttcatcgacgcaattaaatctgtgcttgaagctcaatgccctggaattgtctcttgcgctgatattatcgctctagcttctcgcgacgctgtcgttttcaccgtaagcatcatattcatcacataacattactctaaattaaaaaatcttaattagtatttctgatcataaattctgacctttggtatgttgtagggaggaccgaattggagtgtaccgaccggaagaagagacgggaggatatcaaacgcagcggaggcattagccaacattcctcctccatccagtaatatcaccaatcttcagacactctttgcaaaccaaggacttgatcttaaggacctcgttttactatccggtaaagcctacactcattccacactctaagaataaaaaattattgagtgttttataagaaaatatttgcgtctaacatttataaaacatgtgtatatcatagacacaaaaagcgtctattatgatggtttcccaataaccgaaaagtaatattatgatttcaataaagaaaattagaaagtactgtttttatgatatagagaacatttcagcctagagtttcaagatatatttacaagtaacatatgtgttataaacaggggctcacactattggtgtatctcactgctcgtctttcacaaacagtctttacaatttacacgggtgcgtgagaggaccaagattcgcgggctttggacgagcgagctacgcagccaat

SEQ ID NO: 54040 - DNA, 773 bp, Arabidopsis thaliana landsberg
tatcattacagagcagataacattcgacttgcaagatttgacaactaaatgatctttacgtggaaccaataattatgttatttttagataacccgtttaccaaatcatttacttaacctccttattggtaattggccaccttaatggcttaatctctattattgaacccacccgactcatcatcatgtactgtttactaaaaaatcgaaatacccaaccgattttctaattttattatttaaaactcttacgtacataattgttctatacaattcacttcactgttattaatgataaaagtcgtttatttgaattttatcaaagcactacagaaattaatatgttaaaaatagttttctcatattttataatctggatataggttcaatacgatttctttgggttcttgtctcatataaagtgtccaaaattattaatcttcttaaacaacggtaaaaaaaataaaaattgaattcgtcaaaagaatttgacaacaagaaaagaggtccacaacggcagtatttgacttgctcgttcccacaccaccatctctactcatattcagttaaatactatatttaagctaaaattaaacacactcaaatattaaacaaataaacaaaacccgtgtttaagaagactaaaaatcacgtaacagtttcaaaataaagagctatgtgactatcgaatctgaactgtaactccaccttttattaaaaattcaaatgcatttttcttctttgaatattgatcttttcggtgtgtttcaaaag

SEQ ID NO: 54041 - DNA, 239 bp, Arabidopsis thaliana landsberg
  unsure (1)..(239): unsure at all n locations
ccccctccccccccccccccctcctttcccccccccccccctttccccctncccccccccccccccntnccccccccncccccccncccccgtnccggcctcccctccccccccccgccgcgctgttnntcccccccccttccgcccccttcccccccccccccccccccccccccctcccccccctcccccccccctcttccccccccccctcccccccccccccccccccccccccc

SEQ ID NO: 54042 - DNA, 587 bp, Arabidopsis thaliana landsberg
gaaagatttgctccgcaatcgagacaaggaacaactctataacatggtgagttttacgctacctattttgattccactcacaatttttcttctttagaatatcaatttctacgcgatcataccaatttctagggttatcactttcattcaaaattctttcgtgattgcggagaattgtttttagctgaatcattaaagtacagatttttatggaaaacaagaaattagtctcaaagttatttgtacaactatgatcgttagcttaatagatatctcacatgtgtttggtgttttaatttttgtatatcattgtcttgataacaagttaaaggtctaaactttaagcttgaaatggtttgtttaactttttctccctgaatggtgatcataggatgaaagagatcgagaaattcgtgcttctcatggtgattctgatgctggtaatgtccttagtcaaagcataaacgatactagagaagaagattctggttcatgtgaaggctttgttgaagagagcataagactggaaccggaacaacaaaagcgtggtaaatattttttctatgacacaccgctttctgaggaaa

SEQ ID NO: 54043 - DNA, 532 bp, Arabidopsis thaliana landsberg
  unsure (1)..(532): unsure at all n locations
tattaaaacgatgctggatgactcttgtccattggattcaaataactaaatcctctcttaacattagcttgtggctttcacgagtactgttttgtcaactattttttttctatataatcaccgaatcttttctttggtactgagagagcaagagagattagtaagacctaactcttaacgaacttttagataaaagcttataattgagagagacacagatcgataaaagtctctataccttatagttttcttgttgtattttcctgcaacnnnnnnnnnnnnnnnnnnnnnnnnnnnnnnnnnnnnnnnnnnnnnnnnnnnngttaatagattcgctcttcaatgtgctatcgtcgcctccatcgtctccatcatctttggttacggtaagtaatagagagttctccaaaactaacatatgttgttgaagaccattgtggttgtaatatgagaaaagatttagaaaataatatttgtgttagtaactttgaaaagtacagaggtgtttattctttataaaagtttttggggg

SEQ ID NO: 54044 - DNA, 114 bp, Arabidopsis thaliana landsberg
cccccccccccccccccccccccccccccgggcgcccgacctggtttttttaaaccccccccacttgtgcgccgggggcccgccccccccccccgaccccccccccccccccca

SEQ ID NO: 54045 - DNA, 475 bp, Arabidopsis thaliana landsberg
tatatatatactttttattttaaaataaattttagttatatatacggtgtttttctgtgatgccaactactcaaaataataatttatggtgtaggataatcaaaattttaagtaatacatggtttattttgttttacctgatcttgtaaatgaacaacgcgagagttccaccacaagaggcctgaaagtaaagaaactgacatgaccataaatattctgagtcctgaaaatgattcgtgacttctctcttttaaacctcgtttcagtagaactgagaattgcatccaccaactcgttggccatcgatcttcataaatccaaaaacaacgtacgacattatgataattgagatcaacacaaaaattaagtgtcattgttaaatgttatgtaatgacacgaaaagacttacttgttattgccttttttctcgatctagcgttcgtttgatcttgtggaaacgttctagacacttctt

SEQ ID NO: 54046 - DNA, 1546 bp, Arabidopsis thaliana landsberg
ttaaaacatacacactttgtaccaaagcttaatggcgccatcaatgaattaaatagttgatgtgattgtagctgaatgattgctagttacttgttgtgctcgtttgaggataaatcttatgatttcaaatttccaatatctttgaaaatcgttcaaagtaagatataaacatatctaattatagttttcaaaatgataactgtagatgattaactattttctctcactaatttactaacatatccttgataaaacttgtaatctagatagatagaatataaaaagacgtaatctattatatacaaaacaaatttgtatttgaggatttttttttatttataattataattaatagttttcaaaaaattaagcattaacgctgcgtttttcattattcatttttttgcagattggttcattattgggaaacaatagaaacgtaaaacgcagcgtataaaaaagattattatccagtaagtcagtaacttacacagattctctagcacaactgccatggcaacttcttctgctcacctctcgtttctcgccggacgtatatcgccgttctcctccgaacggatcggattattttctctcagaggagaatttcgtccacgaatgacccggttccggtgctcggccggaccgagcggattcttcacgcggctgggtcggttgattaaggagaaggccaaaagcgacgtggagaaagttttctccggattctctaagactagggaaaatctagcagtcatcgacgagctcttactcttctggaatcttgctgaaacagaccgagttcttgatgaattggaagaggttttttaattttaaagccgacttaattcgaattattgttgattccatgggtttcagatgcaaatggagtttcctgaaacctaatagtgggaataattcaatgtaggcgcttttggtttctgattttggaccgaagattactgttagaattgtggagaggctaagagaggatatcatgtcaggaaaactcaaatcaggaagcgagattaaggttgatttgaacgaaattgtggttatgttagggattagggtttatagctagttgattgtacttctgaatggtgtaggatgcattgaaggaaagtgtgttggagatgctggctaagaaaaacagcaagacagagcttcaattgggttttaggttctcttcatttagctgtgttacttgttattctttcacgcctctgctctgttgaagtggagttatgaaagattgtggttctaagtctggttatatgttatggtgtatcaggaaaccagctgttataatgattgttggagtgaacggaggtgggaagacgacatctcttggtaaggaaattggcattaatgctttagagtgggaattcaaatgactagctggtttgctttggcttagccacagaaagatttatgtgaaagattctggcttttgtttttcaggaaagctggctcatagattgaaaaatgaaggaactaaggtacacctttcatgtttgatatcatgtaaactagatcctttttgttc

SEQ ID NO: 54047 - DNA, 771 bp, Arabidopsis thaliana landsberg
acaaaattttgactacaaagaataaaaataaaataaagaactatattttatataaaattttcaaaaaattattattttacaatttactcgatttgtattattttttatactgattccaactcggaacctaggtgaattaccctcctatttaaccaaaatgcaatggttgtccctcttcatttaattggtctagatgagtcagagagactaccaaccttgcagttgaaaatctggaaaatgaaacatggatacgattgaacataaagttaaactggacttgtagaatgatcaagattagtttacaagtataaacaagggatgatgatggtaaattacatgtttattgtggtgtgattgtaattgcttggatgttgcgtttaattagtataatacagctactagttgctcctaaagaaagagagctcaggccatgtaactgcaaaatccttaaacccatcaaagagacgggattcactgcgcaagcagacatcaatgtctatcactaggataacactttcggtaaacgaaacggtgtttagccgaaaaatgcttcctagactagatctttagtttcgagttttcttaattaatattccactaaaccattcaatgacctaacactgagcacactcaaacaactgtcataaacttctgtacagatcaaacaccaagtaagatgtacagagacggcataacatgattatcagacattctgagaagaagagtgatagataaagtcagcctaacaagaactacaatgccccaaaagag

SEQ ID NO: 54048 - DNA, 1210 bp, Arabidopsis thaliana landsberg
ccatttaatgtatgcaaattatctacttatgattgaaatcccattgaaaagatttgaactctactccttcatcttacataacgaatttggtaccaacaaaatgtaagtgatcattgtcattttgaggctagttctttacaacagaatatgtgtaaacccgtatctgtatttattcggtgttttttctagtttacttcatcgttcataaaggtacttgttcaaatctgaatgactaagacatattaaaacaaagaaagaaagaaaagatatgctcataatacatttggaaaagcactaaaattcgaatggactttagttttggttttgtcgactttttcggcattaaaggtcataatataataatgaaaagacatgataattggtggatggggttaccgggttatagtggcagataactagtcgccaaagatttatgaaaatgaggaaaggtattgttaaaatgttgacccgtaatataatcatctttttttcttcttttactaattaactttttgttaaagttatagtatatcataaaattcaatgattttgaattatgatcatcttcgtttgtcagcaatttaaaatgatttgtgataactaattacattattagtcgctccacaggattgttggcaaataattacattagtccataacccattaatttaaccatataacttttgtttttgattattctttaactttataaaacatttactatgcagattacataatttacattcatatatttggtttatatatacatacatacattgtgaagctaatagccgtagaattcaagttttggattcatcccctcttggccaaacatttttctttttttgataaagaccgaacttccatcttgtaataagaacaacaatacatggaccgacgacgagagtatttatgtacggtcccgagatgatctcagttcaaaatctaatcaatcgttatgtgccacgtcgaaagtaaggatggaaaggaattcaatttttgtatgggtgataattcctagtactttactaatcactactaacagatgcaatgcattatgctacttgaggttcaatccaacgactataatagattcggaggtcacatgtttggtttcaattgtatattaataaaatactatatattattcatgatttggtcacaaatgtgttgtaatccaatgatgtacctaggttgatggatacttttt

SEQ ID NO: 54049 - DNA, 1793 bp, Arabidopsis thaliana landsberg
ccgatgacaatgttcttacgtgcattaaccattcaaacaaacctaaaacccaaaaaaaaattcggccagtacaaatgaaaacaaaatacggatcaagcagaataaatatgattagtggagattaacaagtacagtggctatgtatcaagtagagtggcacgagtgttaaatgataactataagtttgatcggctaaaatactccactaattttttctataatgtttcgagtaaccaaccttaattaaaacagaaactgtattattaattagttgataaaattaactaatatgatatgtttaggatcctttttagtttttccaaattaaaatcttctttctaatggcacataaacgctaatttaagtgtaataaaaaatgattaaacataccgtatataaatcacacttttgtgaaaattgacatttcacattttcttcataccaaaccgcactttttcggctcatcattcacaagaaagttaaggacttaattacaaagtgttcttctttccttctttgtctttttaatttaatgtttctgtggtattttaatgcagaaggttcaatgtttgacttgcaaaatataaatataaatgtatctgtttaatgtttatagctaactattaatcaaattgaagtactcatgtcaactactattacatttgtggaaaaaggaaaagagctcgcacataaatacatcataaaaaaaaacacccaccactcgaactgatataatatcgtcaaactttagaacataataatcaaattaccctatactcgttttcgatagaaaatgtgaaattcgaaattatatgtataattatggtattcacaaagaatttactattttgctaagttttataaactgtccatttttttcctgttaatatcaatgtactgtttcaagatcagacgcactgagataaacaggatttaaacctgatatatcatagtgtcacttaaaatctaaaccacttttgaccaatttcagatatgtcagattcagaatatttagcttgttaagcacaactgtaactctttttccgtacattgttctaaacaaacgaataaatttttatatcataagaatctaattccgctcatataattataaccagtagtataataaaatacattgaactatatttgtcggtttgaatgatgaaaaaattcgtacaaggctgtcagaaaatctgtacaaattaaagtctgtgattggtaaatggcatgttatgattttatatattttgtcacgattatattactgaatactatttgactaaatgtaatttggaaaaatggggacccacagatatggttttggattgaagaggagcatgtggattgtgttaagtacattgttttatacttcatttggatgcattccacaaatgtcttcacgtgcatttactttacaactttacattcctaaacccctcatttatttccttcatataccatacactgcgttaattatcaaaacacattacttaagaatttattaaaaacaatttgattaatgattagtagtatcttgccatagttaaacgatctaactacaagatatcaacaatgttaaagaggtcgtcaatgaagttttagaatgttattcttagtcgaaagtagatcaattttggttttagtgcaaatatcttactattttagtttagatttggatatgttaaaagttggtgtctttcaaagaacgaatgatgttgtcttccctgccaaaaagtcattaatggtttgtaatactttagggaaactgaagagttggaccctattttctaggt

SEQ ID NO: 54050 - DNA, 283 bp, Arabidopsis thaliana landsberg
  unsure (1)..(283): unsure at all n locations
gcacaatntcaaccacagccggccgaaacaccaccaagggaaacgccgccgacaaaatggtatagcccaacaaacacgccatggagaacaactccaagaagcacacaatcaacgccaacgactacaccaatagccactaccgaagtgaaagtgccaaaaacacctgggtccaaacagaagagccctgcaacaccaaaacgagacagaatggaagcgcaaccccaacacgagacgatggtgctcttacagctaagaacaagccggaccaaaccaaggaattgga

SEQ ID NO: 54051 - DNA, 789 bp, Arabidopsis thaliana landsberg
tattctcactcgttagattatgccaataattatttactaaggttcaaaataaataagttggttagtaatatgattaatttttttgccaccattcatattagtctaaatgattaagacatgtaataatgtaatgatttgtacttaattataccttcattgtgttataactgagaaacaattacactatgaagaggtttgactaattttcaaggtttccttcattttgatgtgtataactattacgttacgtaaaccatagatttctattcttatgcacatcagtagatccgaatttagtatgttcagtactaaatttgagtccatctaatgtaaccgcaagatgtggcatggtggaggtcggtttaaaagagacaaacttcattgattactttcgattagtataataaattactgcgatatgcatgtgtgtatcataccgaccataacgaactaagtacgttactaattacactaagtttgtatttttatatcaataggttttacatttggagcaagtcaagccggccatcacatgataatacttcttgaatctcaaatcataaccattcttcatgttgcaataaatatgcatggctcaattgtcaaaccgtatatcataataataatgtgtcatataaatttaaggtttttgatgaagattttatgtatgaatgacccataaagatacatctcatgtgaacttgttttccgttactatgggccaaaactatatatcaaaccacgtggggttggtacatactttctcatacataagttcgagagaagggt

SEQ ID NO: 54052 - DNA, 657 bp, Arabidopsis thaliana landsberg
gctagcttgttggccagtactctctctcgttcaccgcgtgcaatgcaatgggcaatggcttcctgttcaaagccgctgcctctctccgccatcgccaacgctcctccggcggcggtttggtctgggacgctgtacagacagacggtgttgctgttgacacacgcgccaatgtacaatacatgatggccgcagagaacggcggttcgcagcaagcaggggctgtcggcgtcgctgcgccgtacacgtacgccgacggtccgcttgctggggcccagtgcgcacttggccggcacgaaccggcccgccagtcctcctcggtccatcgctatcgctctgcctcgtgctccgtgcctccgccgtgtccattccttcctccgccccgccagaaaagccagccattcctccacggcttgccagttgccacccacccttctcctgttctccaacaacaagctcagcacaatcgagcggcttgctgcgtttgaattttgacacttgcactagatatcagattactgcgacatctaacttcaatttcgagcgaccgtgctcttaattgtagatataatgttctaaggatatatttggttcctttagttaaatttagtcctaccctatttgattggaaagactataagtatcaaagcatattaaata

SEQ ID NO: 54053 - DNA, 856 bp, Arabidopsis thaliana landsberg
gaaggtttggagagaaggatccacatgttgcatctgcatgcaacaatctggttggtctctgtgggctttctttattcagcttttttagtttctatgtttagttccttggattgtcgtgctttttgcttgttcatttcatatcagcatcttgagtatggtcctctaaggataagtgtttaacagtttactgttttctggctgaggaatgtagccatatcctttttaattttcaatttctttatatattttagaacaatggtttcatgatcaatttctttctgagaagttccattctttcttgggagagtcatcttttccaaaaaaattcattgttacagttctctgcttttaaaaacttgtcatatcttgttttcttacgctaattgctctatcttttcgttcctctatgtaaggcagagttatatagagtcaagaaagaattcgacaaagcagagcctttatacctagaagctgttagtatcttggaggagttctacggtcctgacgatgtgcggtgagagatcatatcattatcttttgagttttgatgctacctgattaatactactgttccgagacttcatctatttatggtcactcataatttagccgagaacccatcacatttctggaaactggctgagttttctggtgcatgaatagatatatgcctcttttagattgcttactttgctctttatgcctcaccctgacatgaagattttaaaatccataagtctttgtttacgtccaattgttattgggccgtcttcgtgatctttatgaaaatcccactggctaaattgaaagtcatgcgacacctaaaactatcaggaattgaggtatagtttatata

SEQ ID NO: 54054 - DNA, 333 bp, Arabidopsis thaliana landsberg
  unsure (1)..(333): unsure at all n locations
cacagaacaccccaccaaccncaggcnacgaggaaccaacagagacaaaaacccccacggcacaagaaccaacaggaggagnaggcaaccagaagaagcaaacagaaaccgaaccccaaacnaaagaagaaaccaaaggcggncccaaaggagggcgacgaacaaccgccagacgaccgggcnaggaagcccgagccgcaagaacaaagccncgcaacggcagaaagcacggcnggcagaaacgaccaaggcaacggaaacccccagggaaccccacagggaagcaaaaagaagcccagcngacaaaaccacgcgaggggccacaaaaccaaa

SEQ ID NO: 54055 - DNA, 504 bp, Arabidopsis thaliana landsberg
  unsure (1)..(504): unsure at all n locations
actttccttatcagtcttcggtctccccgcgaacattatcatttttcttgcaaagaattatcctatgatggaggaggcatgataattgaagatcataaacaatggaactaacagtgatacttccattcgtaatttactgaacacaaaaggatggtccagaaagacatgtaatttcacaaagataccaatgtaagatccggacactgtttgtatagacttattcagatcaccagacaactgcaccctatagagaatttgctttccgcgagaannnnnnnnnnnnnnnnnnnnnnnnnnnnnnnnctgtccaactcgatctgaccaactacattttagcgtattagctctcaaccaactgacaaatgaaatgacactgagctgtttatatacaaagctacagactactacagaccccttatgcttatgcacggtatgcaccagactaatactgcaccgcctgcccgtttttggagctgtcctaatctgagaatgagcttacttctt

SEQ ID NO: 54056 - DNA, 710 bp, Arabidopsis thaliana landsberg
ggaaaatataacacaaaaatgctgtcacttttggcacattctgttgtttaaggtacaaacgtaaccattttgaacctaaaagcacatcccatgaactcgggcttcggcactttactttcttttttttttttgataaaccataagaattctgaatctttgctctataatatttttaagtatcaggaaccacatttcaaatgtaaataccccctttcaagtttcagatggagttgaactagtgatcttgagcattgtcatacactctcaaagcacttttctacttggttaccaatttttcttgtccattaattttaagacatatttcatttgctaacatcagtacatataaatgttaaataaattgtcaacgggtagccaataaattcgttaatttttttttcgtttgatttctgtttagttcatcgggtccgtagttcaaatgttggttaaattcaaatggtaatccctagtaagaagctccggtccatacaagggttgaaggtgagtggctgcatgattttaaaggccgtagatatgtgtaacttataatatttccaaaccaaatttttgtgcaaaaaaactattcaaacaaaaacctaactaccaatcacataatgcgtgagctgtccagagttgtcgttggaacgtcgactctatatgtaattactttaagaaaataaaatagaacgatgctcttcaatactactaat

SEQ ID NO: 54057 - DNA, 374 bp, Arabidopsis thaliana landsberg
gtattggaatatgcctgaggttccagttaacatgagacacatgctcgtgctattcgtgtggtagaccctccatgagtgaggtgtttacaaaggcaaaacaaaagttagattaccatgaagatgacgacattgcggttgacggagtgcttaacattagtcatccaccaaacgtcataagatgtgtcatcctgattgattctcaactggagttggagaattatgtcacttccactatgaagacccagttgattgccccctaaagactacgatcgtgctgtggatgatgtgtcaagcgtgcctgacgctcaatctagccctaatttgatcctaaagtcagccgggaaatgagtgcaagactcatgacctgcagacat

SEQ ID NO: 54058 - DNA, 819 bp, Arabidopsis thaliana landsberg
gaagctagagagtgtacaaggagggagaaaaagatgataataccactagaaaaaacccaatggcgatggcttcggatcatcatatctttctgttttgagattgtgtagtaagtactgaattgtgtgattcagtggttctctctttaagaagaaatttctaacttagcaaatcttgcgtcaactcgttttgagattaatagattcaacttgtggcttttgattagaatataaataaactaaacttttttttttcccacttgttttaaagaatcacgtacaccattgttgactctgactcatttagtcctctcttaatttttctaaaggattattaaagttctactgaatttaaggtctactataaatctccaactttgtatagcttagccaatttttctactcacatatgaaatatccatatatagactgtctctgtgcatctgtaaaactggtttgagaaatcaaaagacttagaaattagctatactttttaatgacccaagtgctataagagaacagatttgtcgtatcgtaatcgtatggtttgacttccaaattggtagcctatgaactgaggatgctcgtcgttaatttgttaattttaaatttacatgattttatgaagttaaattttcattctaaggatccatgcatctatctatacacatacatttactttggtttagaaaagatgtcgatccatatatcatatataatcgaatggttacctattacataacgtacagatcacattttcaagtcaagaaacatatatcaataccactaatgacgtttacataggttggtggtaccattgac

SEQ ID NO: 54059 - DNA, 1232 bp, Arabidopsis thaliana landsberg
  unsure (1)..(1232): unsure at all n locations
gagccttgaaggtcggggtatgatcaagtacctctagagaggttacttttcttttcataccatccatccacattgaaatgggtggcttctatcgtgttaatcttccaactttgcttgcatcagtgtttaaaggtctttcacgtgaagtcgaagacttaaaggcattggggttatacgtatatgtactcttctatatatggtttgctttgagcctctaatgtaatgggaagtgaaaacactttgttcgtcacttctttcttcagagcataaaatattatgataatcaattttcagtgagttttcaataaacactttgtcctctttctttgagattcatctttctgctatattgtttgttagaaaataaagcaatgacactaaataactcaaaattggctcgttatttgcagacacaaagactacttttatgtgtgtttcacaagttttggttgcttgaaacggaaacgcctccaaatgcagatgaagaaaaaaagactattactttatttctttctgaaattcagaaacaaagaagaagtagggagcatgaatcataatttggacttattaagtctagcatggacgtactccaaatgttaaagccgcaaaaacatatgaagccccaacgcaatcaagaacagcaagagccaatgaaaagagctgaaaattagccagaaactctcctgagacttctgaatcaactgatctgcaaactacagagttttgttttaaactgcagccttgaggcatcatagggccatacagagtgaaagctgtctgataaaaccagaggccttgaagagtcattgcaatgccattgcatagatctactgggaagcttgtagggcagattgctccagcgattgaggagatgacgcagagaccgatgagaaagacgaggaggagatggtaataaccttcaagacctttgtggcttgtggagtggaagaagaagagaagacactctgccgtaaaagctgttgcagcgattagacacagagcttcttgtggcagaggaagtaacctaagacaaaaaataaagcatcatgatgaataaattgattcatatatanttcgtctacatcaattttatggttgttttattaacaatcaagtcaagaatcactagtaaaccacttttgagttcaataccaccaaagatccgacctaacttcagagctaaataccaaagttgatgtatctatctatagtcaaatcatatattatcaacg

SEQ ID NO: 54060 - DNA, 763 bp, Arabidopsis thaliana landsberg
atggattctacgagaattcgggctttcgagtatcgtcatgcaaaatctgcatccacgaaggctgaaaatgttcttgcattcttgttttggcaatggccctatatagagataacaaaatttataaaagctttcatatacaaagtgtgtatatgaaatgctatatatctatatatatgaaaagtttatagaggttattatttacctatgagatgttctcggagggactcaaaagacctgcaatgtttcttgcaaacgccacaagtaggttcatgacccgaatgataagagatcttcatgtgctccaccaaatgttccagtttgttgaattgcctgtaacaggcggcacacttgttcctgtacattgacatgtatatacattcaaatcaataaaacttagttttggttttcatcacttgaatcaagaatttggatatgatattgcatgccactagctccattagtcttctcttggagtttttgatggaattatggtttggtattataggcgtaggccatgaaaatagttaccttagagtttccgaagactccattgatgatcggtaatccattgtacgtatcagacacttgcaagcaaatacttgagaacgaaagagttgagagagtttgttctcttcttgatagctgagtgtgtgagtatgtgaagaatggagaaggtgtgagaaggtatttatagatgaatattcataaaagcaggatgaagaaaagcaaaactgaccattctcatatatgaccgtttagagac

SEQ ID NO: 54061 - DNA, 636 bp, Arabidopsis thaliana landsberg
cctcttttacatataatacaattaaacaaattttaactaattagataacatactctaaaatatgattggtctaaaaaattttaaaacatctttttaaaaaaagtctctaaaacatcacttaaaagtgatattgaagagttataacgcaatgatgcatgaatagctgattttcttggtaacaaaattttgtagtaaagctttaaattttttactaaatgttgaagtactttacacttgaatttatagccgttaacataatcataaacattgtcaactttgttggaaaaaacacacttaaaaggataacgacattgcatctgaggtttttcactaatgctgaaataaatacttattagagctacttattatttgatcgacaacttttctagtttctataaacgtgtgttaagttgatttgactatgtaatctacaaatagttctttttttttttgtttaacgaaatttgaattgcaattttttccaattaccagcatagcattatggtcagttgaatctaaattagctgataatttcctaaaaactcaatagttctgcagtaagaaagatcagagatttgacaaaatagtgcctaatatatatatctagaataataaccgaaaggcatccatgatcac

SEQ ID NO: 54062 - DNA, 86 bp, Arabidopsis thaliana landsberg
gtaagttaatgatctgatcggctgcagaatattaattaactgacaattttagttggctaaacaagacaattttagttctggtttat

SEQ ID NO: 54063 - DNA, 102 bp, Arabidopsis thaliana landsberg
gtctacatggcgcacaagaaggagtgccagttgtgattcccgccagtctcatgtgccggtccgtgtttaacatcgcatgcgtcagggagactcgaatacatt

SEQ ID NO: 54064 - DNA, 1327 bp, Arabidopsis thaliana landsberg
cgacaccgatgcaatataacaagaagctttatcaaaatttcaatacgaacctcccgagtgccgtcaaatttgccagagtgaatgtgatgccaaacttgaccggattaaagaaaacaagcatcgactgcatcgtcaaacaaataagagataaagagttatatcaccagtaaaagagctaagacaacccaaagtacagaagaagaatacagctaaaccaatcaaatgattcctttcaatgcagaaataaggatagtgctttctaacattgctaagacttgagagttatacttaccaaaagtgtacaggtcaaacctgctgacaagcaaattgcaaagccataaaatctctgttttcataaacaaaaaaaacgagatattagccaaagacaaacccaattcaagataatttaacagattcttgtaaacgagacaacactacaggttcatagaggagctaaatccaagtagcgtcctaatttttttgtagtagcaagccaaaacttagtcctattaatcaaactgttatcataccacatggaattttataatccttctcctccaaaaaatcatagaactgctaaacacttatctcaaaatctcttgtatgttattgatcacatcatatgcattcaataggaactcatttacatttctacctcagtgagcttacgagcctaacttctctaattggacgaatacctagtccgcatgtgaaattacaaaaattaccaaattcagaggacttgatcgaagaatctggggaagttaagaacctgtttggtagttaaagcgcaattgcgattaagatcttccatgaatgagagcgagctttcttcatcagcagcttgttgctcgtcttcaacctccataccaaccaacatcttcatcttctcaatagcctgattcattttatccatctctgtaagtcctctttctgtagtctaagctctttcttcctagttctagtgatcagatctcacgcttcttcttctcaaattgtgacagtagaactgaagtatggttggatcttctctgcaaaattacgcaatgtgtgagactgaaaaatgaaagagacacttttcttcgtaggaggagaaaagaaaaaaaggctttagttgttgggcttcttttaaattaaaataaacttagcccaattgttggatccattaaggttttattttcttattttaaaaatttacacattcattaaggttttaattaaggccctttaattaatgagtggttgacaaaaataatatgtcaaaaatatcttgaactttcaaaaaatgccagacaatcctcaactttgcttctaattcgctattttt

SEQ ID NO: 54065 - DNA, 510 bp, Arabidopsis thaliana landsberg
atatccccgttcagcctgttgttcagtgtacggaattccagtcccaggtcaaagccattcaccacttcccattgcatattgggatcgggcacataggccggtgaaacggaactgtatacattgttgccgaatacgcctgcgctggaagtgttcagcacgggcaggaacaggttggtgcctgtacccaaagcactgcccacctgtccccaggcagcacgcagcttcaggaagttgaacactttgttcaggctcttctctgcaaatgcttcatcgctgatgacccagccggcaccgatgctgtagaaattaccccagcgctgtgaaggtgcaaacttggaacttccatccctgcgataagtaaggttgagaaggtatttattgctgaatgcatagtttacccttgccaggtaagacatatacgcttcttccccgcctgatcctgcataggtgcccgggttattctgtgcagcgatgttgaggtaccagtaatcgggatcattgggaatattg

SEQ ID NO: 54066 - DNA, 937 bp, Arabidopsis thaliana landsberg
catacaatttaatctacaactacaccgaccaaacttcaattttaaatttcgaaacaaaaatctttgggctacgacaaacacacacataaagtctagagtgttggtgattaaagtctttgtttgagcagtgttttagtgagggtttggccattccataacataaccagcgtctctctatgcattggagccgcacgtcttcccagcgagcatttattagacttgcatctactgatcttgactatgcttagactacgaccttcttctttctcctgtcactcaaaagaaatatcaatgaaactttctttattattaccaaaagtgtcttagtcttgccatgtgaatactgtttcgagctaaagctacaaagaatgactttcatatggtcttttcaggtattacttacctctgggacatcaaaaccgccttcctttgcatcacacatgtccagagataccagccggagcatcggaaactgctcattgttgagatgaattaagcaaaaaaatctcttaacggaaaaatacgcatggagagtgctcgaaattttaccttcaaagtagcatcaagaaggaagcttttctgtattccagagcccttaacaaagaaaaagaaaacaggaacatggaaaccattgataaagcttgacacatcaaagagtttttagttctagctgagggcgatgtgacatagcactaaaaaaatggatatataaaagagaactcacgttgtggcgaagaaaaaggtcttcaagagcaatgcaaccatagagagaagcgacaccattctctgttatacttccacattcctatcacccaaatatggttaaagtagttataaaagcgagttactgttcttctaaaagttcagttggtagatcatataccttaaatgaaaaaaatcttgcgatactagacatacaatagctaatacaacctta

SEQ ID NO: 54067 - DNA, 1315 bp, Arabidopsis thaliana landsberg
ataattcgtacttttcgtttgcagatttataatttcgtaaagagataacaaaacagatttgttataatattcaaaactaaccaatataaagcatatatgatatatcaaaacatttcacaacagatctgttaaaagagcctcgtaatattgtttttagtttcaaaagctctgtttcttggattattttcgtgctgattttgtgttgcgttttgagtttgtagcctgttgctaaaacagtaagaatttaaggtctagaaaaaataaagaccaattgtaattagtactactgtatatatattatgcactactggagtgaaaatgccccgtccattttttctaagccttaccttaatctagaatagcatctgctttttgtccctacaaagttcgacggacaaaataaaggaaggcaaaatttcgatacccatattggggagaaacaactatatactaatacagtataatttttttcattaacttctatattgaaatgtataacaattattatgtgcattataaataacaaaaacgaggtactgcatggatccagtgaaaggacagagcgtaaaagggatcgaatccaaattgggaacaataaaatggagaattattgaatgagagttgcaaaaatctcatataattatgataactttttcccatcatatcgaatcagaattcaatatgacgtggtcatcgtagatggggaattcagtataatactttagtgtttatgtgtcattagattacactaagtatagattataccgacactgttttacttcatttgcatgacacgggtgataacgccaatgtattggtgtctcatataacgtatagaatggaaagctaaggtatcggtgtctcatggaacgtgtgataaaagccaatgtatcggtgtctcatgcatttctactaaatataaaagtaaaaataatacagtaaaggcaatcgtcatgtatatatcgcaacactgacctgaaaaataaataaaaaaatattttaccgcagtaattatatttgcgacaacttcttaaacttaaagctaacgatttaatcaattactcaataagaatatgctcgggtttgtgctttgttccctcctcacaaacacttatcttatataaaataaagtttattttttagattagtcttaaccagaacaacaacaaaatatatacaaattaattagctagttgtgtgggtgggaacattcaaactatttaaatattttgacaaatttaaattttattatttttttttacttttcacacataatgcggaacaagattctaatattatttaaaatgaactcgag

SEQ ID NO: 54068 - DNA, 879 bp, Arabidopsis thaliana landsberg
tagttaatctcatctgcttccagagatgcagtttagcagaagatctctgtagattatcagttcttcttgaccaatccaccgaaagagatcctccgattacttgtatttcgagtaatttcactctcttttgtttttgattctgcgtcgccctcgatgaaaatcgaatctgtcttcgctaaattggtcacattatctgtctatttgatgctgtgtatagttgccgatacgggaattggatgcaatttggaggaatttcagaatttgaggtgcccaagagaattcaatggagcgaagatttggggtcagttacattactagcatcttcagtattcgattattgaatgttaactatgaaattttagttttatttagaattgtacaaattgagctgaatttgttcgcgtctctgttatctttgtaatacgttaatgcgattctgactgtggataatgatgtgttgcagatgggttactctccgtcaaaacgacttgtaagttttgctatattgacctcaaatcttgcttatggtttcaaatgctttagtctttttcctggttttgcttgtaagtccaatggagaaacatatcttgttttcctctctgggttatatgattgattgttagttgtctacattaagttcgagtcaccgaaactaagtaacttgttattgttcttcctccactgtggtgatggaagtgcaggctttactgacgatgaggtatactattatcatataaatctggatgagtatatagcgaacaaaagactgaaaagacaaccttctcaggctaagaatggtgcaaaatttaggtgtgcaagttcctcaatttatatcttatttcactgatttctagagccactgtgagtgaccttgacttg

SEQ ID NO: 54069 - DNA, 952 bp, Arabidopsis thaliana landsberg
tgagggggtgtgctttaaaagtcacgtgctccaagtgcgaaagagacaaacgttgaaccgcgtgaggttataaattagccacgtttttctagtgctactatgcttggacggcactttctgggacacgaggcacttgagatttcacacactaattttttgattaagttaatcctaattttttatggaatatgacatttaacttttgagagaatctaaccctatcagaaaaagtcaaggcgaaattcgaaaaaaatgtgatgggctcgaggcaacctcaataattggagctttaattgattgattaagatattactgactatatatacttaaggtgtaatgtgaattaaggtccacttaatggagacaggtgggagaaaagtagtaattaaatgggtccgtctaaaggttatccttttgaatttgatagtgattttccaaacaattcgtaagtttgaattacatttttgtactattacgtaaagataacatatttttctttaccaaaacaaaagaacaatccactttactaaagcacttagtcatatgctttttattcatattattaaatcttgtccactaaaggatttgtctacgtgccgtcagacgaccatttttctcccaaaataaccaaaaagaaaagaaaatagtaagatttgaatttggtatataaaagtctgaatagttgcgacaaattaaaaatggacaaatatatttggttggtgtgttttatagtccgacaagtgcataaaactaattttatagctgattacaattgatctaacattctttattagcaagaatcttctaaactatattatcatctctttccattaacattttataattgcgctccatgagtgcaaaatgagcgtcaaacaaaacaagacacgtacagtatctctagatgcatttagaattttggtagttgactagtaatcacattgcaaataaa

SEQ ID NO: 54070 - DNA, 575 bp, Arabidopsis thaliana landsberg
  unsure (1)..(575): unsure at all n locations
tattttttcagaaaacatcagattttgataaatattatgaatgataacataatcaaattagaacataaaaatgtggtaaatatatttgtatccctaatctttaccaaaaattaattaaagcaagaacatacatatacaaatatttaaacctttttaaaactcactaggtttaaatcgatgatcattgattagtccactttcatgtttcttttgccttttggtctacattttttttaactccataaaggggagaggtgggttgaaccagttacatgtgactaggttagccaaaagtggaaaaccacctcaagtccacttcacattcaaactttttttttttgtttgcaaaccaataattgaacttggtatgtactttatatgacgtatgtacgatactacgattaaaatttaatcattaaatgagtacgttatttaggaaggacgaaggagaagaacaaacggtgttggtggcggcgctaaggacggggaacacagatctgccnnnnnnnnnnnnnnnnnnnnnnngtaaatacggtcaaaaagaaattcttggctctaggttcctaggtaattta

SEQ ID NO: 54071 - DNA, 587 bp, Arabidopsis thaliana landsberg
  unsure (1)..(587): unsure at all n locations
cacaaactttaggttttgcaggtttatctgtttttcttagctgtcccagaattttttctttcttcctttttcagatcactgtatcgcctttatctcttacgcctgacttttccctccgccttcaggattcttcctgccttgtctgctgggcctctctccttgctctcatccagatcaatgaacagggactcgatccatcttctttggcacttttcccatttccctgtgatccctggatgacactattttttgtctcactttacctttcaccgtctctataaacctcccccgtccctgttctcatgctgctcctctgcatgtgtccaaggttaacagtgttcctttctctccttcctttccagccactgctgtcttgaaaatgccttgtcctggttgagcgagcccctgccctgttcctcgctctggtttggagcatcgctcaccactgctaactgctcagggaagccggtcatcctcctggagctggagcaggggcgcggggtgggtgaagggatgncctgctgtgtgcactggcctgaggacagagatagagggcaaccggcanagtgagagtgtggaggggtgga

SEQ ID NO: 54072 - DNA, 1432 bp, Arabidopsis thaliana landsberg
atgggaaaaggaagtttggatccaacatttctgccgcatcaacagcctgatacaaccttctagtgttgattcgattgtatgtgaacctcacattatagacactcccagctgtgtggcgttggtggaactcagaggcaaacttcaaatgtacttcatccgcctctacgcggtgtacaaagccctgtgagaaattgatttcaattttgtatcctctaaaagataaatgattaaacatatttgcagttgtgaagcagaaagtgatctgaaagtatgagaaagtaaagcgagaacaaaacctgataagcgtggtcagttccatcatcatatgcatgtctaacaaagatgaagtctccatggacaagggaaggtcttctctcagcaaggccaggaacttcgagggacaaatagataccccttctcttcattgaaacattctccatatcataagctcgcatgtcttcctaaacaaccaaaaaattacaagaaacatgattcatggtacaagaggtttattgagttattaacaaaaatctgaaacaatgaggatacctcgagttgtaattcttccataatcagtaaagttttatagtagttagcatagttccttgctgtaagaccttcgttcaaatcatcagggaattccttattctcgatcatctctctaatctcctttggaatttcatacagaggaagcctatttctaaaactacgttcaaccacctttgaagggcgtgatcccttcacataatcatccacagcaaaatctttcttcggagcccttctacttctagagtaaggcctgttagaagtcagagaactcgaaatcttatcctcagccaaaaggaaaacaacccgctcaaccctatcacttccccactcagacagtaacaacagtggtatgtaaaccaatgtccttaggcttacaagacacccaaatggtcaaagtgtcaccaggctcaagcatcctatcttccagagtaaaagtttcataaaaacactgtctctctttcaagtctgaatctttcgaaggcggtttcaatatcgagagagtaaaagaatcctcagggttagatgcgtaaatcttagtccagagatcaacaggctcatccatagtgttcttgacagtgaaagaatcaaaagaagtctctccaacggttaccgattgaggcttctctttcttaaatgggaaaggaacagaaacaacaactggaccttcatcaaatggattgtagcaaccagaagatccatcattctgatagtctataaatccaatctctcccttgtctgcgattacagaatattcgtcatccgatttgtatccactcacactcattgctgatgatgatgacaatctgtaacataaacacgacacctatcgattataaaccaattacacattttgaaccacacgcatgtcatgatcacaacatga

SEQ ID NO: 54073 - DNA, 136 bp, Arabidopsis thaliana landsberg
acaccccaacaagcaaacgcaactcttaaaaacaaaccacaaattaacgaaaaatccgagacgcctcagaaagggaaaacacaacgcgaagaatcaggcgcactaaagactaccagaccaaacaaaaacccaaaaa

SEQ ID NO: 54074 - DNA, 836 bp, Arabidopsis thaliana landsberg
acatcaagcaaaggatgagagtttttggcactttgtgccattccagaagctacagtttaatatctaatttgaactaaagtttaaccaacgtgtactattttcatcttgttgattctttctactcgtatgggatcatctaatgcgaatacctaacaattattatatatgatataaaattataaatccatgtgaactcaaggttacgttcacattcatgactcatcatattgagtgagtcgatcatataattaaattcaacctacattcttacacgattctaatatagagttaagattttaattaaaaatgatgacacaaattagtttgaacacaacataagcatgttagtaacgtgcttttggggttatatatcattattttaggtggtattattgatagaatggttaagattttaggaatcatggggatttgggcaaatattgtgtcactaagtatctatgtgacaaatttcttatttcctttcaatttctcctgataaacgtaggaaaacgaatatatactaatggtgatggtgattgatcacaaccatatcatcgagaaacttcacgttcaaacgtaaaagacgagaccattatcgaaacaaactagtatgaagaagtttttatagtttttttttgttaatgaagaagttttttttttgtgtgtgaagaagttatatatctgaatgcaaattataatgcaaggaatgtgtatctagccaattttgttgataaaaagattagccataactgaattaaatatggatgttttttttttggaaaattaaatatggatgttatatgttaacatgattaggttaataatgttgacatgtt

SEQ ID NO: 54075 - DNA, 686 bp, Arabidopsis thaliana landsberg
acggcttttgtggatccaagttaaatataggcatagctcctggaattttgatttcgtatgttgctctttgacccagcttttgtatggtgtgttaacaggctggttatgtgggtgacgatgttgaatcaatccttcataagctactaacggtaccacttctaaataagccccgactaatattcccagcacaccttccatcttgttggattttagaagattcccttatgacttgtaggtcgctgagttcaacgtgcaagcagcacaacagggaatagtctatattgatgaagttgataagataactaagaaggtcagtatgcaagacatgataacttctgaactcgataagaacaagataattgggctttatgcttcctggattctcctttctgcaggctgagagtttaaacattagccgggatgtttctggggaaggtgttcagcaggcacttttgaaattactggaaggcactgtaagtggattgctttattaccctttgatgcatatactgaaataattcttcactagacatgagacacttgcatagcgagttatagtgaagtatctagaagtgatcctcattaaaaaaaggtctttgcaatgtacgacaagaaagaatggaaagtttattgatatgtttgatgtatgcgacattacatatgattactaatccatttacacatct

SEQ ID NO: 54076 - DNA, 1202 bp, Arabidopsis thaliana landsberg
aggattactagatgcggctcatagcatgtgttaacctacagtatcttttagtttatttaaaaagcagtagtgtatgcccattttgcttcacttgtcatgtaccatattaaagaactttgaacccttttaagtaattgattgatgcatataatgtggagaaccatgtgattttgtttcccctcctccggactttttgtcaattatatacgttctctagctttttgttgtcttctgttaaaagatatataaatttggtacaaatatataccttcttacatatatctaatatatcaataactaattgttatacaactttattttaggtcgaacataatcaaaagacatagttttcaaatcactcctcaactttcaattaattatacaaaaaaacttgcaaatttttaatgaaagattgcatgcatttaagtgatcgtttcatgtgacaaaatcccaaaataacacgcgggtcttatgagtttcattttccatcgcatcacatgctcttctaatcatggtcaaagcatttttccgttagtcatgaaattgacacgtggaaaatactcttttcggaacacgtggatgttcctctagtgatcacatctttgtaatagaatactcttttcagatacatacatagttagaagatacgtctaaatttaaactagcgaaacttaaagagtacagaacattatatatgattaacatttgtctcgagtctcacggctttaaagatacagtattgagctggtcttgaatcatacatcatcacttttcatttccttatcgctatatttaataaaagatggaaacagccaaacaacaggtcaatatggaagtttcaagttgtatttaaaagaaaagaaaaagccattagcttagtcatcactcatcaattcgttcccagaaagttacaaatttggaccattccaattatctctaatggaccccagtaatcttatcttttcgctaatttatcccataactttacttttttaatcaaatcaaactctgttttgtagccatctcatgtgctggcctcatccgagaaattaaaccccatttaattaccatcatcacaatcatcatcttttgccatctgcatcgtgggctttgtttttcttgccatcaatatcaacaaaggactaagacactttttaccaactttacgtacggactattccatatttgatctttaacctttt

SEQ ID NO: 54077 - DNA, 757 bp, Arabidopsis thaliana landsberg
taaataccaacttagatgagttttttgtttttgtgtagcagaaaaaataaaaataaaatgaattatcttggtttagctggcgggaaagtaggtttgtagcagaccaattttgatttttgagagacgcttacgtgtggtgggtctgttgatcctcgaacgccgtgtttttgcttcacatgatcgtaacaataacgcttatgcatgtaatctaatacatcagccgataacatgggacatttgctcccctagatccttccaagaaccgcccatgtatatgaatatatcagctgtctatatggtctcaagtcttaaccttcttctaccaaaaataataaacatttttaaaccctactaaatggttttcatatgttcattttattgttcccttcccgtcaccgcatccaccttgcttggtttccgaaccagtgcccctcttcgctgttagaaaatgggttcaggtttaccataattttgattattatatttgaactagctccttatcaagctcctgatttaatctgatttgtatattcaaatctttaatccgattgataatcgaatcaacacatgctcagagatgtattaacttgtattttgtttatatttggtcttaaaataagagaaaaatgcagtagcaacaatgagaaaggtgattcatcattgatattgggacaaaaaaagttagtgactcgtatctttaagtatcatgatgttgggattctctaatgtcttatgtctagccttcctttactgactc

SEQ ID NO: 54078 - DNA, 904 bp, Arabidopsis thaliana landsberg
catgcaattatttgaacgtcaaattaagatattgctatagcagtataggcttttcctttcaaaaaggggtttccgatttaaggcataaagaaagaaaaattacgaaagactagaccaagctttagtgttttgtttggctagcaactagcaaggccaaaaacatatagtagtactagtgtagtgtagttagttacatcttgactcttgtaatggtgcagtagttgtgggttcagtggttgagagataccgattcaattcctctttgaataaagcaattccattgaagttttgaatcaaaacatattattttactattttattagttttttcataatagctactaaatttttatgcataaacagataaaaacacaaaaggaaaccaagtaagaggacggcgatccagcacgccgccgtctccatagccgtttctttccctcgccgccacttcatctccaccttcgcggtcttcctctccatatattctatgtacttctctttcccttcttcttcccctcccgccctaaacctacgtttcatccccatggccgccaccaaaatttccaaactaaccttccctcctagattcctcccatccttgtcctctgctactaggctcacctctcttatctgcatcactgctgtctcctcttccctccggttaaacgccgccagcaccaccgttacagtgaactccacttgctccgaccttttcttgttgcccacgacaaaaatagaggagaattttacgtggacttctccggttaaccaatgacggtgcaccgagacaggtttacgggttgatacatttgccgcacgtttacatgtcgggtcaatgagtatccagctcaaggagagattctcttccaagtcacttttccacgtgtcatccttacattggtccg

SEQ ID NO: 54079 - DNA, 576 bp, Arabidopsis thaliana landsberg
  unsure (1)..(576): unsure at all n locations
ttccacaaggcggcggcggtgcaacctcggcgaggaaattggctatgctacgctggctccctcggttcaatacgccacggcacaaatcccaggatccaggcggggtcttctggccgtctgtaaagcaccgagcgaccccgaggcctgagttcctcgacggcggcgcgtagtttcgattctaggctttaatggcggcgcgacacggtggnnnnnnnnnnnnnnnnnnnagtccaaagaggagaagagagaatcgccagggaccctgagaagcccgcacggagacccgctcgatccggccgggacgcgatgtttgttgacgcgaatagcccagggattccacgcgacgattttggtgctgaaggttgaaggtgggagaggactgacgagtgggacccacaagcagagatgccagcgcgcggttcgttgagggaggtggcgcctcgttgcaactgacagagggggggccgcgcacagcgagcctcactgcgcacggtggagaagctgtccgggccgcgcgggggaatttgtaggtgggcgaattagtagcagccggccagttaggttagtttcgtttta

SEQ ID NO: 54080 - DNA, 1192 bp, Arabidopsis thaliana landsberg
  unsure (1)..(1192): unsure at all n locations
gactatctagcatataattaacgtgattaactttacaattatggtgatgatgattttctcattatgtaggtatagtacttgtcaaagtgacaaataattgcaatttaatgaattggtgtggatccaaaggataacaaatagtatgagcatattcattcgaagcaaaatggtacagaattaagcaaagctttttgtccaaaattctaatgaattaaggaccattatttttagggaataatagtctttgatgccccacatttccaatagtacaaatcaagattttcaatatatgtcaagtttgttattttcattcacggacattaaaacgagtggagcatttcaatttgacatatctttgtccttttctttttgttacagatatcttttgttcacgttctttgaatcatcatattcatagctatgagatcatagaaatatcaaatactgttaattaacctctttaaaaatacatattcacaagtctcttgtgtgagtagaaatcctatacaaacaagtttattcatgctctaataagatagataaataagaagattgctcatgacatggccttcattaggcttgttgcatatacaatagcttacagtataaggaattaaggatggtctaatatctcntgcttcacatgagaagagtaataggattcgagtcacataagagatttttattgtagtgtgtataatatatcccacttctacaattatccagtctattgtgtatttttcattaataaatcactaaaatttgcactttgacaatatatacttaaatatttgtatctcgtatatatatatatacatatttttagcactgtatgataattctaattattcgctaattgtttttttttggtaagaattagtcgactattttgatattggggttgttacatttatatcttgcattgaattttatggacggacactggtcgcagcctcacacactaatttgaattttccgttatcattaatattcgatcgtttcgttggtacgcttccatcacacaattaatttaagccaccacactattatcttattctcattcagttttgtttccatttcaaatttcttacgacgcatatgaaaatgtacatttttataacaattccccttaaaaatagatgacaaaaagaaaaatgttttttttaaacccatccctaaaataaaataaata

SEQ ID NO: 54081 - DNA, 1144 bp, Arabidopsis thaliana landsberg
gagatattaaattttaacatattttccctaataaacaaattttgaatacattgtctaaaaaaaattgtcacagtaatttcttaagaaaactaaaaagactattctacatattaacaaaaaaaaaatcatgtaaatattgtacgttgaaaagagaaaaggtctctcaccctggttgcaaagaaaatcctttaaaatccttgaaaatcttaaaaacttgttggataaatagtagatcttcgatgaaaatatggacatgtagaagattttagcagaaaatcctttttgtagtttttggaacaattttcacctactggcagcttttaccacgacctgaattttttcatcgactggctttaccacaagatgaggcttaattctccaactttttgtaaaaaggattgcaactctttttataaaggcttaaattttattttatttttgctttagacatcaatttatgttgggcctgccttgacgtgttggcaaacaaaccatgaactctaaacctcaaactgtacagtctctttaaacccttttgatacaaaatctcaacagcaacgagaatatatattagttcccaagaatacatgaacgatcccatgaagaagattatacccaacacgtgttacacgtctatgttttcagttcggagtatgaaattgtgtgacattatagtatcatcagaatgaaaatttaaacatacttttaagcgtaataatatcctcaaaggttttagcaaaaaataacattgtaggtgtcaaatccaacatagaaacacaatatagatatacgaaaaataatctaagttaatgcgctcaatgaagaatgtgaaaatttaaatgaacgcaaatacacaatcatgaaattttttgtttaaagaacaaaaaaaaagtgattacgaataaaagcaagtcaaatgttcaacttagtcatgtaaagactttttaataatcttcggtcaactaggttttcttccacctatttctacgtgtggagtgacacgaagtcgggcgtatgatttaataggttttaaagaaaaagaaaaaaaaaaactcacctctaatcttttttttggcgaaactaaccctaattacattttttttctgaaattatatcattttaaaaaaatttgttgtttattcgg

SEQ ID NO: 54082 - DNA, 212 bp, Arabidopsis thaliana landsberg
  unsure (1)..(212): unsure at all n locations
ccccccccccccccccccccccccaccccccatttttttttttttttttccccccttttttcccccaccccccccccccccccccccaccccccccccaccccattttttccacccagtttttattttccccaaaccacaatttccccccccccctcccccccnnnccccccttccctccccccctttttttttttccctttccctccctcc

SEQ ID NO: 54083 - DNA, 1380 bp, Arabidopsis thaliana landsberg
ccagctcctccacaggagatttctttgtcgccggagagttctagtgaacagccgtcacgactagtatcaccaccgcgtgagatagtttcttccggcgcggttaaaagaccacttggtttcttggtcttgtggtgttggtgtatagcattttgttatgttttggtatgatttttttttctttctttcttttatcacataatgttttgccttcgattagggctttatttatttttactggattttttttttcacaagggtttatatttattcacgataatgttattgtatttgagtcgaggaaaaaacaaattcactttcccatgtaaatttggattgaatgggcgattttgggtaaaacccatgactatataaatccttcattttctcttttgctcttgaatcatcttttaccgaaggttattcccagtttcaacctaaaatatgtcaataaattttacttcatcatgcaaccgcgtgacctcaattttctaaacattagtatattctaatttctacaaataacacgtggatttgtaacttttaaatggttaatttatatagattgaggtgtggtgaaattctaaagaagtttgtatggaatctaaatatcaggagtgaattagctcagcggaataataaacagtgagtgcgtgacaggtgcagtagtgggtcctaccaagttgacaccgacggtccagatctgctatctctcaagtcaatttctcgctagattttcgggttatctagagccgtcggatcttaagatcccagtgtcatcagcgcgcgtgtggatgtgtacggccagatctaactctaccttattcacttcacttcactgactccgtgaaaagagaagggagtcattgatcccctgtgctcgctcacacactactaccgtactattttactaaaccgtatatttgagtaatttaagatttttctttttaattgttgatcttgaaaacgaattattcatgtattttcaatcgagaaattcgttttcaagctattaattgtgtaacttttatgtctttttatgaatttatgagttttaaaatgattcaatagcagatcggttgaggcaattgatgtggaattaatggtaattggtggtactatagtgcttgacttttccaatgtaaaacgatcaacgatcattcaaaattttcaaacttgtggacctttttggggatcacagatttggacttttcttggttatattaaagttttttttgtccctatattcaatgaccaatctagaactcatctgtttttgaactaacccaacactcaaaaatagatcccaaggcctctctcctctctctctttttccctataaggttcttggaaataatttgaaagaaagatgtcaatgatgag

SEQ ID NO: 54084 - DNA, 1205 bp, Arabidopsis thaliana landsberg
gtcatcttgcacgactttgactccatcaggtgctagattcatagggacttcgtaatcagtgtaatctgcaggaacgaccgttgcgttaaccgtggagatgaagggggtctccggaaaaaaaaagtttgtgctatttgacggtggagaaggtgcagatgaattggcggcataagctccaccggctagagcaagacctatgaaaagaattacgaaagagaaatgttgtggagacatataaatttttatgtgtagaatgatcctttttcgattcaatatcggattttaacgttaaatggtataaaagtgtagagaaatcaatgaagaaaattgaagagtatgaataaaaaggaaaaaagggagataaataggggatttaaagctattaattatgagatggatatgtttggtaatttaaaacaggtgttaatttagactctaaactttagagtttatgtgtgttttccgttgtgaattagccaaaattgaatcatacaggctgtttttttccacagtttttagaatatggtttcatattttttttttagcgtttgttgttgcttttcgtcaagtgataactttgaactgtgcatgggttgttattaattagagcaatacgtcaaacggatttgataacactatataaaaaatattaatctaaacagattgaaactgatggatcataacacaaatataataatctaattaattataagatgaaagtttcaattgataacagtacataatcggttttgtttctagttttgtggtttctgtatatatccagggagagatcatgaacttgtaaggtatgtaatgaatatattttcatgtcttgaatttaccaaaccatacattatattatatagtttagaagacgaaaactatgtcgtgaattcgtgatacgtggacttcgagccattaaaaaaatatgtcgtgtactcactcgcttttcggatcaaaccaacgcaaatcgtacgccactaactaacgataaaagctcacatagattgctatatgacgcacaaaacaaatagtgataagtcaaatctatatatacattttcgatgaagtacgtaaacataattacactaactaattaaccaaacacatactctaatttttttttctatggagcttgttgtgcctaatctaatccaaatgtggttcacgtgaaaagttacaagttggtgaacaagctaccgcat

SEQ ID NO: 54085 - DNA, 1096 bp, Arabidopsis thaliana landsberg
agtaataggtaaatcgttttgtgtgatttaagtcataccacccaatcgaattctcatgggttttagggtatgtcatcatctttactttggaaatgttcccaaatcttcttttaatatacatacaatatatgctcatgtcatctgatttgactccttaaccacaattccactattagttaattgaaatatttggttaacctatctaatctcatattatatgattattatatgtatatctactttttgtttttcttttataaaataatcagctttgcggtctaagtcaatttggcttcgatgaataaataatccctaaactaaacatgtctacctacttaattataaggttttcctgttaaagtaagacttagtttagtttaaaaatccatataatatccatctcatcataaatgttttataattatgtcatcaaattgtagttgtagagtttaaatttttattatatttatgaatatagtgtatttttggtgtggtaagtgtctttaattatagagagatcaactcatcaaagtaaatttggtagaatctttaaaagcaaaattccggtcaaccatatgacgtttaaaccttaagcacatatataaaacttgtttgtttgacttataggacatgacaataaaacgaccatggtctaacctcctccttgtcatatcatgaaatttgttatatcattatacctaattaaaatctaaagtttagattatctcgcgcgtggagtcggaagaacacttagaaaaagtgaagcgattaacaagaagaagaataaaaacttataaaagtgttaatggtttaagtgtcctcggcctttgacctaatcacacgtatattttttattatcttcacgatctatgttaaaatatattgttcactatagtatgattaatttatacatttgatgtatgtatatgatgcatgtatgtatgtaaaggataatcagccctgtgtacgttatatagactagaattgcatgataaatattaattgaactaaactttaaaaaaaatctctatgtttcctattctatatcaattacaaaatgaagctaaattaactgcctatcctaactgaatattat

SEQ ID NO: 54086 - DNA, 107 bp, Arabidopsis thaliana landsberg
  unsure (1)..(107): unsure at all n locations
aaacaaagaaccaacacaagaangagagaaaccgaagaacaaccgcgaaaacaaaaaaaagagccgaacaaagcnnccncaagaagcaggaaaaaaaggacaaccca

SEQ ID NO: 54087 - DNA, 605 bp, Arabidopsis thaliana landsberg
gctataacgttaatttggcttttgcaaagactcaacttttcgtgtcaattatagaaatactattagttatttgtcacttatataagccttctttaaaaataaacctataagcatgatacagggaccaatcattgatgaaaaaactcttatgcagaaataccagtttcataacaagaggaaagaaaagatgattgagcaagtgaaacacatgcttgggtaagtgacaaacgatgttagttacccagtcttctgaggaagtctactctgattccaacaatgatgatggcaaggttctcatcagtgctgcttttggtaaaacttctgtgtcaaaaaatgaggagtcagctttgtacagatgaacttttctggctatataagctggtcagatgtcaaaatttgtatatactgatctagatataggcaatatatacatacatataaataaatcagttatagccatacatatgatgtatggttacatacatgcccccatacatatatatgcacttgaagacatacacatatacacacaaacattttatatacacatgtatataaacacacatacatactttttatgtccctatacatgtttccatgagcac

SEQ ID NO: 54088 - DNA, 428 bp, Arabidopsis thaliana landsberg
  unsure (1)..(428): unsure at all n locations
gctgttctgggcactgctgcttgcggtaactgttgttgggatgattcctcattttgccgcaaaggcttcagtgagtatttcatccccagtgacattcagattgcaagagaaatggagaagtcgcaagatttccatnnnnnnnnnnnnnnnnnnnnnnnnnnnnnnnnnnnnnnnnnnnnnnnnnnnnnnnnnnnnnnnnnnnnnnnnnnnnnnnntcgagtaggatatagctctacactttctttggttctttttgttgtgtgtacaggcaattctttcagcagtgtgcaagctttcttgatgcttgctccgttgccaactatccaaaggataggccccttgtaccattctgtgtatcaccagccaaattttgttgatttacatgaaaggagatcatacaggagctattattatattatatagtatat

SEQ ID NO: 54089 - DNA, 498 bp, Arabidopsis thaliana landsberg
tgtttataactggctggtgcactgctttcatctgagaaaccagtttagtgttaccatgtttctctatttttgttataataccatcgcatgtaaggctactctggttatgttgcagtcaaaataccattttcactgtcgtagagggtcagattattgttgcagaatgggattgacttgagcgctgacgatgttagctatgcgagcagtccttcctggtaagtgctcaaactgcacaatggactttgtgttcttcggtcctcttcagattttcagtatgctgatcatattcgcttctggatatttgcgctttctcttctttctttatgtgagcacatgtttccctcttcaagtactccttgaactcgatgggataaagaggcttgtgcattctcattctgggagatgaaaatggttagctgtcacatacggatgtgctacagattccttagaacaagactggggaaataatcttttacttttgcttgaaatgcacccgtt

SEQ ID NO: 54090 - DNA, 693 bp, Arabidopsis thaliana landsberg
aaaaacgtaatctattcccgttattttaagaatctacacaaaacttaacgaaatactattgagtttaattaaagaaaatgagaaagaaacgggccgtgtcgtgtgacgcttgctagggttttgatcacattgagataaaacaatttaatttataacaaaatatttgagttatgtgaaatcatatactaatgtatttttttagtttgttactaaacaaagtgactccccacaaggacccaaccccactgcacattcaacattaattaaacacgatggcacggaacgagaggtacccatatgagagatatttgttttttatatttattttcacttactaccgacagtgtcttttccagctgtcaccttcttcttggctcagaaggttcactttctaaattccatgtactcaaatttactatttataccataatttaccaaaccaaaatttagctatttgctgcaataatatatgatcattccctccaaaaaaatatcaaaagagagaaaataataatagaaggaaagtacattgacgtacggtggcactaacttctctttagcctctctctttcaatcacagtctcttgttttggtcttatttgacaaaagaaaattgtatagtttttaaaaattgacttatggatttgatactcccaaatgttgtagtctcgtgactctagtagtgtgcaagtg

SEQ ID NO: 54091 - DNA, 552 bp, Arabidopsis thaliana landsberg
gcgaaggtttgctgcatctgctgtcggacgatgcgccaacgcgttccgttctatgcgcttgtgccggtttatttgaagccgcgcacatcacgatgacgcgcggcatcttggccggcgatgccgacgaagtcgcggcgcgtttcgccgaggtgacggcgcgcgagggcgaaatcgtgccggagagcggtatgcagcaagccgttgtcgaacttgaaaagatcaagcgcgcattgagttgagtcggagttcagccaagaaaacgggccccgtgatttgcggggcccttttttttaaatcacaccgaacgcccacagcagtaacaggataatcagcacggtgccaatgccgccggacgggtagtagccccaagagcggctgtgctggtacagcggttgaacgccgatcagcagcagcaccaaaatgatcaggacgatgctcatgacagacttcctctgaatgagaagtcagcatgggctgcgcctgtgtctgtcgactgaacgctccggacggctggcgttcaacgatgggccgagtcgcgatagacgtatgtca

SEQ ID NO: 54092 - DNA, 911 bp, Arabidopsis thaliana landsberg
attatcagatctgatcttgtttgggacatacgaaattttaaaaagaaatatatatgttttgtttgcggttaaggttaataaaagtggatactataattcaattaacaaactaaagattaaaaaatacgaattaaggaaaataaaacaaattgttctaagttcattgaatccaaactgaaatatgatactttagtgtttacattatatatttgtttagggtccattggtatataacaaaacccacaaagattactatacgaaaaattgataaatatatgaaaatgtataaatttattgaaatattattgcaattcacgtctgaaaataattagaccaaaaaacttgaacaatttctataaaattcaaattgctatgctacaaaataaatatttgactgtttcaagaaatacaattattctgtcgctatcttgaccactacaaacctaacggcacgtttgaagccggtgggaaatagttgtctttaattgtcattttacaatgtctccaatcactatatgctctcgggcctcttccattttttgggattatcctcatttttctataatcagtttaatattatttctcataacgaaacttaatactctatgaatttccagcttgatcaacaaaacgttgaaaacgaaatataccaaaaaaaataaaacacacacacttatctcgggcgttggtgataatttttgagattggctaatcaactttggttttatttgtcaacagatttgttaatcaacttgtctcttcttctctcgtctttttgctttcaaacccttttcaaaaacccttaattgcaataaattcaagacttttaattcgtgtggacaattcataagtgtgaacgcgtaggtattgagcttgttgtgaaagtttttttttttacggatttttttgca

SEQ ID NO: 54093 - DNA, 365 bp, Arabidopsis thaliana landsberg
ccccccttcccccccccccctccccccccccccccctcccccccccccccccccccccaccccccccccccccccctcttttttcggggttgtttggcaccaccccccgccgcggcccccacaaaaaacaaaacccccccccctcgcccccccccccccccccccccccccccccccgccctcccccccgccctccccccccccccccgccgccccccccgccccctccccccccccccccccgctctccccccccccccccccccgcaccccccccccggcccccccccccccccccccctccccccccccctcccccccccctccccccccgccccaccccccccgctcccccccaccccccc

SEQ ID NO: 54094 - DNA, 590 bp, Arabidopsis thaliana landsberg
taaaatattaataaaatataatatgtgcccctagaaaccattgacccaccatgcattctgaataaacaccgaaccttaccacatttctgagcaatttttccacagaagaccaattcctaatcatgtttaataattaattaatttggattttggagctatctttactctttctttgcctataaattaaactccatctctcttcttatccttctacttttctttcctcttctcagcaaaaaaacatttttagtaacatttgttctaataagaaatttgtctcttgctttaacaagaagcaagactagccttatctgtacctttctttctgaattaaagaaccctttaagattcatatgattttcttaattctttttttatatatgtagatttgtttcttaaacactatatttatgttttacaataattgttttatatgttttcaacttctttgtagatttgcttcttacacacactaatgttttatctttgcagagaaacttgacatttatggagtctgtgaagacaaatcctccacgcaaggagcgttgagtaccgcctcgccgtggaaaggtgaagcgagagatctttgg

SEQ ID NO: 54095 - DNA, 802 bp, Arabidopsis thaliana landsberg
tatttttccttatcaatatgttttcaaaatgaaaacgtgtacatataaaaaaaatggtcctaagagacatattaattttgattggtccacctggaaaaccggcaagggatggccatggcacgtgggatttgtggtccatgctgggatcaacgttcctcaatgtgccacgtgttttgatcatccagcgtgacagcctgtgttttcaacttttcatcaccaagcttcaaaatcttttttactctttttatttttatgcttaaaaataatttagaaattgatatggtcgaagagtaataataacttctcttgtcaaaagggagtaattatataatatgaaaatggatttttgtcaatacataaatttttattttctaaattaactgttttgtttttttcaacatgatttctctgttttctatttgattcaacggcgcatttttttaaaatgaaaattgtttgtagctcaatattaaagatattatcgtcaaaaattgttagacaaaaaaaaaaaaaacccagcccacaatcatatatgatatatggccactgataatatctgtaactgatttaaacttaaaaattattctacaataagggttttgattcgtcggcccaaatttaccatatgggccttaagaagcctggttaaaatatatggccactggataatacaactatctttctttctttttttctttagtaatatatggcatcagtatttagtgtcaatgatttatagatgtgaataaagttgaaatttttggaaagctaattgataactttgatgaccaatatataacaa

SEQ ID NO: 54096 - DNA, 504 bp, Arabidopsis thaliana landsberg
ggcacatcctcccgaacactactcagacaaaatatctgcgggaggatgttaccggacgtgagaagccgagcctagtcggcggcagttttggggatcgcaagcggatcgacccgcttcgctcgtccgccattgctgacgggaactcgtccgatttctccggctatttctttagctaaacgcgcactcttcgcgacgcgtgcgaaggcgtcgtggttggggggcgcaccgtgacgataaggcggcacgcggcggactgcgccgtgacgcccgccaacgcaaaggttcgcgaccgatccggtcgcagccggaaatcagaaggagagacgatgactcgaatgaaaagcgcgctgctgtcgatggcagcatctttggcgctggccctgccggcggcggtcggggcagcacagcctgcccaggtgacggtgacgatcgacaccgcgcatctcgggccgaagatcgaacccgccgtcgaagggcagtttgccgaaaatctcgggcgcgggc

SEQ ID NO: 54097 - DNA, 1142 bp, Arabidopsis thaliana landsberg
cgaaagggttacacagataaaataccatgagtcttgtaatttttctcctgggaattcgcgaggaacaccttcaaactgagaagatgaagattctttttctctgacaagctgagacctggagtcactctcctctgtctcatcctcaccatgaacgatcatagttccgaagtcaccacctgatcacatgagccagtgcaaacataaagttacatgcttctgaaaccatgaagggagcaaattatatccaagctgtatgctaaaaaggctgctgaataaaaatcatcaaaacatcatcccctagtgttaactatacatctccaagaaaatgcactcaacaattcttatgatggttcgaaaatgcagattgccaacttgtaaagcactacgaaacaggccgtggttcacagcccatgtttatagaagcatactgattagtcaacaacaatacaccatttggttgagaattccttgtagaagtatgcaatatggacatagatagtcatgcatataatacttgccttctccagccaacacagtgttgccagtaatatgctgccgattcagggtgctggttagaggtgcttcggtcgaattttgaggaggtttagatggaacagtaattccaagctcctcgcttgattttggacccagtgttgactgttacaagagtagaatataatgaagataattataacttgcaaagatattaggaaagaagatgggggtaactaagagagtggtaaccgtttgagaaaaacaatacatacagtgtcctccaaagaaggtgcgacaacactttgcgcttgcagagccattgtagctctgatttgtctggacttctcaatctttggcgacattgcagaagccccagttttacatctctcaacaaatttgtgctgaatttagtacgaaagagtaaatggcattagaagaacacagagaatataaacactaaattgcatgccagctatgaaagtgatggtaattctgacaactaaagctgaagatatcctagtattgacaagatagagttacagctaagctgaaaagaagaaagtcagaaggaaaaaacagagtattgagatacacatactaacgatctctggcgtacatgcagaagactatctatagtaccttaagca

SEQ ID NO: 54098 - DNA, 530 bp, Arabidopsis thaliana landsberg
acacgcctactacatcgactaccgcaacctgcgtccgaagttcgttttggcgttctggaacctggtcaactgggcgttggtcgccgagcagttcgaaggcaagaccttcaaggcctgattgcttcagacctgaccaaagaacccggcccagtgccgggttttttcattgcctcgcgggcaacgatggattcccaggtaacgcttgctccccctcaatagcgcgctaccatcaaatttcgggcaagtggacacgccgctctcaagtcgcaggcgttggcaaccgatacactgtcagggcagacccggcattgcgtgcaggcctggactcgatagtgtattgccaacgatagtggcaaaatgctggtatgcgcatggattaaggaaactccattgaagctggaattgcgggacagcttatcgatcaagttgctcagggtcgtgctactttcggcgctggcggtcggcgtcgtgctcagctgcgcgcagatcgtctacgacacctacatgacccgcatgccgtgacaccgatg

SEQ ID NO: 54099 - DNA, 124 bp, Arabidopsis thaliana landsberg
  unsure (1)..(124): unsure at all n locations
cccccccccccccgctttccccctttttttttttttcctcccccccccccctttatttttttggccccccccccccccaaaaaaacccccggggtgggnggggccccccccccctttttttttt

SEQ ID NO: 54100 - DNA, 1123 bp, Arabidopsis thaliana landsberg
aagacaatcaacacaaacggagcttcgcaaaacatatactttggcatcattcgtggacgagaaaaactcagtgaaaatccccacacaagattccacgcactcaaaccaacaatcctctgtatgactcgaatcagacttcttatgaggtgaatcaactataactccacagtcactactttctactaaagggctaacacacccggacttcctactttctttagcttgaatacaagccaatctgagcacacgacaagctccattcaacgccttaaaagaaagtttattttcatttgagaactgtaacgaacgtaacagcctctgtgaaagaccatttgcgatcctaggtgtagatgcagactgctcaagagcatttaaaaggacagacacacttggctgcaatcacaacaaacactaattatgaaaaccctcaaagagaagcaaagcaacatttggcaaaggaaacaacaacttcagcttctgaatattgaactaaaacccaaattcttatatttccaaaacaatcacaacactatagaaccagaatcatccaataaaagagaaatgcataccaaatgagacgcagctgcatcagaacttgaagccgatcctgcgacagagtcagattccattagctcaataggtttcgtatattcaatgatctgtttcaagatctctagccgatggtttgatcccagaagaaaatctccaaaattggcgcataacggttgatagtggattcactgagaagagaaactgcgaagaagaaagcttcttcaagtctgtgataaaaagttgctatgaagcatcagagcatttacccccaaattctgcaatctgcagaaaacgaaagagtgcagacaagtatctaaaatttacaaaagcaagtcctccattttactaaagtcttataaattcctccttatattatacttatgtcaatgtgacccaattttcttccaatgctggttaatccgtataagaccgtagatttgagtaaaccaatgtggcagtctagaatataaacaaagaaagttattgagacctaaagaagtaacgtgaagatcgcagttcatggtcatagtcgcggttcatggtcatagtcgccgacaattgccaaataaga

SEQ ID NO: 54101 - DNA, 745 bp, Arabidopsis thaliana landsberg
ccctaaaaaagctgattccataacttcgagcacattacatatgccagccacctgtttgaaccactttaggagtttatctaaccaggcttgcatttcttttgtttcaagattatctgagggccaatattaaagatagacagaccttacggtgcacaaatatacagtcttaagaaacataaaaatattagcagctaaaaggatgcagatttcttgaagttcagctaaggtgctccggaatgtacgcttgacccaatccttgacaacaacttcatccagcaagaaagcaatgaccggatcactagatacagctgtctcatccatacagacattggtgatatctattaattttctgtcaaggagatgtcaactatgcatccaacataaaatacctcttagagaatgaatgacaaaaacactatgcacatttcgcccaacagagacaagcatgaaacaagaactacctaaaaatacatgaacctatcagtacaaaactccccatataaacacagttcctaatagcacaagcattttcataaggagattcatggtcacagctgtaacagagacaacacaagcatacgaatctaaaagaaattcatgaaagtatcaaacaggaaactaaaagactaaatgcatatatcagacaccaagcataaatgcaactgaaggatacaatggcaaaccaccgagatcaaattattgttcatagcaacatcaaacagagaataaaggcgatgaacatcag

SEQ ID NO: 54102 - DNA, 619 bp, Arabidopsis thaliana landsberg
acgacctaacctattaacctcattagaggtccataaagcagagaggtcagaagcagagatgtcagattagacctgagccctgtgactgaagctctaaaggagagccttttctcaactctccggtgatgttctcgtaccgctctgccaaagcacggtacatacggtgaaactcatccacaagagcaataagctcaggtcttgactggtaatacatctctgccttcttagcaaaagaatctgcatcctcctctatcaacttcaccatccgtttcacgctccggtccatctctgatcataatcatcacacaaaacataaacttggcatattttttatttcctttatgaaaaaagactaaccacctaatttgggaaaccctaagcctaataaggtattttcattacatgaaaacgacataatgtgaatggactcaccatcgagattattctcaagccacttagaatttttgagaccgatatgactatcccaccaccatggatttgatttggtggattctacgcgtttgatactcttcttggagcgaagctggcaaaaaaaaaaaaaaacaggaatcaagaatgagaattcggttgtttttggtatgaagaaagacaaactttt

SEQ ID NO: 54103 - DNA, 482 bp, Arabidopsis thaliana landsberg
ctctcccaactgagctatccccgcttttgctttggtttcattaatctttttattcattccctaaattcatgattatcttctaattttatacggacaaatcagtaacactcagcaattcgagttcttgtggttgctaaagtttttagtcttatttttcctttcaaagacaaaactaaggaagcttcaatgtctgcagttgcaattaacatgaacacgatcaatcacttgtccaaaacctgttaaaccccaaatatccaatcaccgatttgcttcgatcgcatacccttttcatattctctcattcctctgattccaaaaaccctaaatggcttctcctcttactcttcttccgttagtcgcagaacgagattcatcattcccaagagacgacgattctgttgttccatggagcggcaagactgcttgtaaaaaactctcctttatactcttctctgcttcgattcctctttattagcagaaat

SEQ ID NO: 54104 - DNA, 1259 bp, Arabidopsis thaliana landsberg
  unsure (1)..(1259): unsure at all n locations
tattgctttactactcgtatttggaaagtcatgtcggcaaccatgaaataatgaataaattaatttatttgatttctcgaaggagcaaagaagagtagaagaccaacacttttggagtgtggagtgtacttttgttggcaacatatgatggagatagcttgccatgattcctagtaggaggcggcttggatgttgtcggcctgatagagagatgccttgagcatcgacttacattggaaatgctttaactagtgaaagacgagatgagaagtgccttgagtggtaacaaattgactagaaagtgttttcggaaatgacaataaagatgggaggtactttaggcaatgacctgactagggtggttgaagaccgactaacggtcttgcaaaggccgtgtgcagaaacttctcatatagaaggtgctggagcatctgacagctccataaatgtttgagatatatccaattgtatggaagatgtgtgaggtacttttgagcaatacatggccgacttaggaatgcctaaggaccaacatacaacattcaatgtgctttaagtaacatttgattgactcatagatgcttgaaaactgatagacaaccttataggtgctttaagaaacatccaagtgactgagagatgcttgaagactcacatatagtcatagttttggaactgctttgagcgacattctcttgtccaaaacctacttgagcagcgataggcagtaccaaaagtgtttgggctatatctggctctctaggaggtggttaaggactaacaaatagcttcggaggtgctttgagaaacactcaacggactatgagatgcttgaggatactaggttatgctctagatgaatagggttttgaggacagataatcgagtatatccgactataaggtagtgaaagtgttcaatctgtactatattagaataacctcgagatgactaaatggtgtcatcccgaagattctccaaccctttatttagaaaataactatgcggctgcatgaagagtagagtgtagagataataggaacgaaatgacaaatagagattgagagtgcaaaagggagtcattttctgctcttaacattcattttgagggagcatgttagaccataaaaatctagaaaatttcttatttttacctagaatatcagtgtgtgcatgtttaagaaatgatatacaattctacaaaatgtttaaaacagaaaaacganatcagtatatattacgtgctcgtctacttgcat

SEQ ID NO: 54105 - DNA, 402 bp, Arabidopsis thaliana landsberg
tttttttcttggattgtgaaagttatttgtaaaaaaaaaaagtttacatttttgaaacttgttttggttttggttaaacattttgtttatagaacatctgagatttttaacttctcgttactgtgatgatctttggtgttgtactgtcaattgtgtgtattgatgattttcacctgtgttttatatttactgtctcagaggaactatagccaacactagtcactgcaatatcgagcttggagaaatggagaaggaaagccatgaggagaacaaccacactatctcaggtgatttaacgggcaaacggaaacgaggtcgtccgaaggaaccattgaagctggaatcggatgaagcctcgtcttggtcattctccaagttttagcaggagtcaggagcagtctc

SEQ ID NO: 54106 - DNA, 1271 bp, Arabidopsis thaliana landsberg
acggtaagattttatgtcgggaacttttaacaaatcaaactaggcatgcaataacggttatgtcggattattcgggtttttggatagttcaaaaattgaaaattttgatgaatttgattaaaacacgaaaccgtgtaaaaccaacctaaaaatccaaggtgttttgttttttacattcaagaaaagcaaagttacacagacaaagttgttttttaacagtcatataaatctctaccagaagatcaaattggacagtttttaaaactccaaaccaacattccatcacacgagttcttgataacttgaaagacaaatcgaatcctcatgtcacctattcctcttctctttccggaggaaggccgcagggtaatagcattttctggaaatcaaaagacatctcaagttattccaaaacatcatcacatctacaaagtgtaaccaattttttgagcaaagaacaccccacaaatattcatatttttctatgcttttcgattaaccctcaagaagaccatatattcagatataagagatcgctatcacaagattattcaaccatgtaagagacctgtttcatgaaaaaactgaaagccaaggcgagctcacaactgtttgtgaaaggaactaagcttctattaatttgagaattgaggacaaatgaaaacatttgagtgagagaccacaccataacctaatgctctataatctaattgtaacctacacaactggaggctgctgaatggtcagtgaaatgtgaagtccatagtctaggaaatcaacatatcacgacaaatagagaaatacgccattgacaagacctaaactaaaaccatacaacaaatcaatgaatctgaaaaggaaaaggaatgagatataccacaagataaccacgaaatgatacattcctaatcgactacacatagaatcataatccaaaccttgaactgtagatttgtcactagataatggatgaggcaaaaggaaagtacagaattttactgataagattcctattaacacagagaataggaagcaaacctacatgaaattctaacctatcacacatttcaaccatgcaagaggcgaataaaccgaaaccaaccgagttgagtaagaccatgacccaacgctctctaatataattgtatcctacagacctaaaggctgctgaaatagtcagtcaaaactgaagtccatggtctaagaaaaaataatctcaaaacgtatagacagattcgacatttaacagtaaactaacaaccatacagcaa

SEQ ID NO: 54107 - DNA, 1840 bp, Arabidopsis thaliana landsberg
attggagaattggtatacgtactcatgctaaaaccggagtagcgaaagagattagtggtgacaagaccagggtgcaccgaatttatagtgatgttcacaccttcttcctacatcccaaaatcatattcatcattttatggcatcaaactttgatttaattaaagtatatcaatgtgtaaataatatattacctgtagtctacgagagagtgcattggagtgcaacaagtttgagagtttggactgtccataagcccttctctccgaatatctagataatgcataggatagagaattagtgtttacatcagttaaaaatatttagtctcgtttcattagcataaaattgaataacaaacttacccagcagggtcattgatgccttggaacttgataccttcagagtaagtataagtatgagcaatagatgacagattcacaatccttccttggactccactttctcttgcggtacttttcattttgtccagaagcagattcgtcaacagaaaatgacctggacaatcattataatataaatatatatatataaagattcactcacgtaatgttatataaaaatggtttattgactagtatatttctttataattcatgtcataacatgatgttttggtaacgaatattgcgtatttcgatactgacaagaaaacactatcaataaaatcttaccaatgtggtttgttgcgaattgtgattcaatcccatcttcggtgagcttgaaaggacaaaacataacacctgcattgtttctaataacatttcaaagacacaacaagttaacatataattaactcttaatcgctgcaaaagaaaaaagaaaattcaacaagtaatattcaaacgtacatgagaatgttgagaggaacattaagggcaagaaactgatcaacgaaggatctgactgatttgatggaagagacatcgatctggagatagtcgacgcgagcattagggttcatctgaagaatcatctctttagactcattagcagcttttgggtttcttgcggcaatgatgacatgagctcctctcattgctaacactctagctgcctccaatccaatcccacttgttccacctttttgtttgttcaaacaataattgttcataaaattgcatattggtcaaaaattatagtaccaactaaatactacaaaacatattagctttcaattttaatgaaaataactttggcaacaacattcatatgcgagtttaattttgatctattaacttagtcttaattagagagaagatacataactaagatattttgtttatggacaaaaaatcggtcatgacaaaacagaaagaaaatctttggtgtttgaaatacaaaaaaaaaaaaaagtcccctttatattatttgcctcacaagtcacaatcgaaactctagcttaatcctaaaagtttgacttttcatccaccattaaaacatttcatcttccattcattgaatttatagtagacttgactaattttatagtgttttccgattctttttttggaagaaagtcttacacgacgagtaaacgtaaaataaaatttgtttggcaatagtaatagattgggtttgcaagaaaatatcagaaggaaaaggaaaaatgaaagaacctgtgatgatggcagtgagatgactggcatcaatggcttgagtaacatcttcagcagtagaagcagatccaaacccactctttccttttttccctgtcatcactccatatattcccatgatctctctctctctctctctcttcctctgcaaatattttagagaaagaaaatgaagaaaccaacaattataaaccctaaaagat

SEQ ID NO: 54108 - DNA, 1284 bp, Arabidopsis thaliana landsberg
ttgcggaatgaactagttcttcatatgtttttcgttttaggtatctttgtagaaatcaacacattaaaaaccaatcattctgatcgcaagtccatcgtatataataagagtaataagacttgtgaatgaattaatgtggttggaccccaacaccacagtgaccacaccttgctctcattcttgtctccgcccatattccaaatgcacgtaatcggagacctttttaaaaatagttattaatctaccgagtgggttgattagtctcgttggaactttggaagcactaggaacaaaaaaatgcatccattgattgtatcagaaacgccaaatgtagcaatattcaccatcgtgagatgaagaaaagacaagttatcaatttatacagaaataaaagagaaagaaaaatgattaaagtgtcaatgttaataagaaactaaaagacccaacatgatgggggctcaaactcaaactatgagtcaaagcaaaaaacaaaaccaaaaacacccacttggcacttgccacttaattaaagaaataaaaatgaacctttcaacatacactcaacaaatttggaccatctatgtgtaacttttagatgtctatttgtctacattcatgcagcgagaagaaatcatggctcttcttttaaagaaataaagaggggaaattgaaaaaaaaaaaaaaaaaaggaagaaaaaaaaagaagaagagaggctttatggggtaaagcttaagatgatgttatacaaatgagattcattttttttaaaaccactattcaaaaatcaatataacttttgtattgacattaagtacaatttaaacggttaagttctaaaactagaacttgtgtggcaaagtcaattatgtaacctattagtatttagtaaagaacaagtccacaaaaataaaaatattaatatcgataaaattacatgtcaaagactcaaaacatccattgaattattttgagaaatatccctatcaatattattatttcttgtaacttaattgcactcacactcatatcaaacactaacaaatatatatgcgcccgcatattatctgtcaacatagatggctgttcttttttgtcctatttgatgtatctttcttctataatacaccaaagcacattttactttttagggcgtaaatgattatggtaaattaaatcagttttaactgattttgtcgttagtttacattgcagatcgattccgccgctagtcgctctcaaggggcagcttagtagcttattatgtattttcagtctaagcgttg

SEQ ID NO: 54109 - DNA, 784 bp, Arabidopsis thaliana landsberg
tcacccattgaccaccttgagaaatctggaaatcgataatgtgcacaaaactttcgttcttcacagcttcagctatagctccattagcagattcataaccaaatttgaaataagggcaggcttcatacaagatatgcatataagtaagaagctcaggacccgttgggtctttgcatctcaatgctttatagatggagctacccgaagaagctaacctagcaacgagaccttcaagcatataagctcctaagcgctgaacaggctcaccagaaacagaaaccatttgctgtaactgagagatcaaccaatcagtcatttccaaatcatagttttcaacagcttttgcgcattcatagagcactccttttaaatctcccctagagatcatctccatagatctgtacatagctgaagaaacaactccatgctgctgtccaaacccgccttgattgttaaagctgttgtctacatcaggctccatcattgcagtctccaaatctttaagcatgagactaagctctgtctcgttggtgtttgtcgcggaagaaccgctcaagggagagttattgttttcttcaggggaatgattgttaaaccttgataagttgttgttgttggcttgagaaatgggactttcattagaggaaaagcttgtggttgaagaagagttgtttttgttgttaagacaaggatgagacttggtgcccgaagaggattcaagtgtgcagtaagaatcaaatgtctgaacagaaaggtccatttgtttgactgaagatggttgagg

SEQ ID NO: 54110 - DNA, 410 bp, Arabidopsis thaliana landsberg
  unsure (1)..(410): unsure at all n locations
atctatcnnnnnnnnnnnnnnnnnnnaagtaggcgcgctggcggccggagagaggggaagttcactggtgcgagctgttgtggctttcaccagggctgtgtctcaggcgatgaacaagctacctaaggcgatttactgcgacgtggtaacgcttctcattacgtggcatccgggcggcaagcggcagactccgacgaagtcatctggaccggcggctaggcaagtgggtacgacggccagcccacgacctcatcagtagtcatgatcttttcaccgccggctgatatctgcactcagagcgcatgaatcgcgaaacaggcgaggatcatggcgcggagttcaccggcgacacattcactgcacctgaagatcttttcgttcactgtaccatcaggatcttctttagtctg

SEQ ID NO: 54111 - DNA, 1075 bp, Arabidopsis thaliana landsberg
  unsure (1)..(1075): unsure at all n locations
acttcttattttttacataaattttaaaatgtgttagattttaattataagaaaactacgggagatatttagattgtctgaataataccaaaatatggtagggtcgatcattttcgaatcatacaagcaatcagaagaaacaattagatacgaaacagaaataatttctatacatgttaactatttgaggaaatctcaaaatcttattttgattcttcctttccttttatagtaagaaccttaatatgagcaatactttattgttataccaaactaaaatgggtacggagagactttgttattgagctattacgtgcgagaagctgaatgattacccttaccgtttctgtataattgtattccaagactctgtgtttttcgatctctacagtggtaagccgattaattaatcatttcaagagataattagttgtagcgtatgtctcatctaatgagtatttgcatgatcggatcatttatataactttgaaattttcatatatctttatttaagtcaaaataataataataatattgttgatatgtaaaatttcaaaagatggacagaaataatgacatatagtatttatgtttactgaatatatttgacaaggctctatgacgattttttttaacatactgtatttcttaaaaatatctatctaccttagatagttgacatgataaaaaaaaatatatatatctaccccaatatatttcacctgtattttaatttatagacattatggggcaattaatggtccagaagctggtcccatgagtgattaaattgaaatctaagcatttgcatgatatatagttacgtgtcacttacatacatgtcttgtattgtttagtttcactgctgagagtgagtttctctatgtactgtaatgaacttggccgatcgtgttttactagtttttctcttgaaagaaaaattcgtattactggtacttggactaaaatttggtctccacaccactctcctctaattcatttacanacaattctataattgagagaggatattattgaacatgatacaaattaaatgatattttatgagtacgta

SEQ ID NO: 54112 - DNA, 456 bp, Arabidopsis thaliana landsberg
gcagtctggcacggacggtattcttatcgtcacgggctgcgttttgggcgcctactgcgtgcgtctgaaacaagtctggtcggtgtctgccacgttctcacgttcgttcgattccaccgaagacaaggtggtgatcggttttgcctatatggccaccgagcgcagcaaaatcttcggcatcgaagggttgatcgatctggaatggccggtcggctgcgaactgaacggcgtgtcgggtacggccattccgatccgcaatatctggtactactacgaactggtcatcgacaaggtgaacagccaggtcgaactgtggatcaacggctacaaggacatcaccgcaccactgcccgccgaaggcacgaacatgaccacctacaacgtgcggtgggggtcggcggtgacgggtggctcggtgcagaccacgcagtacatcgacgacctggtgttcatcga

SEQ ID NO: 54113 - DNA, 847 bp, Arabidopsis thaliana landsberg
aatgactcatataacaagaattttttttaatcaagatttatttattaccaccaaaacccaaagacaaacaagaaaataaaaaccaattacatcgtatctctcattgattttattatccttgtcgggattttatttgaaaggggggataaattaaaaaaggacatcatcaaaggagtacgtaaaagtccgtacgatattagaaaaagaaacacaagatttgctaataatatatgagcttcaacacacgtgtctcccgcagaggctttgttaaattctcactcaccatattcaggcgcccgacgggggagggacggtggcatcgtcggaatcggatttgtccttggaggagctcagcttcttgaacaatggcttaaacacgagctctatcgccaaccatcccaccgccaacactcccacaacaaccgtcgctgtctgtttcttgcctgttggtttctccagttttgggaaattgacttctcctcctgacttctccaccattgctgctgcttcttcttcttccttatttttcttcttcacttacacaccgtttgtcttcagactgattatcttcaactactttaaaagaaactaaaaacagcgatacatttcaaaatatctcgcgtggtcacgttatagaccgtcgatggaataattgacggtcaaattttggtgagaacctttcctaaatttgggcctaatatgggctgaattgggtttcttactagaaaacaaatcttggtgtcgcgaataagacaagtttggatgattccttctaatatctaaatgaatcttaatcgaccaaggaagataagacgcctatatagtggacctctcatcatgacgcaca

SEQ ID NO: 54114 - DNA, 1018 bp, Arabidopsis thaliana landsberg
ataaaatactttgattgcaatattataatgtaaattttgtaataaacaatcgagagctaaaattatttttttatcgtaaaagaatttcataaattagaaaagaaagtaaatactagtacggttcttccaaacccacataacaactattagaaccaacttatcatacttgcaatttgtgttttttcctattgtcttttttgatgttaacttttattattcgttttgttgtcgttaagtgacatcaaaagtcaatccaataagaaatagtcgaactttagtttggatccttttcactgaatcatgatatgcacgcatcttgttggatttcagtaaatgttaaatctttttcttattcattaatacttttcgaaaatttgtatatcacaaaacaatacatttactggtcgtatgatcgtctttatatctaatttcgaacttaaatttacaaagaaaattacctacaaaccttaacaaatttttgcttattcccataaaacttcattgatttaaatgagagaacatatatataattgtatgatttataacgaagaagaagaagagaagtgtgttttcaatatatccggaagcaagatcatgtgggttttgctttccttttgaaagtgattgactcatggacccctctctttcacattttggtgtttggtgaacttcttttcacttccttaattttgagctaatagagcgtgtaaaaggtgatttgaaaaaaaaaaaaacattggattaagttagaattagcaaattttccaacaccatttagacaagacttgaactatttgagttcaattaaactaaaaaaatctttttgaagaactaactttagtaattgatggagatataaacaaattaaaagtgacatgcaatattttgattgatttgttctgtctgtaaattttgcatcaattaatacaaatgatgttagtatttgtaacggttctaacaattatgctcaataaatgtatcattcgtttttaattgatgttagaattgcatcacttgt

SEQ ID NO: 54115 - DNA, 382 bp, Arabidopsis thaliana landsberg
agagggcggcgagggtgattccgacggggttcgggttgctgacttcggtgaagagccgtaccgttacttttccgagcggacgatcgagggagggtcccacgagccggatctgagactgctgccccgccgcggcgcggaaggtaggcgcctggatggcctgtgcgagcgcgccgagggaggcgcattctccgacgagagccaggaggagcagggttagggccgtgcttcggcgattcatatcgtgagcatccggttgaggtggaccgctggaccgccgttgaccgtgcaacggatgtgccccgaaggggactggctggaatgggttgtgcaacctatgaacagcccgcgcgggcaggttcgcgacggtcaaggtacccggaga

SEQ ID NO: 54116 - DNA, 379 bp, Arabidopsis thaliana landsberg
  unsure (1)..(379): unsure at all n locations
aggaaacaaaangggaacaaaaaaagactaaattcaggcgagaagagcgtaaccaagcaaaagggaaagaaattagaaaatggacgaaaaggaaggagcaaaaagggcgaaaatagagacaaacaggagagggggagaagtaaaaacaaaaacttaagagaaaagggggagagaaaaaaaaaaaaagagaagagggggggcatgaaaaatctcgaaaatgaaggggaaatacaagcaccgaagataaaaaggacaacgtggcgaagacaaaggaggacccgaaaattgagcaaaccaagaaggggtaaaacaatagaacaagcatgaagaacggaaaaatcaaagaaagaggaaggggaagagaacaaaggggggggga

SEQ ID NO: 54117 - DNA, 1312 bp, Arabidopsis thaliana landsberg
  unsure (1)..(1312): unsure at all n locations
agactagtatttgttttttgtgttatgactccaaacttatgttctttgattcatgaagggaaaaattgtaatactatttcttctttttacacgattcatctctcagattctagcctcatgattgatttcatgactagtttgacattgcgttaacataaccaacaactcaaaatttaatagctactacattttgttcttgaatcnnnnnnnnnnnnnnnnnnnnnnnnnngtaccccactttctctcattatcttcctaatttgaccaacttctctccatctctcatggtaagcatagagattcgacatcactatgtataaatactcatctttatcagcatcccctaattcaatcatcttagcggcaacggttttcgcagttttcagatccttgcgagcactgcaagcaccaagtaacgccctccaagccacaccatcatacccaaaaccgaattcttgaataacctgttttgcctgccaaacctctcctctctgccccatacctctgataagagaacagcaatgctctacgcttggtttgattctatactcgttgatcatcatctcaaagtatccaagcatgacttccattggaacttcacaatgagaacacacagctaagagattcaagaacgtgaatcgatcaggtttcaggaacctttcttgtttcagttggttaaagagcttgatcgcctcgattgaatcgccattacgggcatatccagagatcatctcgttccacacaatcagattctttctaggcattgtccaaaacatcagctcagcgtgcttcaacattccgcatttggaatacatatctatcagagcactcgcgacaacaactcgagagtctaggccaagcttatgagcacaagcatggatgagactcccccatggaaccacagcgagagcagcaacggcggccagaactattgacagactgtactcatcgaatctgacacctgacgaatgcattttggtgaaaaactcagtagcttcccctgatttctcactgttgacataaccggtcaatattgtgttccatgaagatgaattaggattcggcatatccgatagaacctgaaaggcattattgaaatccccggacttgacgaaagcatcgatgagctcgttgtatgttacagtgtctggatttggcatttggtggaaaaaccaaagtcccagctcgagcttaccgttccttgagcaggaagcaacaattgcattccaagaaactgtgtccttttcttcatgtgttggataccaaacagcatcatcataaaccacatttccgtcatgtaatagacaatacc

SEQ ID NO: 54118 - DNA, 488 bp, Arabidopsis thaliana landsberg
caatacggtaccggcaggccgctgtcattcagtttatacaggaaggacgcgataagtacaatcaatgtatggatggtaatcctgaaaagcagtccttttgaaaccgggtaattctcttcattaaatgcggccccgtaaatgatcaggataccggtaatggggatcaggagggtaacatacttaaaccccggattaatgaaacgtcctgcttccccgaagatcatatcccacgcgttcaggctgacgaaaaattgtaaccagggcataaagaatgctgcgatcaggatggctgcgagaataataatcacgcttttgttacttgtttgcataacaacaggtttgattgaagacagtttgtcgaaaatattgtgattgcctgcgccttcgcgctaccataatggtttcaaccaaaccgggggatgtatggtttgtatacctaatggtatgtgataacaaaatatacaatcaaatttgattatgcaagcccg

SEQ ID NO: 54119 - DNA, 1054 bp, Arabidopsis thaliana landsberg
cactaaaccctagaaaaatcgcaatcccaatcgtaattttataagatctgaaaccatgggacaagattgagacttgagagcaaaggaaccaaaaccaaaccgaggaatcaaaacacatacccaagagagatcgagaaaaagaaagcactatcatgcgccactttcggagaatccagaaggcgaaacggacaagtaaaacacacaaaaagcagtcaaaaaagcataacaacacatgtaacaaagaagagacgaacacaatcatcaataacaaacaaaacggaacgaaaattcgaagctaatgcaacgaaaatcacaacgaagaaagcaaaatcgcagaagaaaagaggatcgatgttcccgccacaacaaagaaaacgattggagagaattataaacaacgaaattagagagactcaatcaaaaatcttacggagaatgtatgaaattgggaatgcgcgtcgtcgagagagagaggtggtctctcaaggaaagaatacaagtgttgagatctcaccgtctctcttcgtttttctcttcgctctctctctctctctctcgctctcagctctttttggtcgtcgtccttccttatgggaaagacgggaaaaaaaacttaatatgcgaattagcctctcaccttttttttgttattttatatcttaagtagcactcggtttcctttttttgtttatacaggtgttgctgttttagagccctatactgtagtttttcctttttctatagtagcccaataactgggccttgtcttgttatatgggccttgaatctttagctttaaatggggttggatttgaaaccagtattttattcattgcttacgatttaaaatggtaaagccttaactctccaccattattatttgattaaattccaaatgatgtttgaccaaaaaaagaaaacttcaaataacccactctagaaaccaagtcattaaataatgtttcctgtgtaaaattcatggaccaatcgaaatgcagaagaaaatctttacagtaattagaatggccaaccaaagtttgttgtttttgttttt

SEQ ID NO: 54120 - DNA, 709 bp, Arabidopsis thaliana landsberg
catatgaatttgtattgtttatagaatatatgaagataaataacaagattttacaagtcaaactcaaactacattcttctttcttagattattgaacatcttgttctccatatccgttgtcttctttggatcctacacctttttgtacatattctaactagatcattacactgtaagtcaaattgttcctgttttgcacttaaaatacatgtttagtacgaagtcttactagatcattaccttcaaattcgtttctagctatatttttaatatgcaactaattgtagaatcacttttggaaatagagttcttcaacaatatattaatatagatgcttaatgctaataatgtggagcagtcaacaatgtataaggtcctaactcctaatttaactcctaatccaaatcaaagcaagtttcataagttaccacatattaagtgggtctgagcccggcccacaattattacataaagcccagaaagagctcgacggacttgagacggtaaattaattttgttaattgccagcagcaacgacggacttcaaacggaaatttttatagcttctctcgttcagttctgcttccgacaatcaaacaccactttctttggatgatttggaatctctctgttcagcttctctgctactgccgcaactggagatgcataagtcgagttctagtttctgttcaggatctggagtctaatt

SEQ ID NO: 54121 - DNA, 1213 bp, Arabidopsis thaliana landsberg
  unsure (1)..(1213): unsure at all n locations
tcccctcctccgaaaaacattctgccacagaacctaatattccacaaaactcaccgtctcccacactgccacagcatcatcggttcaaagctcctctccatctcctattattttcactttctgagtcagattgcttatggattcagtttcatcatccncacttcagttcttagtacgccttttcactctcaattcttcaacgcctttttgtatttcagatcatctccatatatggttcacgttgttttgctcatatagaggtatcactccaaatcattggtttggtgtagttattatatatggagaagcatcaagaaacacaagaagaatcgggaagagatattacggtgtatgtttggaagccagtccaaatatttcacaacacagtattttacattacatataacaaacatatgcatattacaggtttggattcactatcttataatgtcaaataaaatgttcattgtctgtatattttgttaatgattcgaaaatattatttagatttcataccacacattgattttactactcttctgtgtatgtttacagaaaatattgtccacaaataaaggaaaaaggtgttcaataacctcatggacatgaagaaacctacaaaagagtgtcccaagatggagttgagattttcaaccagaaaaataaaacaaattgcagggaagaagaatggataaaaatatatagtcatctttgtaacatctctaatagaaagatcattgtttttctttactggtccacctcctctaaggatcaacaccacattcctaggtccattggaaataaaacagaaacttgtaaatctttttctcaacaagggtcgctaaatttatgaaatttgaacttcacctcaacacaaatgggaattctactaattaaggctatagtggacataaataaattctacaatttcaggtgtgagaagaaacgaagagtccacaaacatactatccaagctataacatggcctaagagataccaagaactctaacaccagtgataatagccgaatagtaactattagcattcagtgaggctgtcatgggaaaccaattattcagatcatatgattcctcatgtaagtatctcttccctttatgtttataaagtttccatttctatagtaaatttttcatttcagaacacatcacttgagaaaaaagaatctctcagaagaccaagtcttacgaactat

SEQ ID NO: 54122 - DNA, 605 bp, Arabidopsis thaliana landsberg
gagggttaatacactctcttctacaggtcaacacgataaacaaaatgaggttacctgaaagagaacaagcagcacgacaaggataataccaacagccattgcactactgtagtaaaacgctaaagattggctcagtgtagaagccgaagccagtaatacagcaccaaggagtaagaatactatgcgatgcataaataattctgcaaagagaaaatagatagcttagaaaagagaaaagaaaatgcaataaaaggaaacagaaaaggcaccttctacagcagacacttccaatgagaccttgttagagctaggtactctaacatcaaggattttatggtcgaagggtgacattgtctgaacccatgaacctttagaggctttctcccatcgactatgagggcacattccaattccacgcgacaaattccttcaaacatacaacatttagtgatatctattatgtaccaacgaacttacaggaatatcaagaatttaagtccaacagcaaaagataaacgaaggactcaccggtgaaagcaaacgtcaatgttatttgttttcccagagattgacgcgttaactatcaacttgagcgaatgtgcata

SEQ ID NO: 54123 - DNA, 1564 bp, Arabidopsis thaliana landsberg
  unsure (1)..(1564): unsure at all n locations
ccatcatggttcaatggattgtaaaggtgaattttaactttctgttcaaatgcatttagttacatatacattgatctctgaatgttaaagctcagaaatatgtatcagtagcagaagattatgaagtaaatgaatatttggagatcctgttcctggttttaagaatgttttagcctaaggaaatctatagcttactttggaatcttttaaggtttatgtatcagtcagctatgatattctttgttgctgattgtctgctccctgattacaagcagcaatgttctgacatggggcttcagcaagagacattgtttctaggagttggtctgttggatcgattcctgagcaaaggatcattcaaaagcgaaaggactctaatactagtcgggattgcgagtcttactctggccaccagaattgaagaaaatcaaccttacaacaggtaccaaccatattccatcttcatgattctgacttccaatgttcattagaaaagtgttctgagtaggaaaaagattaggaccattacaagaaactgagtattacgcttaaccaaatcaaggactaataatggtctaatacaaacccttatggttcaatgaattggcatttcatgtgggtatcgaatattggattatgtttctcaaaaacactctttactggaaagaaccttccacaatacacaggaatagttcaattttcttcaactgctcacctgatacttgctctttttaactagcatccggaaaaggaacttcaccattcagaacctaagatatagccggcatgaagtggtggcaatggagtggctggttcaagaagtcctcaacttcaaatgcttcacacccacaatcttcaacttcttgtggtaaaacctctctgactatatattttcatgttccaagacacattatccacacagaaagatacatatgactatcatttatacatgtcaggttctacttaaaagctgctcgagccaatccagaagttgaaaggaaagccaaatccttggctgttacctcactatccgaccaaactcaactctgtttttggccctcaactgtagcagctgcactcgtggttctcgcctgcatcgaacacaacaaaatctctgcataccaacgagtcataaaggtatcatcagtcccttcaataacactttaataccttttagtatcgagaatatacaagaatcttcacaatcccaaaacctctctttctctccaggtccatgttagaacaacagataacgagttgcctgaatgcgttaaggtgttttcagtaacactctcattatatacaaatctcatttttaccactaaacgtaaggtaagtgactgttttcacatttttgttccctatacaacagagtctggactggttgcttgggcagtaagcaatcaaaaagaacaaaaaccctaaaaccaggacacagtatactccgataccaacacacaggttatcattactatttacaaaaacaaacacaaggtaagtaataagaactnctctacagatttatatacttaatcgagctggactttaatagctcttagtatac

SEQ ID NO: 54124 - DNA, 546 bp, Arabidopsis thaliana landsberg
ttaatgggctgtgtactgccaactcagttcccctgccccgagtgcctaagggaaggcactgttagtcaagactttgggaccttagaggatacttgagccattaagagatgcccagaggtctgtgcaaacatctaatgggtagaagtatctggacatagatttctactctgaacaacaagaatgttctagctggctggagatgtccagtcataaggccagagcctccagagttccctgtcctggagaacctgagctgaagagactgcatgtgtaccagctacagatatagcccagggaaggcacactggaggctgggtgtcggaagcatcaccactgtggctaggctcaggtttctctcctgcatgctggatggctgggtccttcgctgttcctcagtgtttataactgtcacctccactttcaaagacacaactctctgacacactcacaggcagacaagggaagtggtgaggccatttgaaatctgggacctaccgcttctgcccttaacacagtatgtgcacccttctcagaaccacgcatgcc

SEQ ID NO: 54125 - DNA, 362 bp, Arabidopsis thaliana landsberg
tggctaaataccgtcggcaaggagggcaacgggaataataaaaaagtccccatcggcactacctggctgacggaagtagttaattaaaccccgtaacccctacctggccgacgggaattaacacttaattctcgtaacttcgaccatagccaacgggaattgtctgggcccacgcgactatccctctactgctgttccccccgcactaaattcggtcactctttctgcatacctgtcgtatgtcacacaccacagtcacattcatagtcgactcatgcgttaccaacgtgacatcctccaacattgttttctccaccgtttcgcatcgctgttcaacatacgttcctgtgtttttcccatgg

SEQ ID NO: 54126 - DNA, 607 bp, Arabidopsis thaliana landsberg
  unsure (1)..(607): unsure at all n locations
tctccagcatcttactggtcgttgtttttaatgactgttcttgggaggagcagcgtatatacttctccagcgacgcgttaggcatgaactcgtataccagagcacgccttgacctctcggagcagaaccctagaagccggacgacgttggcgtggtggatggttccaatggttgcgacttcgctgatgaactcctcttcccccgttgagtcctccagcattttgactgccacaggcacaggcactcctccgttcggcagctcgcctttgtacacgctcccaaacccgccttgcccaagtctgctgctgaaccgtcttgtcatcttcctgacttcagagaatgtgtaccttctcggtttcagcgtcctgtaggtctcgaggaacatctccactttcctgtgtatctcgtcgtcgtatttagatttcagggccaggtgtaatgcagcannnnnnnnnnnnnnnnnnaccaggactgtggctactggcgtcgttactgagtagacagggttggagaaaatcagtctgttattagattgcaatcgattattcagatcttttgtggatgagagacgactatgagagcgtgctgcggtgttgttgttacaaat

SEQ ID NO: 54127 - DNA, 574 bp, Arabidopsis thaliana landsberg
gtccataagttagctgtggaatgatttatcttatttgttatttaaagaaaagtgtatatgtttattcgcttgttgttgttaatctaacgaaaacgaggaagtctgtttttggacttattctatcagataaggttaaatctatgaaatttcatcaagtcggtccacatttccggaagtatgtttgtgacaaatcaaattataatatttctagtttagtgaaaaaagtaaacatgtcagtttttttgtttacattttccccagacaaatgtccaaccaatgttagacgataagagaattaccagctaaataaaataaatgctcgaacttaagaaaacacatgtaaaaaacatccacaacatagaaaagtcaagaccgaataaagaaattatgatatcgatctgaaatccaaagatgcgatcgatttaatccaaatcatttgaataaacttaggagttttgtcctatattgataccctgtttccatatatgtcgtttgaggttatacacttgttcttgaacgaaattgagttctaaacgagagagtataagtcaaaagtacttaatatatatatatg

SEQ ID NO: 54128 - DNA, 962 bp, Arabidopsis thaliana landsberg
atatctgacctgattctcttgaatattaaagatctgtatagcactcgattggaatactttcatccttttcgcaattttcaatgaaaattacatgatttgatctgcttttatttataatggtagctaatgttcgtttcacaagctttaatggtatcaggactttacctcttttcagggtgtgtataagtctcccaatgacacagttgtgtttcatcacaatgattttctctcctaatcttcatccgaataatccctagcaccatctcaagcactattagggatctaatgttatttcgttccagaatgaagacaaaaaagtatgaggtttaaaattcattcgtctctacgcttccccaatatttagaggcagtttaccatttgcttttcaagatcgataatctctggaagggatgattgactcgggtggtgatggggcaagatatggtctctaacacgaggaatgtgtacgtatatgggtatcattgtaaatcggggaagagtaatagtccagctaatctataacttcgtgaacaaatccttgcggtgcacaatagggactttctagtaatgcgaccttcactatgagactctcacttgaaggagcaagaatcatcttcatgaaaaatattatgccatttagaacatcataagtagagtttctaatacgttaaagagatccacacagtctcactagttaagatttgtgtattcttcctaaaccttaagggataatgcatctactcaaattgtaatttagattcttgaaaccggagcattaactgctcgaattactcgaaagtagtttgtgacaagagtttccaaagttgcaaaagatctcttccatctagagttgggaggggatgacttctatgtgaatccaagatatcatggtattaagaaacacatctacaacatgcatctctccaaatcaaagaaccaatgcgtgaagtagtatggctttt

SEQ ID NO: 54129 - DNA, 913 bp, Arabidopsis thaliana landsberg
ggaacccacttttattttgccaaactatacacgtttctttttttcacaagaaagcatcaatcacaatacggtggggaatagagaaaataaagtgtgcgtctttccattggtccttggaaaacagagctcgtttcatgcgtgagggcaaatgaaaaacgaacgagaaagttgtgtgtttctgtggataaaccatttttcgtagaaagaaatcattcaatcaacaaagcagtgattcatacaatttgtcttgtttagggtttttcatctttgattcaatgtcgacacagagcaacctctgttgactcgtttgcttctttctttcttagatacagaattggaatttggttcatcttctttgtgaaaaatcagattttgattactgggttttagacaagtctgcgtttttttttattgaagagacgaaagatttaagttttggggttttggttaaggaggaggatggttccatggttgatggtatcagctatacaagtagcagagctatctgtgagctctgttgttcatatgttttatgggctttacatattcagctccgccgtcgccggagatcttactcagtcgttgagcgagtcaatcttcaaacccaaatccaccattgaagtcaaacaaattgaccaagaaaagacaacagacgtcaatgatttgcctcctattgttttggttcatgggattttcggatttggcaaaggagtaaagttcacaactttctctgcttttctacatttatgtgtttttatcgtttcgttgattggatttgccattgcagagattaggttggtttatcatacttcgctggagcagagaagaaggatgagagagtgttagtgcctgatctgggatcattgactagtgtacacgataggtgaaagagaaagttccaatctttttttgt

SEQ ID NO: 54130 - DNA, 1285 bp, Arabidopsis thaliana landsberg
cccaacaaatagtcaaaagagtaaaataataagcggaagaagttaggcggggcttaggcagaattcgaaactctctccaacttctttcgcccaccgctcttttaacataattccaatatttctcttttatattaatctttttaatacatcaaaaagacacttttacccttcctcttcttcccgctgtttcctctcttctctctccatctttttctccatcttccctcttctccttcttcatcttcccccacaaaaacctaaatcacgattctccaaaatcgcttcaaaaaatcactctaaatcccatcttctctaccaccggagatacaccgccgttacatggccgcgacatcaaactcaggcgaagatccgactctctcttaccatcaccgatctccttttcgcttcgaattacttcaatctatctcttcctctgatcctcgttactcttctctaactccttcttcaacgaatcgacctttctcagtctctcaatcgcttccgaattcacaactgtctcctctaatttcacctcactgggacgattcttactctcaaatcactcagaaagttgtgagtctcttcgtttactcaagtcctcgtagattccttctttgattttgattccatttccgaacttgattttgcgatagctaggtttaattctgattcccaaatttcgcgaaaacaaaaattgaatgaagtttggtttcattaagggaaacttaatccaaaattggatctctagctttcaattctctaatctcaatttgcgaatttagattcgttttggtgattgtaatgctattaagttgatcttttcttaatttgcagcagaagagtagaaagaatcatcgaattcagcttggatctattgccaacatgtctggaggagaaagcatagatatagctaaagtaatagtgaaacaagagtcgtctcctcaaaatgttaaacgtgtatacaacaagtcaaagggtggtactaaactgttaaaggctgggaaacgaatggcgaatggcggtatctgctttttctgatcaatctctttggctagctcttagaatgtgatatgtattgaaaataagaatctgtttgtattcagcattgttgtgaatgagtttttttgtgcagaagtgcaaaatggtggcttaaatggagctagtattaactgccgttatgacagttctttaggtaactaatagttctgtttactaaggttcatgtttgtatggagataacaactgtaattgtatcggtgtctcttttgtttgatagggttgtcaa

SEQ ID NO: 54131 - DNA, 482 bp, Arabidopsis thaliana landsberg
ttccaaagcgccgctactttcccgtggcaagacgtatcgcggtcgcgaccgcctcttctggcgttgctgccggctctatcttgaaacgctttcttccatcgagatacgctcctgcgagcttatctgcccatccgcctgtaccggtaagtgcgaccaccggaatattcatttgatatgcgattgcgatctcggtaagcgtcccggacccgccggaaatcgcgatgatgacatcgcacgaatttacgagtacgagctcgcgaccgcctccgcgctcattgccggagacaatgattatgtctgtattaccctctgtgtcccagatatccttacctctttggtatgtcaccccgactgtcgtaccaccagcctgcttggcgccacgcgaagcggcagtcgagagtgaatcgagatctttttctgcaccatacacggtaatattgccgctctttgcaatagcctcgccgattgcgaacgcaagtttt

SEQ ID NO: 54132 - DNA, 1509 bp, Arabidopsis thaliana landsberg
ctttttgtttcgggcatggcaaattggaccttcacatctaaattatagttcactttattccattcgatacgcaccaagcaactatgatttggtatgaaatggcactttcagttattttcatacgatacttttttacacaccagttattgaagaataaaacatgtcattttcattttctatcgtatttatattgatattagcattgtgagagatttgaattcaacatatagtaaattctgtaagaatgtatggaccactattctacttatttttcacagtgtaatatttatttagcttcaacgaatttgacaaaatatattatcaacttgctcggtttatttattcatatcttatcacaaagtacttttgtcattcaatatccctacatgtcccagttccgtctggatatatgtattttagcagccatcaatgtatttttgtaaactaaaaactaaaaaggagtctaattttttttttcctaaaccatttctccatcgatcttataatattcgttattttggtcagtctcccaaattatttagtcttattatttatttattaaaaaaatattacactatttgataatggaaggccaaactaataaagttgtaagatattatatagttaggtctacatttttaaaaaattcatcgatcaatccattccgcagttctcaaagactcaaatgtaatacagttgtctatagccaacattcttaatattctagaggataaataatgcatccccaactatatatgtgctgggtttgagatatataaagcataaaaatggaatatcagaacccaaacataaagtgacaaatgacaagtggaaggctaagaacttggtgctcttttttatttgtttcaaacaaatttagcgtttcgaatggtaacaacatgcatgatcaacatctctgtttctttttcttttctggtgaataaatgataaaacatggtggatgcggttgagaagaaacgcaattttgaagtcagtgtattgttcacaaccttgcttgtttgctgattctcacgtggtcttttagatctgcgtttgtctaacgcgctctttctcggaaagccacgtgcattttgattcccatgccaaaaccactttctgatcatcattgatggcgcttttgtattcgatattttaatccatttggtaagtttaaaagataaacattcgatgtatgtagaaagagaagaaataaaaatatcaaatggatgaaaaatattgaacaccaaacgcctttttttattctaggccacctgcttggctgcttcttgtgtaagtgcacgtatttttttcatggttctattgttattgaaatacaataaaagtcatcgagtctctcatcctcttaattttgtttgtctaaatttctacgatgatatgtggtcacaaaaaatttcatactccgttacgagaatttctttaactagcggaaaatgtttaactgtacaagattgacgaaaaaaagtttatctccatatgaaattcctcacg

SEQ ID NO: 54133 - DNA, 242 bp, Arabidopsis thaliana landsberg
gacctctatccgtagagtacatggaatgtccagaaatggctataacagagtttgtgttattcattttaattgctactctaggaggaatgtttttatgccgcgctaacgattaaatcactatctttgtagctcaagaatggtagaggacttgcccgtgcgcgtgattttgctcgaggatgcaagaaccgcgttaccactatgatactgtaaactgtcttctaacgtgtttagcaatggataag

SEQ ID NO: 54134 - DNA, 903 bp, Arabidopsis thaliana landsberg
gacttttaaatacagaagatttaagccaaatgaccggtatagttattgttattgtgaacatcatcagcattattgagaggaaggagaaagtatctataaagtcaatagtcaacgttctacaaaaacaagtcccaaccaaaattacaggcccatattagaacattttccaagtctctctgttttcaatcgcttagggatttaaacaattgaagttatggaagctatatcatatttaggtactaaaagttgtttgttcttcaagagcctctttaattgcaaattttctcatgatcttaaaatcaccatcaagccttttatgcattgaaccccttagacattctttgagctatggttgaatctaaatgctcaaactggatcaaaaaatgtcaaaaaagattaataggaaagaacaattcagatgacccaaaaaccgtgctcttacttcctccgtgaactatcgatagcgaaaaacctaagagtttaaaagtagtaacctagaagcaacattctccattacttgtcaagaaatttgcaaatgaaacttcaatgcataataaacaatttcatactaaggaaatgtcattacgtcacattacttctctaaaacctaaatcaatctattagtctagccagagatgaagaaactacttaactgatgaagtcataagaaagatctctaatccgtagaagtagccagatttcactatgtcctacacaaattccacaaagcagagtcatacgcattgcaatgtgaagtcgatatagtccactctgcacaaggagcaggcttatcacacacgtaacagtaacactgcattgcaagacaaacacaaagttaatccatttaattcttcaaatccacaaagaagaagaatagaagtgtttaaattaccaaatcacagt

SEQ ID NO: 54135 - DNA, 756 bp, Arabidopsis thaliana landsberg
ccgaaaagcccaaagtgaaatgatctttttttttgttggagtagtttattcattatcacatccacatggcaattcggacatgctgttccctgacgatgtgtccattaattgttaaccataatcaacaaaagcatttatctacaatgacacatttttcgacctcatatgtttcacataacatagcaatgtaacttcatattggttagttctttttttctcatacaagtttcctaaaaacagcattccttaagtgatttatgtatttgtaatcgtgtaatcgacaaaaagattaccaaacggatgctgatcaagggcctatggcctaaagaaagagattatatataagttcaagggaaatgcattaactaaaactgaaaaactttaaaatcatacattttgcattggttatcggtccaaatcataatcaacttatttgataatcaaaatcataagttcatattccaaatccgaaaactgcacggatcctatggaatataagatctctccatcctctctcagtgttttccaccacagtcgcattcccgtatctgcatcaaccattggataaacatcagataacagtagttacatcaatgtcctcacatttagcaacattgaatcactcactcatcttaagacacaggccatataccaaagaaaaaaaaatcatcagttatcaagtgttcacaaggaacaaagaaaagttatattgtcagcataagctaagagtgagttagtagcaaagattgacataga

SEQ ID NO: 54136 - DNA, 975 bp, Arabidopsis thaliana landsberg
tagtagtattaatttattttccggtgagtattataaggttgtgagactgtcaatttgtcatgctcctttaaaagtaaaaaaaattttacaaagtaatattttgtatacgacaaatcgtcattctcatactactatatatacaacacacacatcgaggcttgagcaaaatagtctacgcgtttccttttcccttgtaatatttgctttttaaaaagattttgctttatcaggtaaacctctttggatgttttcgttctatcaatagcacccaatgcctaattttaatatacctttctagtttcttttatttgttcatcattaaggttcgatttctctctacttacaatcaacaacatcaaaaaagacttgacaaaacgctttagatcactcttcttcttattttgtttcattggttttgtttctgtgtgcaaacgcgcagaaaaaaaggagaagaaatgaaaaagcacgttatgttggtgaagcctttctcgttggaagatgagaaagactctgaaaacacacctcccaatctcatccaacggatcttaagcctcttcaaaaacgtacggccaggatccgatctcactaattttcaggtacatatttatctgttttgcaccttcagcctttcaggtgataaaaatgtaaaagtatctaaaatctttgaagatgtactatatttagtttctttcttgggatctgaaattgcaccattctatttctacatactttggttacaaaaagaaaactctattttttgccccaagttttacatataatagaaacttactttcttttatgtggaatcacacagtttcatttacacataaaaccatacataatagttaaacttgaatacgacgtgtttcattttgaataataacatgagtgtgtgaataattatacttacctatttttcttaaaaataagaaaaaacgttcatttaccatgaaagcttccacctaaaatgaacct

SEQ ID NO: 54137 - DNA, 747 bp, Arabidopsis thaliana landsberg
attcgcaattaatgaacctctctcaatttattcctttttgcattacttcatgtgcgagtgtttattacatgtggtttgcttcttttggagttttttcttcttaaagaatctcactttttaacttattctgatcctaattgcaacgaaactcttctttttatttttaatgatttttttgtgtgtggctgaaataccgttttaaggttaccagtgaattattaacaaaatcaaatcaagaatcataaattgaatgatgagtatgcctctgcttttgcaaaactctgtttctctactatatatgttcacacaaatacacatgcacgtcactctgtgtgtggtatgtacacatatcattaactttttggtatcttctttaaaatctgcaaatctctgtttttcttgctcctcttccggatagaaaaaaactcaaaaatcaaagattatgtcatcttggtgttcacatctcttgatgattctaacttgttgatcttttgtaataattttgcagaaaattgtgttaaagctggatttgcatgacgatagggcaaaacaaaaggcccttaaaacggtttctactgtcccaggtaatcatttttccatgctcctgttatatacaaagttggtcatcagaaacaagtcgcagatctcttgcttagatctcacttctaaccctcacctctatataaatgggttccggtccgatttaatctccgatttggtaggtaggtgccaacagagggaaaaaaa

SEQ ID NO: 54138 - DNA, 568 bp, Arabidopsis thaliana landsberg
ttacacatgaactgaagcaaaacatccaagaacatgaacacatgctgaaaactttggcagctacttgattaactgaagatgaagcttattttcatacaaggcagatagcatttctatatcatcttgtggtcaagactatgctgaaaaccttccattgcttgaacatgatattgatagagtatttcaactccagatcaagtcatacggatcagttaaatgagctgatgcttgaaagttctaccttccatcactatgtaatactttccaggaatggacttgcagtgcagcttccaccactgtcaattcatgtaaagcccaaaattggtaaataaataaataaatatatttaagattgtgttgtaggtattttttttaacaaagacctcacataagtatgcatacatgactttagttaatcattcttttaaatatacatatattatatatttatggatttatatgtacccccttaaaaaagggattaagttaaaacatatcttgtagaaacaatacaacagaaatattattttcccaaaataagctacttatgcgtgaattgcatagctag

SEQ ID NO: 54139 - DNA, 600 bp, Arabidopsis thaliana landsberg
taaaattagaaagaaagaaagaaataatgcaaaagataaagaaagcgttacaaagtgtggttgaggacagattatattagattccgatttccaataaacaagaaattatatagcaaaaataaaagataaaaataaaataaaaacacttctcaaatcggcaaatccaaaagagagagataaaagagagaaagataatctctttaatgtccacattatctctctcttcttcttcacctttttgagaaacctcctctccccaaaaacgacgtagtttcacatttctcgacttcttgaatggagtttgaagacaacaacaacaacaacgacgaagagcaagaagaggatatgaatcttcacgaggaagaagaagacgacgacgccgtttacgactctcctcctctctctcgtgttctccccaaagcctcgacagaaagtcatgaaaccaccggaactacttccacaggcggtggcggaggattcatggttgttcacggcggtggagggagcaggtttaggttccgtgagtgtctcaagaaccaagcggtgaacataggaggacacgcggtcgatgggtgtggtgagtttatgccagctggaatc

SEQ ID NO: 54140 - DNA, 546 bp, Arabidopsis thaliana landsberg
tctcctctctctttttgttttttaatcctacactaagctttttgtattgttgtattgttcaaaaataacaaaagcttatggaaaacttgtaaaacccataagctacctagtgtgttttaagatgagccctagaactactcctgaagaagaaaaaacatgtttaattatatcattttaattcaagattacataaataagtttttagtgtgtcatttttagaagaaaattagtaatatttcgttcaattttcacatgtaggtaacaatctttacaactttaagtaataacccaggaaaaaataaacagtaaatggaatcaagtaaacacgaactcaaatcaatttctttttaacgtgtctttttatatcataaacatggttaaaatctgtgatctaatacaagaatagttgactaaaacaaatcatgcatggtcagagcgatacgaccaaattgaataaaataataggaatatataattaataagaaagtataatagctcttcaagtaaaattagaaagaaagaaagaaataatgccaaagataaaga

SEQ ID NO: 54141 - DNA, 612 bp, Arabidopsis thaliana landsberg
gattccctacgccggcgttaaaggcgatgttgccaaagttcctattctcgataccgactacggtgtccttttcctcttcgtcagtaacaagaaaaccggcaaggttggagccatcgagaagggtcacaagattgactggactgtcgagcagcctattctcgttactcgcctcggaagtcacacccccgaactctgtgagtgattcccttgaaccagacgacatcgttgtattaaagatcacgtattattattcgatactaacatatttctcttttgtagctttccgactctttgaggccaagtctggcaaggaggttggctacttgaacactcaatacggccctgtcgctgcctcgttcggtcgcagcaagaacatcgataccaacactaacaagcccgccatcagaaccttcaactggctccagggtactgtctatgctagcatcaatgccaccgtcccaacagctgtacctgccggtgaatacaaggtcattgttgctgctcagcgcaagctcagcagaggcaaattccctgctgactctgagggttacgaagtcgctgatgttgcattttaaaatagaataactcacaaaaacgaacgctcttcacgta

SEQ ID NO: 54142 - DNA, 1043 bp, Arabidopsis thaliana landsberg
aattgtattagcccaaatattggtcaagtctatgatatagatgtgattattatttattcaatttagataaacaagtagtaatataaatggtgaagtggttaatgattagttaacacagtgattaacaatggatactaaacattcataaggttgtggaaagattggggccgccacagactggattgggaaccagagaattggatttaaataaaagttttatgagagacatgttggagaaaaatagaaatttgagatttcatttttgtttttgtcattttgtgaacttataaatataaaaaaaatgtaataaaattacaagttggcccatgttgttgcactttaagttaggtaacagatcaattccaactcaccaatcattatataaataaatgaaattaataaataaatggcccatatgctaaaaacatgatcttcgacaaaagatcctctttcattttgtgtagtgtttatgacgtgtaaattgtaactagattaatgtctttgtctatctatgttcttttctatattataacctttttcatagataaaacttttcatcacgaaaactttataatatgataaataatatgaaaagcaaaacaaattatgccattgcttgacaagacaattcagctgctctatagtgcatgttaattctacatatccacaaaagataatattaatggtgggataattaaatatcacctgaaacaaaatttaaaagaaagaacaagatttcaaattctagaaaaaactaagaaatatatggaattacattctacaaaaattaaataaaagcaagacgaaagacaaaaattatatacatgatttctaacaaaataatttatcaaaagaaatctttcgttccgagataatcaaaatcaaccacgtcgaacaaaaacgagtctgttaacagctaacaaaatttttaatatcgaaactatagtacctcctaaataatttaatcctacatttcaattccgccaaaaaaactccataattattgagacaattactaagaaagcaaattttgcaataaccta

SEQ ID NO: 54143 - DNA, 577 bp, Arabidopsis thaliana landsberg
acaaaagactcagagcgacctattattattgttggctttggaggacctggttttggcgaactcaaccaggtctttgaaaagcaaatcctctggtttctcttctttctgcggttcactacttgtcaaagaaaggttccgggtctgtccctcgtaagaggaatctgagccgctactcgagtggtgatgctcaaagaactgttgcctctggttgtgccttgaaggcggaggtggaatattcctaattacctcagaggatttgctttgttgtggacttgcatcatcgaaaacaggagaagaagaggaagaagaagtatgcggaggaggaggaggaggcttctttactccctgtgaggaggagttgccttgaggtttatagacgtccccactaaggatatccaccatacccgaatcactaccatgtactggtctccttgttggtgtcgcagacctttagagattgaatctacaaagttacgatcatgtatatagccttccaaataggaatcatcattattacctgtgagcaagccgagcatactcatcatctgattcgtcatcttcatcatcatgattgatg

SEQ ID NO: 54144 - DNA, 561 bp, Arabidopsis thaliana landsberg
ggcgaaagctaatgcggcttcagttttggctgctactttatccggttggaggttggagagcaattacggcaggtttgatttgggtaggatttagattgtatgggatccgtcgatctccgtcatggtcttcaagaagtctgctcagatgatattttgttcaataaagctccccaacactcacaggtcttttgcagtttcctttatatatggaaggaatacaaattctaaaagaagatttttgtgggaggagatatccttgctgtctacttcttcccccttgcatattacgccttggcttcttgtgggtgattttaatcagattgcctccttaaatgaacacttctctgttattcagtccaacttttctctaagaggtatggaggatctccaatcctgcttgagggataatgatttagaggacatacctagtcgtggagtttttttcacttggtcgaatcaccagctggaaaatccagttttacggaagttagacaaggcgatggggaatgagagttggtttaattcatttcccagtgttgcggctgtctttgatccccctgg

SEQ ID NO: 54145 - DNA, 538 bp, Arabidopsis thaliana landsberg
tgggtggaccactcccgtcagttccgtctcctcaaccacctcgcgacaaaacgcggttggatgtgccgcatcgtgagctcccttcaggcctcataccaccgacccctccagggtataaaccctacgcccggcgtcccttttccttcttcctcccctcacaaccctcgggtcacctcgggaagttgggcgccgccgctaccgctcggagccattgccgctgccgccgccaagccacctcaccgtgagtacagaattcctcacggcaccggacctaggtaagatttccccgactctcctccttaccctcatcaaatgtaggcccgagtgattgagttttcctgtcgcgttgggggcgctgattgctcgtcggcactggtagaaccaccgtggactgccctctcctatggaccgtagttttcattgatcatacacataaattggttcgctagatcgattcgccgtattgcaggctccgtgtgggaggttttaattgggttatggtacgtcgattggttcaggagaacggagttgcgtgcca

SEQ ID NO: 54146 - DNA, 586 bp, Arabidopsis thaliana landsberg
agtataacaatacctaaatttcacctgacatggtatgttacttacatttttcatatataatgattgtttactattgattaaatatatttttattgctttatctaagcaacaacaagaaccactggatgattcacatggatatttacaacaatctgatcaacatgatttattaaatccaaacatgctgtattgttatcaagagccagacgtgtctacaatagtaagttatagatttcatttgtctttttgattttcagtatttctttttttttgaacatatacattcatgagctagatagaatactatatgctattgccaatgacaatatcttaatcactaaattcattttatttcacctaaacagcagcagcaacaacaactcaatttacctggacctttagaacaatctgatctacaacgtttattaaattcaaatatgatgtattctgagccagatttttctacatcggtaagtatagatttcattttctttttccagtaaccagttattgctatatcttttatatggtatacatattgagagtcagattatttaacactcaatgatttattaaaaaattaaat

SEQ ID NO: 54147 - DNA, 1129 bp, Arabidopsis thaliana landsberg
  unsure (1)..(1129): unsure at all n locations
cggagttgccttctcctgtgttcctgcctccgatctgggaatcttcatctccgaatccaccaccttctcacgctacatctccgcctccctctcatcttcctccagttcaccctcttcctttcgctgttgcaccccattgaacctcaaatcgctgcgttctcatcgccgtcctaagatttctcatatttgttgcgacggaagctctatttccggatctggcctcggcgatcccgatctcgagtttctccaagcctctgtcctcgttgcaggtccaccttttcccatttccaaataaatgtgactattctcttatttattcaaatttccggtgacgtttactcgtaccctgtgacgtctgttgcttttgcccaactctgattgcgatttccctccttttttagggttacctttatggagtttgtttgtgattccattttattattgttgccacaaacctagatagatcccttttaatcacctcaacttaattcaatttgtgctgattaaaagggattgtagcattagcccattcaattttatttcattgctcaacttgtgctccttttttcttaacaacaataacagagacaagtatgcattacaaaatgcggcgacatggtttccggcaagattcaatgtggcaaacttctaggcctttgcctcccttttctattagagctagtgaatccagggttggtgttctccctattggacttggctttctccgtcaattcaagcagcccactatttttctcaagatctcctgtgatggtgactacttgcttcctgttattgctggtaatgcacctcaatcctttctacactttgctctttcttatgtatcttagcactgctaactttcatcgcttacacttgcaggggatgctgctgttgagaaacttttagacgtaccactacaaggccacactgaggtatcccctcttcatgttttacacttttttgacgattgctgtttatattccaccccttaaccttcttttctttctatcttgtaggaatgccctgatcagttacagttcgtgtctgctgttgtctacaaaattgaaccataccccaagtatccgtttccaacacacatgaagacnataatgtacctcgaattagaaca

SEQ ID NO: 54148 - DNA, 1032 bp, Arabidopsis thaliana landsberg
gaaaaatcgaatcggttaattaatggttttacttggacaattatagtgatttcttgaataatagggttgtaggcgttttggttcatgaagatatgaaactggttctgatggcgtgaattgagcattctctaataattaagctataaagatagggagattggccggattggggtatatattgaaccaattggatattcatccgatcttttttccgagcattacagctaaataattgaacttaacttaacttgagattttgatcccaaaaaaaaaaaaaaaaaaaacttaacttgggattatggtatatgaaattatgagtttgggtcaagaaacttgtaggacatgttcataactggttaaggagaataacatgtgtatcaattgaacaataaagaatattgaatcgttcttttaatgatatctttcgaccatcctatttatttaaatatggtttatgtagacgttataattcaggttatcatggaaatgttgaaatttgatcatgcatgcttgatccggctagccatttcgttgtgtgacaattgacaaaccattatgaaattgacttgttcctttgttgatttttttttgtaatcgaacctatttaaatgctaattagaattaaatttccgttttggattggggaaatgtttgttaatttggtctgatattggactaaagagttgcttgtacttggtgtttatggcaaatgaccagcagaacaggtaaagatataataagataacaaagtagctaagtaataaataaagacaaatgatactaatgtgatgaggatcatgatagtatgaatcaatgaatgcatgatttaggttaagtgtcgtatgttatgttttattgatttatgacatgcatgttctcattcgagtttcatagtatattagtattgcgatcataaagagtcgtacgtgaacactctacacattaagtaaaagaacatggatcaaaataacaataacaatgctaaacaagaaaataaagcataacatgtactaaagagtttgccaaaagaaa

SEQ ID NO: 54149 - DNA, 366 bp, Arabidopsis thaliana landsberg
  unsure (1)..(366): unsure at all n locations
gaaagaaaanaccaacngagaaggaaaaaaagaacgaaaaaaggacagaattattagaattttcctaagaagaaacgatctaaagcagatggtagacatgaggggaaagtagcagacgaataagaagggaaacgaaaaccaagatatgcataatcgggaattaaaagcgagaaaagagaaaacaaaaaaagagataacaaaatgaataaagacaaatgaaagggtaatgcatgaaaatgacgaaccaaaaaatatggagaaaggaaaggaataggtaaaaaaaaaagagggtaaaccaaggaactaaataaaggaaaacgaagacaaaatggggggttataaaaaaagaggggtggggacaaaagg

SEQ ID NO: 54150 - DNA, 552 bp, Arabidopsis thaliana landsberg
  unsure (1)..(552): unsure at all n locations
tcaaaccggtcaacgacacaacgccactcactatttctcaatcttcggtgggtcataggaatcccaaggtacttgaaaggcattgtgcctacgtcgcaaccaaagagttgtgagtactgggactcacaatctttagccatcccataacagaaaagttcacttttgtgaaagtttatcttaaggctagacatttgttcaaacgcagttagaagcagttttacattcttggcatgttcgatgttatgatctagaaacaccaccgtatcatctgcatattgaaggatagataaacctccgtcaatcaagtgcggtataattccactgaattgatgttcctcattcgctctagcgaaaagcactgccaacatatcggctacaatgttaaatagaattnnnnnnnnnnnnnnnnnnnnnnnnnnnnnnnnnnnnnnnnnnnnnnnggnnnnnnnnnnnnnnnnnnnnnnnnnnnccacatgacctttggagacgatactttggatccatgtacaccatttcggcgagaaaccttcatgcacatagcttgctgaagga

SEQ ID NO: 54151 - DNA, 1526 bp, Arabidopsis thaliana landsberg
tatgtggatgaagttagagaagttagaaatttcaaaaggctttgggattatatttgtgataactcccgatgatattccacttacagataagtaaaggtgctacttagaccaaaccgattatgaggtttagagccagcgagagaccacttctcattagactacaaaacttttttaggtttattcacacacaatgtattatagttcctaatgtatacctattaaattagagtttgtcgaatgttaggattatagttcgtattgacaaacaaatatcagtttgaaaaattaggaatctaagagataataatataattatttttttgggtttaaattgaaatttgttttggttggaacattcgttgactcatcgtcacatcaaataaaaatcttagcaaataaaatatgtcccataaacatcacataaataaacaaagaaattggaatcaatacaacaaccactccaaagtggatacagacataacaggtgatgagatggccatgtgatttattttccacccgcaacactctaatgctcatatatgaccaatcaaaaaaaccacttaaaccgccaaataaaccgaccttatttttgataaatcaaaacccacttagtcacaaattaaccaattttatatgattacactttcacaaatattcatgtgtagatttctttgaaaattttcaggtgctgcaatcacgagtgaccgaattatttttgaaaatttaaaccgaaatgaaattaaaccgaaccatattcaattttgaaaatgaaatctaaaaccggattaataaaccagtaccataatctgaacggtccaaaaagtattgacccatctctctctcttggtcgctcgttctcaaagggcaaagaaaaaaggatttttaattttcggagaggaagaagaagagagagatattgaagagcgctgaaggcggaaagactattttgacctcgtcgtctccgtagatcatttttcttcagctcttcttcttcctctttctccgattctccttcttttgattttatctatccgccatgaacgagaaagccaacgtctctaaggagcttaatgcccgccatagaaaggtctctctctaatctcgaatctcagattctcttattttattttctccgagctttgtggatttgtcgtcatatatttgaatttggttgccaacaatatatgatcgatcttaattcgattggatctgtgcattagcagctatccttccttcattttcttcggtttcctctagttaggagaggatttgtatcgtcgatccttatcttcttctatcgattgagctagaattattattcatcagcaatgaaaatcagtttctctatttcgatttgttgtctaggacaatagttgatcacgatcgggtttttgaattgttttatattcaacgtcggcttattgaatgttacagcttcatggagctcgaattttagtgttttcctataaaaattcgattcaattgtttgattttggaaagaatcgaacacatggatccaaggagct

SEQ ID NO: 54152 - DNA, 249 bp, Arabidopsis thaliana landsberg
aattctttcccactgcggacgagaaaattatgtgtcaaaatgtactacataagaaatttaaaattatcaagacatataaaaggcggaaacccccgttgttgtacaacctatgatagccgaaagagagtactcaaacaaactatcaatactgatagcatctattcgaccaaaaactatcatggggggggacaccacatggagagagagatcctattaaagaggccgtttctgaaatcagtacatgaaaag

SEQ ID NO: 54153 - DNA, 509 bp, Arabidopsis thaliana landsberg
ggctattgaaatatgtgagagtctggaccaaatattgacttttcttttctggttttgaggagtaccatttttgtttgtgagtaccatggaatttttgaaggtctttggtaatagacgcagcagtatccaaattgccttcaaatatatttccaatcaaacccataatttcaacatagcattccataaaaaaaacaaaagctcaagactgcaaaggattataatcccgctatatgaaaaacaaaaaagctatgctggaaaaaagaaaattcatatcctggatgtaagctttttcatctgcatagaacaaagtgtgtttattacaccaaaaccgattgagacctcatttcccggtaccggaggatcctcaggcttagcgttttggctatgaaactgatcaagctcctcttgagggaaaactctagattgaagagaaggagagatcttattaacgtgaagccacgttagatgccagaaactgacacttgcgatatcatcacctggggataaaa

SEQ ID NO: 54154 - DNA, 629 bp, Arabidopsis thaliana landsberg
gagttcatatatcgttgcttgttgtcatctttcaaaatcttctcttttttcaaaaataatcatgaaaatctcttttctctttaaggacgtatatttgcgtgagtatatatgtatttgacgaataaatattgacttatatttccataaacaaaaatcggtggaaaaaagtggtgtgttacatgcaaggtcaacaaaatatatagctggtaaactcaaattatacaatctaaatatcaaatggtaaattcaaaatatatattaactcaatttcgttagaggttaatacagccaatattcaagacaatgatcttctggcataatcatttcatttagatgtcatatcatattaccagaacactttacgattcaaaaatattgtattaaaccaatttaccaaaaaataaaatgtattaacgaaatgtttatagtccatctctttcgtaaatgttgattttttttaataattctctcacacatattaaagacatttaatatttatgttaaatattaatactcatttttatttcccaacaataatgtatgcagcattttctacgctaaagcagtctcaataattataaacatctattaattcaatttattcatatatcttcgattcatatttttga

SEQ ID NO: 54155 - DNA, 1289 bp, Arabidopsis thaliana landsberg
  unsure (1)..(1289): unsure at all n locations
ttcttttattttgatcatctaccgattatatatatcttacaaatgttcaatggactttattacaaaatttggattattgttatgattgggaatgatctggaaactaattaagagtattgaatccatgatcctatgttactaaaattaaacctataaaataaagaagcgacgttccaatagtagtaaacatttgtacgtatgatcaatcataatgttgttgatcattgcttgtgtggttaaccaaccccatggggcttgaattaactttcaccacataattctgttattgcattacaagtttacgtattcaccttaaccacacaaagaaagaaagaatgataaactaaaatactgataatggtaagaaatgaaaagttttcaatccaagtaataagaatttaccgcatgacaattaaataagaaaaatttgtgttggaaaatatttattatttttgtttattaatagatgatagattatagatatatagatataacacgataatcctacaaatatttaaacaatgtaacatcaatgcgatcataacattattttatagtgaaaacgatcgaatattttacatcttgaagacaaacagaaaatgatttattgtcttcaaaaagagtcaaaaattgtggtttctcttcaagatatccggcaaaataatacatataccaatgggtactgcacgaacaaatatctaacacgttttacaagcacaagccactaattttttctcttcaaatttgaaatgcaacatgaaaagaaaagaaaaaaaaaatcatagaaacaaaatagtaatccaattaacgtccaaattacataaatacatattgcctcttatacattgttggaagacccatcaaaatgactgaaactaaacatattataaatctcaaactcgatttataatctcgcaatttttggtttctaaatttagtttgtaatcttaattgataatattttattttatttatatacatctttttcttatctcgatattttttatttcgggcaggcttgatctcccttagtatctaagctgatttctcaacatacataacgaaaaaattccattatccatattattatgatttataaatcaacctaagcttttttcagactaaaaacaagaaaatatccacctaagcttatacggtnttattagttagttggagagccaaattgacagaaactagaccaatatttaacgtgtcaagatnttgggaaatgtctaaagttatccaataaagaaataaaaatgagattatcgaaaccaagatcattaatc

SEQ ID NO: 54156 - DNA, 392 bp, Arabidopsis thaliana landsberg
ggccgaagggtatctatgaatctgaatcgtccgatcataatcctagggcccagattagatcgccgatatcttaaaccagcgcgcgggaatagccatcggatttctgatctacggtttggatcacacgcgtgttctgatcaataccggccgtccgatcctatgtccaataagccaatcgcaccatccccgcgatcgaatcaccaccgttaactcctagatctagggccacggctcgatcatccccacacgaccagatcggcggtgcagcccgatccacgcgatcacgctcgctagcggcgcgcgtccatcccagcgttcccgcttccgcattccccaattcgtcgctgccacactatgctgcaacgcataacgaggacaaggatggactcgct

SEQ ID NO: 54157 - DNA, 319 bp, Arabidopsis thaliana landsberg
cgagcttggcggccacggatgtgcccgggccggaatttgcgtactctaatctgccgggtgtgaaaatggcgcagtagactttggcccaggcaaggtatgatgcttcagccaaaccggactgacaggtcagtgagaatgaaccgtccaagaagatcaagcagctactgcaggcgcatgccaagaaggccagcgccaagctggcgccgcgcaagcccaagtacatttgcaaggccgaccgtttgaagatggaggccgaggcggcgggggatacccccacctgactgactggcgcggaccttgtaggagcaaaaatcccacc

SEQ ID NO: 54158 - DNA, 768 bp, Arabidopsis thaliana landsberg
ccgcaatacactctagatatttttttaaaagaaaacgcaatttagattttaaattctttagaattatcacgaagtaattcgcgcaaaaactgtaatcaaagtttaaattcgaaaattttgattagtttacgttgatcgaacaaactacaaagtaccaaaaaacagttatttatagtttcataatcacaaatggataacgacattagtaacaacattaataacatcatcttagtttaagtcagtagtaatctatggttaaacaaaaagggtaattaagtaatttgcattgctcagttcgcttccattgctggatttaacgggcgaataagaacaccaccaaggatagattggtttatttctagtttcttcggatctataaagtagaagaagaagaaaaattctcaatttctctctcacaatctcttcgttttctgtgattttatttagattttcccatttcaatctcttgttagaaattgtatatatacctagatcgattggttcgtagatctgtttgtttttctagggaaagttctttgattctccagaaaattggacgaagctttggattcaaattccagaattaaaaaaaaaacagaaaaaaaattctttaggttttcattttgaattcttaccatagagtttcaatggtggtagcaacgaccatagcgctttacgcgagtccagcgagcactgtatgttccacagctcaccaaatcaacgctcatatcttatgtgaccttaatctgaactctagatctacatcgg

SEQ ID NO: 54159 - DNA, 459 bp, Arabidopsis thaliana landsberg
  unsure (1)..(459): unsure at all n locations
tttccaacgtgagacactacataccgagcatgaatcaagttnnnnnnnnnnnnnnnnnnnnnnnnnnnnnnnnnnnnnnnnnnnnnnnnnnnnnnnnnnnnnnnnnnnnnnnnnnnnnnnnnnnttctttgcttcatgaaagtttctaggaagtgctgaacccttaggaagtgcatcaacaagtaaatctaccaacaaatcaaaacttctatctgtccatcctccaagaagtttgatgtgaagcaaacgaactaggaaacgtagctttgagtagttttgacaacccggatataattcttgactattgtcttctgctagcttacgaatggctattgtgtcttcattaggttcctcagaagatccatcatcctccatatcccctccatcatctaaaccacaagctaaatcctttaacaactcatatattgcatcatcctctgtaggaaggtcgctaaactc

SEQ ID NO: 54160 - DNA, 1192 bp, Arabidopsis thaliana landsberg
taaattggtttttttgttcaatcaaaatccatacaaaccttttaaaattattagcagtttttctcaagtataactgtcttacacctcttacaaactattttcagtgaacaaaactctatcctaatcatttgagtagactttactatagaggtctcgaaccatttaagcataacttagtaaaagttgttgttgttctcagaaaaatacttgagctctcttcatgaaacatattttgtagcacttacgtagaagtgcatctttgaaagtaactttatgttttgcagttctctctctctgcttacgagtgcacgcacacagcaaataaaggttcaaatattataaactagtggaagtacaattatgggttggaatcttggagactaaacgatttagcaaggagagggaagggtcaagggctaatattttgggccaaactatttctaaaagcccaagaaactaaaaaaatgttcaaagctaaacaatgtaatgaaaaacattttcaacaaaaacattttctgtctctagctctcttatcttcttttcctctgaccaaccaaagtaaaaggaccatttgcatttatactaatgtaagatgtttaaagaagaagcccaattgtctgcagcttcttcagtgaatcattaaggaatcgaaagccaattatctgaacactagatagacgatcaaaacactattcaataaaatgtacatcttttgttttagttattattccgacgaaagtagcgaccctttttctattcaacaagaacatagcagcgcaccaatattattgggccatctccttttcattgactttgaccagctccttttcattgacgtttttttgtattattgggccaaacaatatattgaagcccaaaagattaaaaattgtaatatattcaattgtgggctcaattgaagattttagagtaaaacacaaccttttcattgactcttataagattgtgtcgttaataatgtggtgttaactttcctcaaaactcttacttcctaattgttgataggagatttagattagctagaagaaggcacagctacaagattttaaaaacacacacttacttgtacttgcaattacaccctcacttatgggttcagtattaaaggaaacagaagtcttctttagtttgttgggccaaactacttttgagcccaaacgaatacatcttt

SEQ ID NO: 54161 - DNA, 776 bp, Arabidopsis thaliana landsberg
gtggatcatgaatcagaagaagataaatcagtgataatttctgaagttatctttatatatcttccaaaaaagctggcttaaaacttgtttcggcatatctaaaaataaatgtaaggcagttatacctaattatcataaacgacgaacacagtttattgtggattgacttaatctcatttctatccctgctttttcatattgacctaattataaatttataatgattttgttttttttgtcaaaagtgttatatgtatgaaatctagtagatatagtacgttttcttgaaaagactcaagtgtcagatttggcggctatggatatgaattacattgaatttttttttgtatacgaactgaactgaagtttaaaacgtcaaatagagagtgatgtttagtgatgttttcaaacacaattctgattttggtaatgtctgaaagagtcatattttgttagtgaattactggacttttatagctaactgagactccaatattgatttcgtgttttgcggatcaagtatcatattttttacgcgtttttggtaaagaaaagacacaagaaaatgcaaaatggtcacaaaaggacgacagaagaaagtattgaccttgaggtgtcctcttgtaacaacatctgccgtttatgtacaacaacaacattgttacgtaatctattgcacatgccaatgaagccttatttggaccaccacaattaaaatccatcttctatatataaagtcacgatcacatgatcacgcacagtccttcaccacaaaa

SEQ ID NO: 54162 - DNA, 1215 bp, Arabidopsis thaliana landsberg
atggcgttgacccattaatttaccaatcagctttaagataatatatcagcaacagactctatggtcctttaacgatcattgggcccaataaaaacgaaacttagaataaatgttgtcaagtcgaagttttcagaacacaatcgcggtagagattgtagactcgagaaatgtctgtagaactaatggtccacacatgacccttcaacgccaaacgcaaaacgttactactattcttgttatcattctcttcctcgtagctctcttcaaccgcagccgcttcttttcgcttctcttctctccacaaactcttaacaagcagctctttcgtctctctgtcaggcatcagattcgaatctttcatgtcttggaacactctgtaagcaagcactgatctttcgcatctgcaatacgcttgaactagaagctttaacatgtacggatcaggttcaagaccaatctgtctcaccattgagaaaagtctctcaactgtttgaatctctccctgcaatgcaaagtggtacattaaacccgagaacgtctggatatcaggagaaactcctgtcaacatcatatcttctagcgtttctaaagcctctgcgtttctcttgcattttgttaatgttctcaagagggatgagtacaacagcatgaggttgaaatcagatatcgaaccgcagagtgttctgtcttcgttgaaaaccttgatggctgcttccggtttctttgaaattccgtagagatcaatgatcagcctgatggtgctgaatggtaatttgatcccttcgattctcactttcgagatgagcttatcgaccagttcaacttggccattgcgtgctaacatagccatcattctctcaatcgtataggcgtcgtgggtgaatcctggttgaatcgccacccagcagaagaaactccatgctgtttcaggtgctctgaagtttcttagcatcttgcagaccaatagatttgtccaaacgaagttagcttcttccaaagcagtgactgcatcagagctccacttctttaacgaagttgctaaagcttttggatccagccatggcttcaacttaacttgagcttcattaacatcatctttgtactcgtctccttcgtcttcgctatcgctgggattatccatagaatacatagaaatgtccttgatcctctcatccggcaacatttctctcaaaaactcctctgtttcatgttcaa

SEQ ID NO: 54163 - DNA, 376 bp, Arabidopsis thaliana landsberg
caggcaagctcaggacttcacaccatgcgacgaactcgcggctttggtgtggcgagtgcgctgcgcacagctcgcgagagaaggcgagaggagtgagtaaccgcacggggtggccgagagggtaaatttcaacggcttgggcaagatcgtggcggcggtttccgatccaggcgcgtccacgacatcgtggagcgcgcggggggcggaacgaggcatggagagcgcgagtacggctgcgcggggcatggccgagccatgggcgcgccctggggcatgggcaggccaactaggcggtgcacgagcggggctgggggcacggcggctgctcgggagggcgcgacctacggtttggggcgcagggctgcggcgcgcgtga

SEQ ID NO: 54164 - DNA, 512 bp, Arabidopsis thaliana landsberg
atgttttaccatctacaacatggaacattcaatttgagtgaacaaatacctaataaaaatactctatgcatcatgttgggtttttttgtgcatttcataaaaataataatattaataaaggtacattaataatgagaaataggattttaacatgattcaaattctagggtttggaaataatgtataaaagagagcaaaatggaactctataagtaccataaagagaaacataaataaattcatattgtgatctttgtatgctgcacattatttggataattaaaaacaaatcacaatcagatttgaatttggcatgtgaaaataagggggggaaattagaaaagaaaaggatgaatataaaagaaaataaagagcactgcgcatgggccctattcctaaccctcagcccaactaccagctgggccaaattctccatccgcggcccatctcgcctcacctcctctctgcctcagccgctgctcgccgcgtgcacgtgggagcccttagccact

SEQ ID NO: 54165 - DNA, 784 bp, Arabidopsis thaliana landsberg
aagaaggcttgttaaggttgcaaatgtaagatgatatttaaaccaagttcaaaactttataagtgaataacaaaagaaacaaaacccacataacataatgtatgagatccacatgaaaagtaatcttcaactagttgaatgcaaaaaatgctaagctttagtccttcctgagagactactcgaactggctctttaagctgatgaagctgatgccttgctccttggcttggcttcagtacctatgtaaagacaagaaatgtgccatcaaaaccacatttcgactggaagagaaaacaaacttaagactaagatacattaccttctctgaatccagtcttgaaccgacgaggaacattacggagatacctcatccttccggtaccagtagtcttcctcctgatggccttcacactccagttgtctgttaaccaaagagacaagaattgagctcagagacagaaatgaacatagataatccctcaaattccaaccaatcaattgaagcaaagacattaaagaactgataaagtttaaacatttcaagctataataaacaaaactaatagacatgtcaatcgagctacatagataagcttcttctgttagagaacgaatatacaaattggtccaaatgcatatcagactcaagcacgatcatggagaatgaatattaaaacacaaaagcaaatctagatcgagaaaatgaaacgcatcttcagagaatgtttttttaaaacaatgaagagagttcttacaagtcctcttgcgagcagctgggtaagca

SEQ ID NO: 54166 - DNA, 413 bp, Arabidopsis thaliana landsberg
aaaaccgtgcatttcgtcagcttaacaggctttaagggaaatttcttccacgcgactacctttttttgtttggttctttaatcagaaaatgtattcgcctttcattgcactattagggtttatagttccttaagctagaggtgtgagtttttttcttctacttaggatctgagacataaattttgggttgaaatggaggatataacttgggttgaacagggttatgcctctgcgacttcttctacgaaaaggaaagcgagacctaaacgattcgcattctgtaggatgggggaccagacaactcattgagtgtctacactctctcggcaaagatactacagaaatgatctctcgttatgatgttagctgcactattgctaagtatatttcagaggaagggcttttagaccctt

SEQ ID NO: 54167 - DNA, 825 bp, Arabidopsis thaliana landsberg
ctatatataatttattgcaacaatattcaaactagaagtttaatgtataggattcaattacaaaaattatacgtagttttaccaaacttctaagaaaaaagtttaacttcgaaatatctttctaagttaagttaatcttcgaattcttcctttttattttcgtttaaaaaccaaaatagagagattaaatcgttataggcttagagctactgggctgtcacataaacgaatgacttacccaatgaaaaccccgtacgtgtctaatatgattttccaaaatcattttagattcaacggtcacgattgactcagatcttgcaacttcgctacataaaccctttctcggagaagtagggttttaagttttaacggacgcgagaaatcacagaggaagcgaagtcagtgtagaggtacttcactcttcacgctcatttcactctcagctttgaatctcgttagctgttttgaaggttctttcttttctgattttgagtgttctctgttatttcttcgcttttcattttcatggatttaggttccgatctttgtgttacggtattgaattcactttttggttccttagtagttcatgtatttgcagagtacgagttaaaaaagctttgattgtcgtttttaagattcccttcttcttaagggggaaaaagtatgaaacttgctaatttcttgatagaaaatagggaatgatatcatcattactttgaaattgactatctggtggctgaagtatttgtctttttcatgctagatatctaattgcgatggcttttttgagtaaattcgggaacatattgaagctgaccacac

SEQ ID NO: 54168 - DNA, 787 bp, Arabidopsis thaliana landsberg
  unsure (1)..(787): unsure at all n locations
ttaattttgttgagcaaggatgagtactctgatcatggctgattgttgcttgatgcaatattttctgaatgatcagaaaacctccaagtcaacaaataatgatctcaaactaccaccaaaatcagtagagcatgaaattttaccctttccacagttatgtatcggccttctagtacagactggttgagatatttaatgcaccgctcagcatctttaaggctgctcattgtaacaaaggcaaaaccacgagacacacgggtgcgcggctccatcacaagaaaacaagacgcaacctatggaaatgaaaatggtaaactatatgatcaaagattatatgcccaaaaatgcagagacaaaatagacttaaactggtagtatgagaaatgagaatcaggtatagatgttatcacctttccttccttggcgaaatgtgcttcaagatccttgtcagtgactcttgtagataggccagtcacatagagagtggtaccagggttttcaacttcacttctgtcaaccaaaattcattcacataacgtaaacaatgcaaagtgcaaactatcaaaccaatcacagacaacaagagaatgcaaactcatctggagaaagatagaacgaaccttccacggcttcttgaccttgacctacagagtgtccaggtaatgaaaaaaaagattaccacgcaattttcttcagaaaattttcagtgacatacccaaaatctacatacgaaaaccctatacttaataacaataactanaccttcacggcctcttgatggagatat

SEQ ID NO: 54169 - DNA, 1350 bp, Arabidopsis thaliana landsberg
tctaatccagaggttgcgtgttggtgcgttcccactacacccacacgagcttttacattttttctttatgttctttttttggttttgtgccattttgtgtcaacaatagcgaacaaagcgtagcattggagaaacctttttctataaataattgttttctttaacatgtgttttcttttatcgataaagacgttgatatttttccgttgttttttgcatttttttgcctatcttggtagttggacttaagagtaaatgttggtcaatcatggtttgaattcttgattgtgacttactatgcttgtagtttgctaatggtgtttttttttaaaaaaaatgttgagcctagtgctatgattttgctttgagaaattaagtttaaatcctaaggtgttttattttaaccactcaaaatccttaagattattaaaaaacctaagaaatatcaaatgataccaaatagaaaacttacaggacataaaacaactagatgtaaataacttgggctcaattgctttcaaattgggctttttcatatgtgtgcttttggactaaaagactcataggtcaaaaaaattaaacgggctgagaccaaatatttggtttataacgaaatatgagttttttggggggccattctgataaataataagaagaagaagaatcgcgtctgcaaagctttagtgcttcctagagcaaaggagaaaaaaaatggtgaactatgtgctcaaaatcaccgctgatctcgagaatctcactaatctccaaccttccggtggctgcgacgattccaacttcccttacctcttcaaggttacccgttaccctcccttttcgcaccagttttatgctttggttcctctcttttgatttccttggtttcgttttagctgggtacgattgattggattccttagctaggctcatgttgagaaataagtgacttccatggatctgaggctcattaaagcttcttagggtcttcatttcgccttgcgaattagaattctatggaattgagtctgacagaatggtattattaagtgactatctagggttgtgagaaacaaaaactcttagggcttatgtttctgcaagtgttcaagatcaaatgtattactgctcctgcttattcttgcttgttgtgtatgcgattaaaagtcgtttagtattctcccttcacatatatcagtacgaaatattaacagaaatgttttttcttgctattagttgaaatgtgaaagatgtggagaggtgactccgaaagaaacatgtgtgactatgaatgagacttttactcctccgggaggtaggggtacttgtcatctagttcagaaggtaatttgttca

SEQ ID NO: 54170 - DNA, 907 bp, Arabidopsis thaliana landsberg
gtataaaatgtgttaaattacctattaaagttctaaatctttttattagcatatttggctatttgcttatattctctataaacgctccaattagttgtaacgtatcttcggtgagctgtattataccaaattaggtcttcagtgttcaacaaattgtcgaatgttttgcatgtgtcgatctaatgtttatcgtataaatacataattagaacatacaaagtaaaaaatgtcagatgattattaacacattatcgatctaaaatgtatcgtcgaaaatgcctaattagaacatatgtaaaatgggaaaatgatcagatatgattagcacgtgtcaatccgaaacatatcgtagaaaatgtctaatcaaagcatatgtaaagttggatgttctaactgttatcatttaactttccacatgatttaagcagacacacgagtgtttacagtcgtttaaaacagtcaaaactcctttagtaaaaacagaaacgatttaattgtaatgcttacagaataattatcataatatagacatgcaacatccaaaaacaaccaagacgatagtctaattcggttttagaaaattagatgtaccttttgtagtacgttaaataattctcgtgattcgtttcagggattaagttgggttgccaaataaaaacattcaccaaaatttttaaaactttttttactctagagatacaattgttttatttaattgtttaaaaataaataactatttttattagcagtaataatttaatttaaaacgtcctagaaatcttaactggaagtgtatatcataagaggaacaaaaaatgaatactaagattccttacatttaggactaaacaatgaggtttagcatttaaaaatagttatttatttaacaaaatgttcatacaatttt

SEQ ID NO: 54171 - DNA, 403 bp, Arabidopsis thaliana landsberg
cggaggagatgcatcgcatccacagtcgttctcctcattttcatctttgaactcccgccgctacgagaaccgaaggaggagagactgtaacacggtcggacagatcttagggaaccctagggcaccgatgtcgatgtcccgaagtagcagatctcactcgcgcgagtacctccgctacttgggccacttaggtacgacaaaagtacacacaaacatttgccactttgatggccatactattactcctgaaccgcggtcgcgtcctcttcgacaagttaggggaaggggggacactattatatgctgactccgagctggctttgtagaaaacggatgcacgcctgaaacaaattctgctggagctcgcaccggtagacttcatgtaagggaaggttgagacatg

SEQ ID NO: 54172 - DNA, 761 bp, Arabidopsis thaliana landsberg
atatatcatatgaaaagaacatgagaaatccaaattttgactttttttttctttttctataatatagccttgatgagatctaggaaaccctagatttgaaaagacaacaagtaaaaggatcttatttgttttcaattattatcatgatttgtgtggctctcactctccaatatttatataaattagggttttatttttaattttctgtgtctctctagtggggtaaggaaattacagatagggtttgttttgaatggggccgtccagtaccattccacatacacacagtttgtctcatgtgtttggtttgtatgggtgccatggactcacgtgaacctctaaattaattaattatatatatacatatacatatattttcaactttcttaatgtaaatattgaccatttactattactgatcatttcagttatttatttgtatccattttcttaaatcaatccaagaaaaaaaaaacaagctttctttactagctcatcaaggattactggatcgcatgtccgttatagcatatgcaaataaaattatggattctaatctcataatactttatggtcatttgagaaaactagaagtttagagcttttttttctaaattagaaaaaaacatataaaaaggacattaaaaaaaataaaattatcggtatgacattcggacttgaccgaaagtaggattttaaaacagtatctcatccatgtcttctcaaattcactgtacaagttgatgtttacagagacataa

SEQ ID NO: 54173 - DNA, 553 bp, Arabidopsis thaliana landsberg
  unsure (1)..(553): unsure at all n locations
atgggtggtcacttgagccaatcagtcaacacttaacgaagtgcttagagggattctatctttaagtcatgagttcatcaagctccctaatccagaaaccactctacctgaggatccaaatggaaatggtttgaggactgcctaggtgcactagatggcacacatatcgatgtnnnnnnnnnnnnnnnnnnnnnaggtaggtacagaaataggaagcaacgaatcaccactaatgtattgggggtttgtgatcgacaaatgaagtttctatatgtcttggctggatgggaagggtcggcttcgaattcacgcatactacgtgatgccatgtcacaggaggactcatttgttgttcctagtggtaaatactatctagtcgatgctggatatacaaatggtccgggatttcttgccccataccgatctacacggtaccacttgaatgaatgggctattcaaggcaacaatccatctactgcgagagagttattcacctacgccatgcaacagctaggaatgtgatagagagaacttttggctattggagatgaga

SEQ ID NO: 54174 - DNA, 211 bp, Arabidopsis thaliana landsberg
gactgcgcaagctgcatgggaagacaagggggatgcctgccgagaacagacactcactggggccaagccaacacgccctaagaacagagaaagacgcggtggccgactactgcataaacggagacaggccatgttgactggcaccaattgagacgcggagggtgagcagggaactacaaccacctacacgggggtcaatatagaagacgca

SEQ ID NO: 54175 - DNA, 566 bp, Arabidopsis thaliana landsberg
gtctaacacctgaactgtagacagtccagtgacctcacatggacggtccgacacctgtagcctcggccttacaacaccgattatcagatttccagaaatatgaaactttcctttgttgatccgataccccgaagccttctgtgccaagctattagctctgaaattcttagttctaaatatatgacgaatgtcaaattcatcaaatagatagattatgaccttacattatatgagataactcttcaaggtaccatctaaatattgatactctcttgaaacttgttggactactaattaagaatcaccaaaaactcttacatgtctcactcccatatattttaagagttccaaaccaaatatcaaagcttcatatccggcttgattattagtacaatgacaccgtaattgggtagagaattcaaagacaacacctactactgaaacaagcattatgtcaatgccttgtccttctttgcaagccgattcatcaaaataaagtgtcgagagggtgatagtaatatagaatacatctagctcacaagaatcatcaatctgatgttctacaa

SEQ ID NO: 54176 - DNA, 576 bp, Arabidopsis thaliana landsberg
tggtgacttgcggacagtccgtgcctacgtcacatatagtccactatcccaggtggtggaccatccatgtcaagtcgttaaaccatttgtaggtgtgattttctcgatggacagtttaagtcatgttttggtgaggtcggtcatcgtgaattgcggaccgtctggccatggataatggaccgttcgtaatactaactcagtgagcaaagccaggtctatagggtttctgagtgcttcagttttgtgtctagcagaccatatggcatggtcagtagaccatatgcgcaacacttttttggggaacttcgatagcattttgattgaaaagtagccattacagtatgggcggaccatctaggccttgatcgtggacctttcgcgagcgtgcagaaaaggggtatgagacccataacagctacttggttagaggggtgctataaacagttggtgtccatgtattggacaactctcttggccatctgaaccatctattgagcacattcaagccttccaactttactcacacacattgctagggtgtaacccctgaatttgagagtataaattctttcttat

SEQ ID NO: 54177 - DNA, 246 bp, Arabidopsis thaliana landsberg
tccactctattagagcataggacccatacacaagtttcataacttgcagtccgctttcactatcacaagcatgccttatctacctccactgagggataggatcttctcttttgtgccgcttgtcggctaagagggattgcaaccaacgacaccttgggtcggagccacatgctttaatgctatgcgatacaagcccaactccaactccactgtatctgtacgaactagcaccctaaaaacaggaac

SEQ ID NO: 54178 - DNA, 368 bp, Arabidopsis thaliana landsberg
gggcgaccgggtttccgggatcacgccgtcccaacggacaatgggaacagaccgtttttaactttaacgaccacggacatagcttaaaatagggaaaggatcacccagcggggtctccccaccgctttcctgaaaatgatatagggggatctttccgcgaccatgaccactatgatattcataaagccgataccgaccaccataagtgaaatggtcgatatccaaaacaacagcatggtaaaggtcttactgctttaggccaccgacttcaggaaatacgacatattgggcactccataagcagtcacttgctgtaaaacccaaacgctgagactcgtgtcatcatacttaaaatatcatactgggca

SEQ ID NO: 54179 - DNA, 868 bp, Arabidopsis thaliana landsberg
  unsure (1)..(868): unsure at all n locations
agactggattcgttttctagtaaataggaaatggtgttgtccacaaaagggatttagtccctctcgtatgctatatagttatcgctacccactgacccaaaatatctaagacgatcggaaatatctattttcgaatttacaaaaaaaagaaaagaatgatctatttctgatccaaaatatctatttagcagaaaaggctggaaatatttatatcactaagacttaaaaaaaccaatgattgtgatatgtgacggtgattcaattagattactttcgatcatgttagaagatagatactttcgagtttcacttttgtcggtaaaagattgaattagttatcagacacatatatgtaaaatgtgatttttattcatttttctactttggaaattatcttcattacacttacaaaattcgtattaattttctaaaattagattgaaaacgccctaggatataaaagtctaaaccatgggtagtagacttcctaataatccgtggttaatccatagtactaaaaaagacagagctaatttagttaagtcggctgaaaaagttaaaatataaataaatattcttgtaggtaataacataataagcaaacaaaaaattacgataaaaaggtgggaaaaataagctctgtctcacacagcattatccaaaactcaaaattacagcgttgaaacagaaaccgatctcgtcgctgattctcttttcttcggatccttctagataatggctcgatctttctctcgttcactttctctatccaaaggccgtttcgccgncgcgtcatcctcttttcttccttcgtcgcacctttgttcattccgatctcaatcttccgatcgtcggggagatctgtacg

SEQ ID NO: 54180 - DNA, 903 bp, Arabidopsis thaliana landsberg
gcggaatctgcggcgagttcttccgaaagtgagaagacaaggcccatgagatgacacatttgagtgaaacttgagaaaactattatcctgaagaatcaagttccattttttacaaacagaccggattcgaaatatcataaacggtggaaccctagctaaaatctcattgagcaaatcctctggaagcattgcccatataccatcttccatctgcacatcagcaacaacttgtttaccaaatgaagcaactgtttcttcctctagaccacgaggcttcgtcttcaccactttctgcctagaaggactcgtgtttctcgacccaactcgacctaaaggactagtatttctcgacccagaacccttcaatggtgaaacttgcttcgatgaagtactactctcttcgtctccattcttagcagatgcagagcaagccaacgaatttccagaatccaatgacttttccacactacccattagcaatccccaaaatcctaaacgctccattcaaactcaaatccaaaccattagctatatagacgacttagatccccaaaacccaacgaagatcactcgatcatcgaccaaacagaagtatcagatcctcgagcaaaaaacccagcagaagaacaacgaagtggccacaaaggaactcaaaactcaggtagaaatcaatcggaagctacgcaatcagctagcctggagttggagcaaagattcgaactttggatcagtaattagtaatttacctcaacatattatgcaacaagcttcgtcctttttagtaacacgaagaagagagagatagagagagagacctaatacaatttctttgtagcttcagttccgaggaaaggaaacaaatcaggcttgttacttctcaacaaaagtaaggggttaaatggt

SEQ ID NO: 54181 - DNA, 785 bp, Arabidopsis thaliana landsberg
tatatacacaaacatagcatagtttattactaacaatgagtagtagtactatgtttgacacattaatatactcaaaattaatcatcagatcaggttaatattagtgattaacaaacaacaaagaagctaattaagacttttttttcccacagtacaactctctgactgtgtaactcactctatcaactacaagattacaaaagaccgttagatttcatctttgaccatttgaaatctcaagatcaaatctcagccgtccattccaccgttaccaatctctctctttcgatataatcaacaaattttctaactttttctcagtgtcctttctcaatcagaagctttaccctattttctctatacctcccacgcaatttctctcattcctttctttgtggggttttgtttattcttcacaaagttaacatttttagactcaaaactcattcttttgcccttcctctgtttctcctctctttgggtttatcttagattctccaaaaagtctctttcttccatggcttctcttctccatcttcttctcctttctctttctcttttagttcttgcttcagcttctccttctcctccagctgatgaaggtgagattcttgtatctgattcaatcttgtactttgagtttcagattcaatctttactcccaaatttgaaaattttgatttttgcatgtgttaatgttcttctagaaaaccaaatgttccactgttttatgtagccataattccactgtcagtgattaatgaaaatagctttaatataaacta

SEQ ID NO: 54182 - DNA, 779 bp, Arabidopsis thaliana landsberg
aaggtaaaacccaaaacgaaatctaaagcccgatgttaattggattagcaaaagttagtaacaagattcaaagttttttctctctagaagatttgagagaattaagagagaaaaaaacttatatggcacaaatacatttaagattgtattttggtgagcaatttaaaccaaaataacataattctcataatacattcaacacatacattaaggagggtcaacattatcgaatcgagatccacccaaattaattttataacctaaccggtatagtaatttgccttgtatataaagtttttggaaccaacccatttaactaaattcacaaaatataataatttaaatttaagtatattaaaactataatatgaattaaaattagttagttatctttatttttattataagtttttgtccaaaaccgatcctaacctaaattgaaccaaatgaaaccacataactggatgcagactaatcaacaacaatcgcacgtgcgtctgagaactcgtcacgtgaccactccgctcctttcttaggctaggagttttggatgatgaaaaataattacgaccgcgttaattataaaagtttatagggtatacgaaatatgggtctctctccctctctctactgaccgctctctgtatattcttctccgtcaacgataccaccccagaaacgtcggcggtcaaaacaatcggcggagctctctcgattaaatagacaagaagtttccggtatctaacttctgtgcgccagagacaagttagggttgatgt

SEQ ID NO: 54183 - DNA, 906 bp, Arabidopsis thaliana landsberg
taaagtatagaaaaatcaaacttaaattccaaaaaaagatctttggatcataaatataaaaatgatcaaataagtttcaatcttgaagtcaaacacaagaaagtcatgttacttcagcatataagaagaagataaggaggacctaaatttccaaaggctgcatctgagaattacctcttttgtaatttcgttaatcctttatccactttttcttctctatttttatttatttcttatcttatagtatataaaaaataattgtaatattgttgtatttaatcatgatccagctataaatgacacagttgtcaaagttcaccatctttgctttcccttcactgctctctctctttctatctctttgttgattttgttttcctcaaattgcaaatcaaagctttctttccagctttagaacacactctcaccaacaatctcacccaactttttttccttcttttaactcctcactaattcctaatcccacaaaccctaaactctatctctttaatcccttccttacatacattattcagtagttgagtaaagtttcaatctttcttctgattccttgttggaattacctaaattttctgggtttattttggtgggctcgtcgagagatacttcaattgcaattcatcgttaagcatatctatgctaattgcgttctcttctttatttcactttctctttggtttgcttcaatatcaaagcaaagagggaccttttcgctttgcgttcttctcttctaatcgaaaagacaagagcttagtcaccacattctaaggtaatttcatggaactaaaaaaaactgcttttttgtttttcaaggattctactttcggtagcagtttatgattcttctgtgtaatgtatatcttgcttcaatcgaaagtgattttt

SEQ ID NO: 54184 - DNA, 953 bp, Arabidopsis thaliana landsberg
gcccatcatctaatctttttttttgtacttgttgcaaagaataattcaatgatatttcttaaagaggatatttctatatacatataaatgataagcttatctcagcattccaaattgatagtgcgctttcaaacatattataaaattttcagacatagtttactctaaactcggtccatctctgcaacaaaattaaaaataaaaccgtcctcaccaaccacaaatcttatatttaaaaattgaatgcatttaatatttaaaattgatcactaataaagaaatgtaggtaatataagtatataacaagctgtataatttgtcggcaaaaagatataacaaaaaaaaaagcatgtacatgtacatgtacatatatgatatatctaaatgttgagcaataacaatattaaagacgtaataacgatatcatttaatctttgcccactcgcattggtgacggagactaaggcaaaatctatcgaaatttgtgaccattaaagcccgtcggtgttcacttttttagtcagggaccaggagatcaccgtaacgtcgccgtttcgatatttgcacgatcaaactcctttttttattcttttttggtcattttcagatttttccaaattgaaattcttctctcttttttttgctttcttttctttatggcatcataaatttttttaagtcgtaatctagaggagactaaagattcttcattctgtgtcagtggctcacatcctctgattgaccaaaacgcacacaaacaaagaagaaaaaaagctatgaaaacaggaaaaaaaatcggaaatatcagtcttgtctaaaacgacgaagaagaagaggaagaatcgagacaaacatttcacattcccagagattgtgctgttggtgggtattcattctatctctctctcacattactttgacgaggtcttagtgggttggtttttcaaatgctg

SEQ ID NO: 54185 - DNA, 572 bp, Arabidopsis thaliana landsberg
cgccttgaggttgaacttgcggtcccaggtccatttcacgtccttggccgtgaacttgttgccccagttggttacgacgccctcgcgcagcttgaaggtcgccttgcggccgtcgggcgccacttcccagctctcggccaggcgaccgcgcagggcgaggccgttcggcttgtcggcgtggacgcccgtatcctcgcgcagcacgccgggagcgtttggatcttccatcttctcgtagccgagcatgtattcgcagagagcgccaagcgaatcgatggagccgaggctcacgtcgaactcgatgtcgaggccctgcggggtcgccggcgctgcgatcaccagcgtgctgttggcatcctgcgcgaacgcttctccgaaccgggccgtcgtcgaagcatgcgctgctccgccaaccgcggcagccgtcttcaggaattgccggcgcgtcggcgccaagcggattctcgtatggtcatcagccatttccgttccccttgattgcgcgaaaaccgcgccattgtcttccggtcttggacagaccaagattaggcatttggcattaatgagcaatt

SEQ ID NO: 54186 - DNA, 382 bp, Arabidopsis thaliana landsberg
aatatactcataaagaagctgtccctgcccaaaacgcctcagaaaccgctggcggcgacagaactaattttttttgagctgcttgagcccttacgcgcccactggacactgtatatggactaagtctcgatctccctgttaccttttccacgaccaagcaacaagagcagaatgcttctaagaatacatgatcataagccaacacacggtcactctacatcatgtatagaggctctctctatgttatgtgctaccggtcacatgacgtgggaaaaggtgggatgccattgataatgcgcactatccagagatggaattgcgttattacaaacaatgtatagttctgctacttcttctgcatcataagaagaatagggaccct

SEQ ID NO: 54187 - DNA, 655 bp, Arabidopsis thaliana landsberg
cttttggcttataagcctgcagaaaaaaagccaccaagattgatactttccacattctaacttatttcaccaatggaaaccaaaaaaaagggagatcctaatagatcataacaacaaataagccaagtaacaagctactacacgggacataaactaaccagggtcaatagctcaagaacagagttacttataagatgaagaaaagagcaagagattcatagttacctctggtcccttcacgaagggccttggcgacacggaaaggagtctttttgatgccttcccgattgacatcttcatgaagaccttgcaagagaagtttgacagcgtcttggattgctaaagtctcaggttggtgctcgaaagcaagctcaatgcagccatttttcattccaatgtcgagctccagattcaaacatccctcatctaatgcgcccatttgacaaagccaccaaccagatccgaatccacaaagggaaagtacccaaaaacaacaaaatcacaaatcagcaatactcgatccccaaaacgagaatccgtacaagttggtgactctttttcaaatccggaaatctaacgaatcgagtggttgatgtaataataaatcaccaaatcaggtaagagacaaggaaaataaaaaaaaatcgaaaatttg

SEQ ID NO: 54188 - DNA, 545 bp, Arabidopsis thaliana landsberg
attattgttgttgtaaaccataattttccttaataaatccaaagtaactgcaatagtatgctcatttttttattttgcgtaacaagtaacaccactgtcttctatacatgtatcttgtgataccattcatggtatattcaattattatcggatcaactttatcatccagttcattatagtgaaagttactctcaaatgtcaattctcactcaacattcagcaacattactccaaccattgttttagaataatcaaggtgaagatttgacttcataaacactatatttaaaggtgttttgctttaatcaatttagatgtgtagatgcttgtagacgtctttatcgaattactggttgcttactgtttcaaatatttataatttgacacaagtacatatggtgttgtatatttatctaatcgtgactctataccaagacacaatagatgctccactttgagagctctggtaggtcagatggaatgtgacagcaaaaaaaaacatcacaccttatgtaatagactaataggtatgactcttggctttt

SEQ ID NO: 54189 - DNA, 765 bp, Arabidopsis thaliana landsberg
tggtcgtttcacactctccgtccaccatttttttttttttttttgtttctcctcctctaaaaagcaatggtctttcaagctccatcaatggctactactacttagcgtctacgaataataacccctttaccataagtccatagatttatctctcttcttctcaccactcatgtccctttctttgtcttcttcctctcaccgccttcaaagttttcatctttatccaaataaaaaaatcgtttcttttttagtttcttcttaacatatttaaaggcgtaccctttctcttacttatcctctgcaaagttatggctttgcttgagagtataatcttagggctaatcacaggatggttagcttttgttattgggttggttattggatgggcatggaaaccaagatgggtttcttcttctaataatcgacaagtcaaattacaatgttctgctccaagatcttttgatttgtctttaccatcttcttctcctagttctgttgttacttctcctttgaagggttttggatcagctccttgcttaaaggctcttgtttgtgatacatggactatggctttaagacaacagagacaaacagtttctcctgattcttcttcttcttcatatgattcttctgaacaacatttggatttggtttcaaggttagctaattttgatgattgtgatggattagttatagaaaagggttttgttttggtttgttaatttttgtgtgttttggttttttgtagagtgaagaaaacagagc

SEQ ID NO: 54190 - DNA, 509 bp, Arabidopsis thaliana landsberg
ggtcgccgatctcaatgacaagatcgaaaccgatgccaaaatcgaattcgtttcgcgcgatgatccccgtgcgctttaactgatccgccatgacgccgcccatgtgctggccgaggccgtgcagtcgctgtggccgggcacgcaggtcaccatcggcccggtgatcgagaacggcttctattacgacttcttccgcaacgagccgttcacgccggaagacttccccgccatcgaaaagaagatgcgcgagatcatcgcgcgcgacaaaccgatcaccaaggaagtgtggacgcgcgacgagaccaagaaggtgttccgcgacaagggcgaggccttcaaggtcgaactcgtcgatgcgatcccggccgaccagaacatcaacatctacaagcagggcgactggttcgacctctgccgcggaccgcacatgacctcgacgggcaaggtcggggacgcgttcaagctacagaaggttgccggcgcgtactggcgcggagacagcaacaacc

SEQ ID NO: 54191 - DNA, 1196 bp, Arabidopsis thaliana landsberg
ttggggtttccctggtttgctgaattcaagaggtggattccgttagtgagaagatatctgattctcattactcaaaaaacaatgaaacatagaaatgtaaacccacttccatgttcttctaaattacgatttttggaggattatatgaacagagttcaagattgtttttttctcttccataattcatagcaagttgtagagtgattctattagaatccttatcactattggtcaaatacaagtaaagttgtttttttcttttaggaagaagatttgcagtcataaaggacacatgaactttacagaagattccaacttaacaatacagtatgtgatgatttgtgacaatcacatttttttcttatgcataaagtaaagataagacttggtcagataataaagaaagggtttaaagaaacactagaagcatgtcagtacaaaaaaatccaactaacttcttttgttgcacccatgttataaaggaactaactttgtggtacataaagcaagcaaaacttcggcgcttcaactcctcctcatttatgaaaacccatttatgcaaatattgtgaaaagggagaaaagatacagagtataaggagattggtacaaattaagaaagatgtgaaatggcaaaagagctggagaaacttgcaccaagatcgtgaggtatttatgctacgacaacatgatatattggatcatgtgctttcaactgataagtactatatatttcaataacataggtagagagaattaatgttttcatttatcaatagtgtcctctaggtttatgatttgatagaatgtgagttaaggaaagacttggagctgaaagagatactaaaggagaacagaagtcctagaattctggcaaatgctacgtcactacgctatgatgaaggcaaataaatgtagggaatgccattgtaaaagctaaaggtcaatagtgggaaaatttttatatgttgcctcttaatcggcttagagctaaatttgattttacattaatgttcttcgccactaatactgttttctcctttttgcttaagtttaaacgcaattcaaaacatttttatttgatttaaacgccaatttacacgttgaagcgtgaaacaaaaacaacatttttaaaattctctgtggagtatataaaatactttgcgtaataataaccgtcaacatattttgatatat

SEQ ID NO: 54192 - DNA, 746 bp, Arabidopsis thaliana landsberg
caaatcccgcttagaagtggcgaaatcatcgatgaaatcagatataatgtcaaaaggatcatgagaagcttcaatctcagaacctccttgaagaacaatgtgttcagccacaaaggtttcgcttctacgagtcaagtactctatcatttcttttcgaatgtcagcagcaacagaaccaggactcctgaagatatctccggtagtgttatcgacacaagcagtggctaaaccagggagaaaaacctgagcaatcttgtgaactacttgtgtatcgtaaagatcacagtgaaaggaaggtcctccttctttctgatcttcaatactctcaagatccgacacaggaggatccattgcctgtatatcaaaaatcgtctgcagaaacacacacaaattgaatagccaaatatcatcactagatcagattaaaaaaaatgcaaagcattgaaataagacacaaactccataaacaccattaatcaaaatctctactttttttttcttctggaatcgctagatcagtagaatcctaaaatccgatcaacagccaatgatcacgatccgtaaattgacaaattattaacgaaagtttcagaattgagtcaaattacaagcaaaaagttcaactgttggattgataaagaaatgtcaaaacaaaaaaacgagaattaccctagaaagaaatcgtgtcctaaacagacaatgacaaatcggagaaaggaactaacgaaagcctgtaaggaaatctg

SEQ ID NO: 54193 - DNA, 954 bp, Arabidopsis thaliana landsberg
gtctgcaggtcgactctagaggatccctacaaaaagtaaaacttttcttgcaacccaaactatccatttctttactagtccacgtacgcctttcaagatatcaatctcttcaatatacttgtcaacatcccctaatacacaattagtgagggtctaacagttacaataaacgtgaagactgtaacgagcatatttagtgaagagtttattcgaattgatgactgtaacgatcgagcactaaaactattcaccaaagtatttcaaacattcataaattatttactaagcaaacaaagaaacgtgaaaaaaaacaaaagtaacattgatcatttccttttaacaacgtaatcaaatacgtatatttttatgcatcggttttatagagagctacatagatatttcatatctctctctagaagaaaagagaaaacgaaaaccaaacccacgcgtaatgttgatttcaccttccactccaacaaaccagcgcctctccgaatcacttcaaaagttttgaagaaaatcaaaactctataaatacaaaaatctctctctcggcaaatgaaacgtgtgtgaacaatccacggtggttattctcacagattagggttacgatcacttacgccgccgtcgacatgtacgtttccaggagaatctccgacgtcgatcgtcgtcttctcctccttctcatagtcccatctctcaccctcctcgtcttaatctctttctcatctctctcacttgatccttttccaactctagcccctcttcgtaacctaatctacactcataccctaaccgtcaccgatttcaccgtcgaattgtcagattcgaaccctaacgacgttatccaagcggaggagatggaaaatcgacggcggaggaagagggaggagttggttaagtcgaacattgcggcgcgtatggttggaggagccctgcggattgagttaccca

SEQ ID NO: 54194 - DNA, 579 bp, Arabidopsis thaliana landsberg
ctttaagctatggtttttagttacttgtgtacaattcaatccattggatgaagattactttattagtttctcccttgatgccaagatccgtatatggaacatatcaaaccgtcaagtagttgagtggaatgatctaaaggaaatggttaccgcggtttgttatactcctgatggtcaggtacgtaattctcttgaactgtcaccagcatatacttgcattaacgagctcgtattgatatctctatgctctttggtaggctgcatttgttggttcaattaatgggcattgccggctttacagtgcagagggtatatatgctaaaggctcattctatttgtaaaccatgtctataaccttaattcttcataaagttaacagactcattttatttgtttttctgtaataattgatcagattgcaagttggaacaaacaaaccagatagatctgcagaacacaaagaaggctcaagctaaaaagatcacagcttttcaggtttcactctctttttttgaaaacgtttacattgctgttgttttttttggctctacttaccattgagtttgcttataccagttt

SEQ ID NO: 54195 - DNA, 1241 bp, Arabidopsis thaliana landsberg
tgatagagtcatcaaatcactttattatcacttgtttagttgtattagtcgttctatctgttgttttatattgtggtaacaccaaggaatgatatttggtactgaattgcagagattatggactttggctatccacaaaatctctcccctgaaattttgaaactttatatcactcaggaaggtgtacggtcaccattttcatcgaaggtagaggcatctattcgtttgtgtatactacagattttggaattgtgttggtgtgtggttctctgaagtgaagcagtatttcccgcaagaaatagagattatgttgcctcttcactaatacgtttgcattaataagctttttttcattacagccaaaggacaagcctgttccaaatgcaacattacaagttacgggtgctgttggttggagaagagagggccttgcttataaaaagaatgaggtgagtgttgagtttctttctgtgtgtatataggtctgttaggttgtgcggaaatgatgatatttttcattttctaaaatgcaggtgtttctggatattgtggaaagtgtaaaccttctgatgtcctctaaaggtaaataattgccttttctgaagttttttcaagttgtctttcttcttgatttgcttcgtatgactagttttgcacgatatggaaatgtttaggcaacgttcttcggtgtgatgtgaccgggaaagttttaatgaaatgtttcctttcgggaatgcctgatttgaagttggggttgaatgataaaattggtcttgagaaggaatcagaaatgaaatctcgcccagctaagaggtatgctttgttaaaacagtgaacatcagtagccactgacttttctttgtgctaaatgactctcgttttgtgcagtggtaaaaccattgagcttgatgatgtcacatttcaccagtgtgtgaacctgaccagattcaactccgagaagactgttagttttgtaccaccggatggagagtttgaactgatgaagtaagttttcaaatgtctgctgttgcaaattgttctggtaccaaatgtgtattaacttgatgatgtctcaggtatcgaataacaaagggtgtaaatctgccattccgcgtgttaccaacaatcaaagaacttggtcgtacacgcatggaagtaaatgtcaaggtacataacctttctcaagattacaggaaacaaaaaaattggcttgatctttgctctctaacaaatcctttcct

SEQ ID NO: 54196 - DNA, 365 bp, Arabidopsis thaliana landsberg
aggagaaacggaggttgtggtggcggtgctggcggcggaagacacggacgttcctgttttgacggtagctggttgctggttcagtttgatgaagcattcattgctgggcaccaccagcactacctgcactacacagatagacacagtcatatagacagactgcaaactgacgctggccacgcacgcacatatacgcttgatgagaggaatgtgcccattgcatcaccttaaagacatagaatctcggtctatcgattttattggcattataacgaagcccctcctagttctggagaactgctgcaaagaagaaaaaaccatcatgttttttagacaaggatggtgtaatataaaactgcctacac

SEQ ID NO: 54197 - DNA, 1313 bp, Arabidopsis thaliana landsberg
gcctgtccttgagagttttaccagcttctgatgtttgattttcttctgcaatagtaaaattgtgggttttggtgttaaggttatatgttgcgacttataaacataatagtaaatataatagttcattggcattataaacataactatctttgtcaatggacatctgttttaaaacttggcaatatgttaagattggtttatgaatctatctgatgaatttattacttggtgtttgttattgtaattcagatgggtattgggaagaagtggaaggagatacttgatgtcaccgacaagataactttcaataaccatgtaattacacttctctaaagaagaagctatcatctttttgtacatgttttagatctcatgtggcttaatatatctttgtctatacgcaggatgattccagaagaagccggttcactgtctgaagaaacgagtgtgaagccagaggaagatgcaatatggctttttttgtgatactgtttggtcggtttactcaaatagctgagacatttagggacattcactttgaggtgtaaactctacaaagttttctgtttcattaaaatgattttttgttataaattaagttgagttatataaatctctttcgaaaccaccacttgttagacaaatacagagataatatactcttattagcaacaccctaatgcttctcttttgtattttgttggatcacatagtgttagtacatgtctatcgcatttgtaattatcactatatgaatttacaatcttacaagatcttatttctttgtaggtaaatttcaagaatctggtaaaaaattgatttagagcaggattccacgattttcctttgtattatttgtttttgtactgtgattttgaacctttttaattaatactgttgcagttaagcagtagtttagtcttttattagttttatcctctttttatatagccgtgagattatgatttcttcttcaggaagagtctataccattttgagtttatcttaaagttgcttgaacaaggagatatggtcgattacaaattgtggatcttccatctccgattcacagtttttgggtcctctagaatggttcaaaaaaccttatagcaattcgttttgattatttaaatattcacttacaagttgcttaaatctattttaggtttaggatggactcatattgaaattataaatacaaacaatgtgtcaattggctgctgaacttttaaagaatagagattttggattaaggaaaaaaatttgattaagatttttagtatatgtttataaattaatactcgatagtaaat

SEQ ID NO: 54198 - DNA, 979 bp, Arabidopsis thaliana landsberg
gactctgtacatcagtatctagtaccagttagtttgatagagagatggggaaacgcaatggacattgtttaccctgattcaaagagatgttgttgtttcacaaagagttattatcgatacgtgaagggcacaggttccctattggcaactgtccaggtacgttcttccatggagtatacaatattactttcctctgtatttgcaaagtgaaaagaaatgcttatcgtgaatctgtgatcacgcagccaaaaatcaagggtaaggaatcttgtttgaaggagcaacggcttagatacttcacccctagagaggttaagcactgtcctttacttttactaccaatgcctcactgaaaaagtcagctttatttcattgaaagatgatgttcggtttctatttgtttaggtagctaactttcactcattccctgaagattttgagttccccaagcacataagccttcgacaaaggtacgctgttcataccgtcaacaccatctaagccagaaaagctactgtctatatagattatgtgcatccaagtataacagaggcaccgttttgattcgaatatagaatttaacccataatacccttatttctcccgtacttcctgtttgaaatgtggaaatagttgaacacaagaacatgaatctcatgaactcctctttgtgcagatacgcaatgcttggaaacagtttaagtgtagcagtggtggctcctctgcttcggtatctattcgattcttgactacacaatttgatgcactaagtgacgcgaccaattaccggaatcagttattctcctgaacaagcttctactacttttttgtttactgataaagttcaaactgatgaacttacgttttgttatcgatccttaactttatgggccagtattttaaatgcggcttattcggccggttaatcataatttcttacgcaaatttccgtaaaaagtgaccataatattggcatgag

SEQ ID NO: 54199 - DNA, 552 bp, Arabidopsis thaliana landsberg
gatttcagagtataaagttgtaccttcggcctcttcgctacgtccggtcacaagaattgcgctaccggttatatttttgcgtttgatgagttcgatgccgattgcctttgaattcaggtcaaaatcaatcaagtaaaggcgatcttgtgacctgctagtctttattgcttcaacgaaacattgtggatcttccgcaaaatgaatttgcagagaaaggttcagacaatcattagatgcaaatcgatcgcgccaagcttggtggacggtctgatcgtcgtccaaaataaatatcttcgaatacgctcttacggcgagatggcgctgaactacgccgggcgtcggtactatcggtattcgaatggtaactgttgttccgactccctcggcagaagaaaattcaaaacgttcttttatagactccagagtttctactgcatgacttaaacccagggcaaacccggaatttgcgattgcttcttttccaaacgagaatcctcgttgccccactttccgcagtactgaagccggaaccccttttccattatcaaaaat

SEQ ID NO: 54200 - DNA, 571 bp, Arabidopsis thaliana landsberg
  unsure (1)..(571): unsure at all n locations
tgtttgttgacacattgattacttttatgcagctaaagtgaggcggctttatgatatagcaaatgtcttgtcgtcaatgaatctcatagagaaggtaagtcaaagttatcaatagctacaacagttgtgaaccatctatgatttcaagctgtgatttaagtcttactagtttctgtattctctggtggcagactcacaccttagattctaggaaaccagctttcaagtggttagggtacaatggtgagcctactttcacactgagcagcgatttgttgcaattggagtcnnnnnnnnnnnnnnnnnnnnnnnnnnnnnnnnnnnnnaatgttaagagaagcaaatcatcatcttcgtcccaagaaaacgctacagagagaaggctaaagatgaaaaagcactcaacaccagagagttcttataacaaaagctttgatgttcatgaatcaagacatggatcaagaggaggttccattttggacnnnnnnnnnnnnnnnnnnnnnnatatccactgctggtttagaggatactctaggagagcttttgaagttgagaatctggattctgatta

SEQ ID NO: 54201 - DNA, 1281 bp, Arabidopsis thaliana landsberg
cttctaatccctctgttagtttcttccctcatttcaatttctcaattttacggatctgtgttaggttttacttggtcgtattgaaaaaaaaaatgtgtcctttgttgattcaaagagatgtaattcgaatgtgtatctgggttttgctgcttacttggtctgttccaaaacgttccatcttatcaattatcatcgagtttgctgttggatcttgtgaaaaaccaatacaaattagccatttttgtcagattgattgatcttagaatcataattcttattccatttggccataatttagctgctaagtgacgaagacaagtttcaactagcttgtatcagttaaagattagagttttgatctgttatcgaaggtttgagttttttgttcatgttttcttgcagaagatggttcctaccacctatcgtcctactcacaaccgtacacttccaccaccagatcaaggtgaaacaaaaaatcgtgcttttttgaaaaaccttgcgtgttttttcggctagagattttagaatttcgttacattttatatatagtgtcaaagatttgtcttatgaagttgtgatcttgaacttgctttgattgagtgatttggtttctgtctttactatgtatcactttttagatcttttggcaaattggtgttaatcagattcaacagtctcgagttttcacggatcatgtcttatgtttttactaatttgtatcttgtttgttatggttgtagtgataactacagaagtgaaaaacattcttatacgcagcttctatcaacgagctgaagaaaaggtgaaacagctctcaactctcattcctcatagtttgtgattctttgattcaaatctccgttgtttccctcgtatatatagttcataacacaggatttcgtaggaaaatagacaaaagaaaacgatatagaacaaatcttgaacttcttcagataacaaaactgttgattttgggtgtgttatccgaaatcttaattgttttttgtcaattgcagttaagaccaaagagaccggctacagatcatctggcagcggagcacgtgaacaagcatttccgtgctgcgtcttcttcttcatctactcagggcttataaaaaacttaagttcaagcctataacaatggtcatttgtatgagtacctcttattagtgttttcaatgtagagaaaagaaaagataagagcagttcatgagaggaatgtagtgaaaatgtgtgtgtacataacattaatgttacttttatttcttgacttaaaagtgc

SEQ ID NO: 54202 - DNA, 609 bp, Arabidopsis thaliana landsberg
tgcctgagcgcatctctgaaacaccaattgttttgttgctctgtatgtctcgcactaacagttttgtgggagattcaacctttgaagcaccaattgtgctaaataatttatgaaatccttggctgaatttgaatatgacatagataattgttcactctggtttcccctcgtgttagatagggcgcccgaagcgggcctgatgtagggatatgtttgttgatggagaaaggatcaaaggagacgaaggaagtcaccatcgggctttgcttaggcgacctagggagtgttcctttggtattgctcctcacagtctttcccaatctgaaagtgattctgttttaaaaaattccatctgatgattccaaccaaaaatcatagtagatgctaatgtcactatttcagtaggttgttatattcaatgttgaggagaaaagccaacttgcttatgtaaaattgacatggtgcagctagggacgttgtggcgaccttgaatgcggaggaaggtgacaagctcgcgaagacgttgtggctcggctcgctctttagtgtttggtactactcaacatctataataagtaggttagtggacatatgcctgtcacattagat

SEQ ID NO: 54203 - DNA, 1308 bp, Arabidopsis thaliana landsberg
aattacgtgtatgatgattaaattaggtgtactaattttatttgagtttaatgttagatatggatttggagcttggtctgaaagcaaaaaagctggatataacttagtagatgccgtttcacggtcaacagttcaggttaagccatatctaatctcgtaatttaaagtattaaaccagtgattagttttggttaattgattctgtgtgtgtttaggtttatccatattcgtggacagcaatattgatagctatggataatcaaggaatgtggaacgtgagatcacagaaagcagagcaatggtatcttggtcaagagctttatatgagagttaaaggtgaaggagaagaagatccttcgactattccggttagagatgaaaatccgataccgggaaatgtcatccgttgtggcaaagttcgataataattaattgtctgaaataataaaaacctagaaaagtctattttaattagcaaaactaaagaacgggttaaaggaatgatcagagagtattaggatctgtgttgatcttagggtttgtggtttgattgcgattcgaatcacttgtgtattgcagaagacggttggtaatttaaagagatgatcttagggtttgaggtttgattgcgactaaagactactagacgatgccgtttagattttaatgggctcacacagttgttatctgcaaaccggcccaggtctgttttgacttggtgagtgctaacgtgctctataagaagatattgtagccacatacgaacagctaacgtgctcccatttcctctatgttcccttgagtgacatacgttttcacaataagttgggagcaagtaatttaccaagaacaaatatatattttaaaaaatataggatccttttacaagttcaattattgattttgacgttacgtataaacagtagatcgaccatgacataaataaaaatgaaaaaataattggatcaaatctcagatcttactacagtctacatctacctagctacatgtgctatggcattatttgtttttcatgttatcatcaatattgtataatagatccaaacacaatcagtgtgatgctatttttctatacttttgatcattcaaccgatttcaattattgtgttttatcgtttacatagaaataggtacatatgcattcaagatctccagaacgtttattacgtcttgctacatgtgctatgtcactaaaacaactaagatactacatgcaaagttactgtattcattacgcattgatcatcttcttctacgcactattattgaattttttgtttctcgatg

SEQ ID NO: 54204 - DNA, 597 bp, Arabidopsis thaliana landsberg
  unsure (1)..(597): unsure at all n locations
taagaagtattaatgggtccttcattgttttgatcccgaagaaggagaatccatagaaggtgggagattataggccaatttcgttattaaacaatagtatgaaaatcctaacgaagcttttggcaaatcgtctgcagtcgttcatgtctcgtttaattcataggaaccaatatggtttcatcaagggcagatctattcaggattgcttggcctgggcttatgaatacattcacttannnnnnnnnnnnnnnnnnnnntcattgtgctgaaactagacttcgaaaaagcttttgacactgttgagcatgaactgattcttcaagttttgacccacannnnnnnnnnnnnnnnnnnnnnnnnnnnnnnnnnnnnnnnnnnnntttctggcacttcttcggtgttgctcaatggcgtccctggtaaatccttccattgcaagcgaggtgttaggcaaggagaccctctttcgccactgttgttcgtcttggcggctgaccttcttcagagcattattaataaggccaagcttttgaatctgttgaagcttcctttacctgctattggtgcccagatttccgattgttcagtatgcagatg

SEQ ID NO: 54205 - DNA, 1454 bp, Arabidopsis thaliana landsberg
gactcctgtgaagtcttgttcttagtcttgttcttgatagcggcctctgtttatctttttatgatcaagattatatatgttggtgggtatgatgttgtgtaaactatataggggaaatattatgtgaatgcagaaaagaaaaaaggagactatataatagctggagggggagatgtcaaaaagtctttgtaagaaaagatgtcaaaaagtaggaaagttgtaataaaatagaaaatcaaaaatcaaaaagtaactttagggaaatttaaatgttttaatttattaattcaacataagtaaatactatacaatagtggaattaagaaatggtagagaagataaggaagactattgcacacgcaagtcgtcaaagaaatttctcacaagttttttcctagctaatattattgatatgtgcaaattcaattttcttttctttcacatcgggaaatacaaatacatattttaaaaagtactttagtctttctttacactaagttacttatgataaattaaatatattatgtattggatcttttaactacttctttgcagttgaaaatgaaaggatgcaccaaaagtagattgaaactaagtataagggtaaaagttcgttatggtaggtgaacaaaattgccaaaccgaagaaattctactccggatccggtaaacttattaatcccagggtaaaacaataagaaagataatacattactctaaagagtgatatcaaagattgattaattgaaatatttgaattacctacacagtcgcttaataatcatatcattacgtagtattttctattttggtcacatgatacatcgttaatacttaatataagtacttttcgagtttctgttatattacaaatgggaatctaatcttaacaatcacgatgaacaatctacaaatgattctataacggtaagttctatctgcatcacaaaaatatctgatagacgattctattcacataagatatattctgagctaaaaaaaactagacatagacatatattcattattgtgtccaatttggtaaaactgattttacaaaaaaacaattaactttttaagaaaatgaaaatacattttagtcttactaaaaatgagcttgagtagaagaaaccgaagcaaataatgtcttttgctttggtttcgatttatatgttttcttgaacagaaatctcatacagccaatgaactgtggttaaaataaaataaaaagtactaataattgactgtatacttcaattgaaacttaatgactgactcttctagacgaacgaaaaaggttgactttagttgagattggacattagggttttaaaagtcaagcacttggagaaataaagtcataagcgattcaaattattgagttttttcctcattggtatatgttattttatacagaattatcactgaaaaagttgataaagttttttgaactt

SEQ ID NO: 54206 - DNA, 1038 bp, Arabidopsis thaliana landsberg
aatcggcagcagcaatagcaacctcgtttatagcaggtacatttgcttggcttgtggtggtcacagcttgaatggtttcatcgggaacaacctgggtggccacaaagtcgataccatcaactttatcagaccattctggtggtgtagaactcatatgccgacacgaagacaatccaagacccaacggaccagtagcaaacgactgataatgcctatccgcaaacatagagctaagcttattagtcccattacgtgctaagacttcacgaatcattggatccgaagaaccagatttagtttcatctctatcatcacgaattagatgaccacacgatggataaactcgtctctgtagaagattaactctcttcgtgattccacgcaagcaagtagccataactaagatcctgctaacaaaaagagagttcttatagcaacaacaaatacacaagagataaaattcgaatcaaaaccagtctaataagttcctcaaagatcatcaatttctgcttttacttgtacagataaggattcatttcaagcttcacaacattttcttgagagagcacaacgagaagagtgagaaaccgaaagtttcaaaattacctaagggattgaaatcaaaactgcattcacagttcggctgagtcgactcgtagtcttagggctaagacctgagagagcgatcaggacttcgcgtctctctctacctgacgacgaccatcgcaacaaaaaacgcaccgtttcatctgacaaacgaaaacgaaagacaaaacgcggcgtttcgtctatctaaccttaatgggccttaaaacccagttaattaagcttgcaggacaaagaaaaacaaaacaagtcaatttaaattagccgccgactcgagaagacttgggcatcaggcctaaaactttctataggcctaacggtaaaaaaagagagacttatttcgttatcacaacaaaactaaaacgtgctttaaaacccatatataaatttttaatctctcttctctgcaaacaaaagaatcacatattaatc

SEQ ID NO: 54207 - DNA, 482 bp, Arabidopsis thaliana landsberg
tgacgggtaaacacgggctccgcgcgcaaataaacttgaaaacaaatattatgcttactacgttgttgttattgcattttttcgctgaatttccgtgtaaatcatttcacgaaactttaggttgggccacgcaaaaatgcggcgccggccgctcccgggaacacgtatccgcgcgcgtcgttcggcggttacggcgcatggggttaaattaattgcgcgtgagattgtaacttcgaagttatatatttagtattgtgtcgttggcgtttaatctcgcctgaaatttcaaggaatagtggggtgcgatgctggaagtgagaactctgatcgtcgatgattcccggcaggatgtcgatctgatgctgctgcatctccagcgcgagggagtgaaggacgagcatgagctcgtggattcggagcccaccctcaagagcgcgctgtgccgggattgggaccgagcgatctgcgacttttgtctgccc

SEQ ID NO: 54208 - DNA, 850 bp, Arabidopsis thaliana landsberg
gaagagcaaataaagacctgatcaggtttatcatccatgcttggggttctgtatcattcacgcatcgtaaactcgccacttctaatgcgagagtaacgcacaaacctgcgtttgtataaaggaaaatgtttgttaaactaatggaatctagtgttacgaatattgtgtgaaatagggattttggaatatggtcacttaccaatgtaaagccttggccttatgatataagtttgttttgtgcttgtaaacatgtagatgacaaagattgacaagaagtagatgacaaaggcttttatcactcgcgactcgagaagcatcgcattgtgcaaagcaaacagcttatccaaagctacaaacatgtttgcttgtttagcctcaaacgctacctgcaaaaacagattgttatatattgattttatgtgacatttgcttgtacagcttttgaatatttgttaagatttgggaggactgacctgggcttccaacattgattttgaattttcaaacaagtgatcatgaacctcctgaagcttttcttgccgctttgcaagatcttcttgttgctcctgactaaattctttcaaacgttgcaatgtattcctacaaagttgcagggaaaacagaacacaattagctcttggagaaaagtgtcttgcctttgaatttaaactgataaaatgtgtatttgaaacttacctactctcttgcagtgcctcagactgaaaccgggtaagaaactgaataccgtcaagagccacggtttggccgtctaaaagcttctgttgtttatccaacgaactacgagtctttgttccgatgtcatcggttgtactctgcaaatctcttaggg

SEQ ID NO: 54209 - DNA, 392 bp, Arabidopsis thaliana landsberg
ttaagactattttctatatggtctgaaagtgcaattcagattttgttattaagattgcttatcataattatttgcttattgcatttgtttgtttctgaaatcatttatgcatccttagttaaaactgaaatgtttatcagtaaatcatataatgctagtatcatagtatgagacattttgattgttgttgagtagtcttttgttactacactccaaggacaataaccattgttttgatgtgggattaatagataacagttccttggtaacataattacaaaccaaatgtagaatatacgaatgtgctatcgtcttaaactggactcacgcttatccagacactcaaatgtcatgcatttgcacaaaggtacactgtctcaattcatggtcgt

SEQ ID NO: 54210 - DNA, 920 bp, Arabidopsis thaliana landsberg
accacccttttagcataaaccctaatcccatctttataaaccattcacttcttgcctttttcttgcaaactcacagaaaagaagacaagaagacaaaaattaagaaatttaccgatttgaaaacaatggctctagctcgtctggctttgagaaaccttcaacaaaaactgtctcctagtttgatgggtcaatcttgtgaaagaggtttggtcggaaatcgacataatccaatgaagctaaacagattcatggctaaatcggctggtgaacaagaggataagatgaacacagaagtgagtgtgtctgagaagaaatctcctcgacagaatttcccccggagacgtggccgaaaaagcctctggcgtaacaccgacgatcatggctacttcactcccaccctaaatggtacgtttgtcattttagttcattattgatatacctatttagcagaaaatttcaatagtgtcacaataataatattttcgaaataaattatataaaaaaaattcaacatttaagtgtaacatatatcccataaaagaaaaattaagaagaaaatttgaaattctagaatcataaaaatacatcaaattttaaatttacattttcattgcattaaatctcatgaaacataattaatgtaaacctctatttttgcttgaattgaattttttcttcttcttaaaacagagttctttcctccgattataggaaatgctctgatacaagcaacagagaatataaacagaattttcgacaacttcaacgttaatccattccaactaatgggtcaagtgaaagagcaagacgactgttacaagctcagatacgaggttccagggctaaccaaagaagacgtgaagatcacggtaaatgatggaatcttgacgattaaaggagatcacaaggcggaggaagag

SEQ ID NO: 54211 - DNA, 553 bp, Arabidopsis thaliana landsberg
tcggctaccttcaccgccggcgtcgaaatccccgagctgacctttgtcatcttccatctcaccttcgcctgcatcaccccggccctcatcgtcggcgccatcgccgaacgcatgaaattcggcgccgtgatgctgttcctcgccatctggttcaccttctcctacctccccatcgcccacatggtgtggttcggcggcggctacctgttcggcctcggcgcttatgacttcgccggcggcacggtggttcacatcaatgccggtgttgccggtctcgtcgccgcgatgatgctgggcaagcgcaaggaattcctcaaggaaccgatcccgccgcacaacctgaccttcaccttcatcggtgcgtgtctgctgtgggtcggctggttcggcttcaacgcgggctccaacctcgaggccaccggccttgccgcgcaggcgacgctcaacaccatcacggctccggccgcggcggctctcgcctgggccatcgccgaaaagttcacccgcagtcatgcctcgctgctcggcgcggcatcgggtgccgtcgccggtc

SEQ ID NO: 54212 - DNA, 1257 bp, Arabidopsis thaliana landsberg
gttcacacgtgcatggacgtcgagcccatcttttattgtccaaagcttctatttaaacaactcttattggtagacaaacctaacctttaattaagcattatgttttaatgtttcatctttttatcaacaaatagcttgatttccggctattatagagtaatattatctttgaataaaacgttgttagatattaaaccatccatttgcatggtttgaactttatgaagttgaagagacgtgtatgtggacatgatagatcgtgatctttaaccgtttttcttatttatggttgtatgcttctatataaaataacgaatttaaaaactagtttactatttctttatagacctagctacgtgttttatgttacacacacataaattcattcgattataatggcttttgacttttctacaagtctttctttggaaatgaaactcgtgtggtgcgccttttgatttatttcgatatgtatagcgcatctcttcctctctaaaaacctctatataaatcaggatacatattctactcgtgataacaattatctagtaattaagttgttttcaatcttatgatattttttaacatggcatcaaaaccacaaaactagatatttaaaactttttcgtttgacatcactcgtcatgaatgatgaaggaaactagctagtacttcttttttttatctagctagtacttgactactggctttattctaattataatgcgtttgtactcgaaatacggggccatacatacatgcaataaaatttcggcgactgaaaatcgaagtatccttacatcacaagctagattgacaattgacggaccattagtgaattctctgttggttttattgagtacgaacaagatcaatctacttttttaacgtgttatgtttcagttttgagattgttaaagatctttggaataatataaccgtacaatattctaagattattaacggctctcgcatacaataactaaattaggaattggtaaactacaaacagatagtatgatgatgtaatgttggtaaatgagaatttggtttatgaaaaaaaatatatatacttttcataacaaaaaacaaaaaaagaagaagaagaagaagaaagaaaaatagtagagatatacaactcatctgtgacaaatataaggtttggaaatcgtcgtcgtggtaatgacaatgagcctagataatgtctaaggctatgaattcgaacattcttacctattacctatgatctatatggta

SEQ ID NO: 54213 - DNA, 581 bp, Arabidopsis thaliana landsberg
ctgcggccggatgcgtcgctatcatgtacgttcgctcccttcttcctcccctttccacgaagcctcaccggatgaaatcgttcgttattttacgctttacgagtatacgttatgttctcaattctcggaatgggatggggtaatggcactcaagggtttcgtgtgttgcgaactccaatcgcagcttcttcgccagggcggtacactgggtactccaacgcgcggccaagctctccatcggttgccgctcctacggcttcaattacctgagggacatcaccatttcatcaccgaagtacctccccgcctacctgctttcgtggcctctcattcctccacggtccatgccaatggcaatgccaatcctgacatatgacccatccgcgtttgcactgcatttcagggcgctgttgagtctatctgcattggtgaaattagacttggcctgcggaaaccgatcacccagctgggatttacagtactaacccatggcccaatcctgcaactgcaaatctctgatttggatgttgtctcaggcacctgtgaaaccactaacaagaagaaacccgccctcgcaaacc

SEQ ID NO: 54214 - DNA, 951 bp, Arabidopsis thaliana landsberg
attgcttgagacaacgaatccataacagtctgttcttcctcttcttttctagtgtctgacatacaaaggcaaaagcagggggtttcattttgacaaagctgagaaagaatcagatcaaacgaaaagaagaaaattaatcaccttccggaactggcataaactctgtttcttcatggttgtttgaatccagtcgaagtggctcatagtagtaatcttttgaactgcattgctgaatatttggtttttcgattatctgatgatcaagtgccaaggtcactctaggactgttttctggtgtgaagaactcagggagagcaagaatcttcccaaggattcttggtacttctttatccggtaagtcagcatctatgtctccttctgcaagcatttcagacaggtgtctcttggcagcactgtatatgccacacatactcttcttggaatctttttcactttcatggaaagtatcctctttattagcctcaccttttgaagcaatgtcaggcaagatttctccatccgacccgggattggtctctatctcttctcccaaacaacagttttgactcatgctagacgacaatgcatctgcatcaggatcaggatcagagtcatgttgagcattgcatggattctttccaaccgcaaactttagtcttcttctgattctactgagactaaagcgagaactgaatttctcatttttggccttgttgtctgtagaaggtgttccaggcgatgatccaacatccaaggtatttggttcaggcttcaaaattacaattgtttgggtctctttgattctctgagaatctcccgaagttggtgtaccgatattcaatgattcttctttagaatccaagacctgaaatgcatccaccaggttcttcttgcagctctctacctcgctttccttttgagctatcaaccgctttatcaactcgctgaact

SEQ ID NO: 54215 - DNA, 1342 bp, Arabidopsis thaliana landsberg
tgtggtgtttcttcttccctcatatatgcataatttgtagtacgtacgattccaaaaagattgaatttatcctaaattaatattgtatgacgatgaaattgcaagaagattgcgatctttgtttttaacaattattagttcttcattggttgataattcgaagaaaaagaagaattatggagttttgtttgataattatataatttcttgaagaatgaacctcgtctaatattacgctgttttgtcattcatttttcacgtgtgttttgtcaccctagaaagtagttaacaaatctatcataatttataagttcataaatcgcaattaacaattggttttcttgatgttccaaatccaaatttatagaagccacgtgagccatgcggtcccaatatccaaatacagacagattcgtatttcgaatcatctgacacgaatattcttcatggtgttgcaatgacgatacgtgtattcgttttcttcatggtttcaagaaattttgtaacaaatgctgaaagatgatgcaccaagtttctatcaaaaaaattggactgacttttatttttgacagccagcatttttctactgatctatatataatttaactagatatacatagattattttatattcgaatgtttacttttactttacatataattgaactcatactgtaaatatcaataacacttccatctaacttaagtgacttctaattttccaaattaagaaaaatccaagcatgaaatttttcatgaaacgtgaaagtatagagaaaagagtaataatcaattaacttcagatgccgatagtatataaatttgggatagctgccgaaagcaaacaaatatatatagttgggtccgatcatttcagggatttccttatataataataactaagcccattatagcccatagttgtatatacacacctgacattccacacaaacacatccgtggaacaaataatcggcccatgtatggcccattatatacaccacacatgacattttcaacacaaacactttgaggtccgagaagccctggaaatgaccgcgagattctgtctattcaacttaacgaccgtatgcacaaacatccttgaatcttcttccgtgttaccttgcggtatatcaacagtgtaagactgcaattccacactatacactctgttcttcttatcctggtccaagacgacgaactcgtggaccgatgtagccgaccggtaattatttaaccggtgttctcctccaagaacacgagaactcaagattcgtttctcttcgtaaagaacttccagtatctcaacgcttgttgacgctggaagaccagagaccac

SEQ ID NO: 54216 - DNA, 1129 bp, Arabidopsis thaliana landsberg
gaaacaacaggatcaattcgttctttttacctcgaaaaatgtagaaccatataaatgccttttcataaccaaaacaagaaacatttttaatactaattggttttaaaaaattattggcaggtatattctaaagtcatgtggtggtgtctcgctttcagtacatatatccaagaaagttgaatgaatgatgaggtgggacttgataaataaggaaatctatttattatctttcggctttgactatatatacacctacccctcgaatataaaccattaattgaaatatacaaatggttgagacttgaatgttcggaatgtaaaaattagagtttagagcttgacataatttgaaggaaaaaagacataaagtatgtatatatcgattaaggaaaacttaaatgtcatgatgccaatcttagtcgaacaaaaaaaattcgaattttaggacataacttatggaattgttggttttcttatagcctcagcttttaacaaagaaagagacggccactctaaaagatggtgcaatgtttttaaaaagagttggttataattcaccgctttataatcacagtttaagcatatgattgatcttttggtgacaaagaaaatttgaggagaaagtcacatatagaggaacttagaagatagcgaagatgcagcaagagagagatcacaaaagagattgttgcaagctcatgcctcaaactgtcaaggctttcttcaagtgtctgagattcagacgttcttcttcttcttcttcagacatggtgaaagctagagcaagaaatgtaaaaactgatcattctgtctctcctctgtaaactcaaggatactttctttctgctaagctactattatctttttttttttgtgtgttgcaggaagagaaagaagaaccttcatctatcgaaacttcaactaggagtctcaacgtaatgaggaaagggataaggaaacaaccagttagctcgggaaaacgaggtggagttaacgactacgacatgtaactagaatcttgatgtagaattggataatcttgtttggtagttactctacaacatactttctttgcatttcatgaatcatcatgatatattgatattaatatcataatttcaaatcaatc

SEQ ID NO: 54217 - DNA, 545 bp, Arabidopsis thaliana landsberg
  unsure (1)..(545): unsure at all n locations
acaatcattatccaattgtgtctctaggtttgttggtcccttgatggaatagttaaatgcatggctcttgtgtgtcgtcgtagtccagagcggacaaatataagttcagtactagtagaaagatatatgttgtctcaacgtgcaacatgtgatatatatcgattactaatattgtttttttttttgagattagtattatgttataaaatatataaaagattatatatcactagacagtggtatatgaatcatagaacacgtatatatatcgtctcaattataaccctttttcaaacaaaatatatatattatcaactattttgcttttatccgtgaaatgattgtacataattttggagcatgcatgtcttctcattactgaataattcaacctacatatcaatgggttaaaacacgttcgggaagttcttctacctgtgattaaaaccattattggatgtgccattctagttttatgatatgctttcattaacattaaatcgttgtataaataaatttncatatgcggctatacatatagacat

SEQ ID NO: 54218 - DNA, 557 bp, Arabidopsis thaliana landsberg
agatcgtttgcggattcgacggcgaggcaggcaaattgattgttgcggatgtgatcgtctgcgactccggcagacttcggttcggagccggcgacatgtgcaagcagtcctatcgggacggctcggccaccttgcccgaggtcaagaagaagttcgacgaggtcgcggatctcaccgatcgtttcgagtgaccggtcgtatgccacaacgcaagtagttcatcctcggaaagcccgaggccctcaagcacaatttcgcaagttactggtcgcggcgagtcacagatgagcatcgcctcgtgtacaagctggccgagaacgaggctgcgcatcgcagcctgtcgggatcattgcggatgacactgttgtctgccggttcattcgtgaaagcgctggtcggctagctgcaaccttgccctagttggcatccgataatctacattatgtcaaggtctacgtggcccggtcgagagtcggtcgtccgcttctcgatgatgctgcccaaggagtgactcccctgcaccttgctatcaccgtcgtgcaacagcgatcgtttga

SEQ ID NO: 54219 - DNA, 1209 bp, Arabidopsis thaliana landsberg
tggtccatctcacggcataaatatgctaaagctctgatgatttttacttgcccttttatgttaacttatcgagtattgctgttcttagagctatgggtggatctgttccatttgaagaagctctagctgcaagactttctttattcaagccttctctttcaaaagtagaggaatatctcgacaagagacccccaaggtattgattttggttacagttactttgcatgtgttgtgattttgatcttttggtatgatgcgagctaccttcccatgattcactctgctaaataaatcgtttcacttataaagatagattttacttgtaagtgttccattggcccatgttcttgtcttgaattagactttgaccaatagacatctagctggcttgattcctgcttaagatatgtccagattactttctcaagtttgttattatagtgtgtttctttggtttgtttaggctatctcctggcattgaagagttggtcaagaaactcagagccaataacattgatgtctatttgatatctggaggttttcgacagatgatcaatgtactctatctctctccctagtttcttcatgttctttactaagaccagctgcatcaattcttgtgtagaatactacaatcatggtgataaggttatgattcaatttcttttcactgtagcctgtagcatcgattcttggcatccctcgggagaatatctttgccaacaatcttctatttggaaactccggcgagtttctgggatttgatgagaacgaacctacgtcaagaagtggaggcaaagccaaggcagtgcaacaaatacgaaaggttcacggaactttattaatttgcaagctcccatatctcttcttaagtacaacactttgtaccaatgaaacttggttctttccagggtcgtctctacaagactatcgccatgattggagatggtgcaactgaactcgaagtaagctagtgacaaccgagaatttgcagactactctgaactctcacttacagtcttgaagtctctaaggtactatacttgcaggcacgtaaacctggtggagcagatttgttcatatgcaacactggagttcagcttcgtgaagccgttgcagcgaatgcagagtggcttatctttaagtttgaatctctcgtgaactcattggagtagaagcctctatagcgattattctcgtttcggtaaa

SEQ ID NO: 54220 - DNA, 583 bp, Arabidopsis thaliana landsberg
gccgggagataatgagcaacctccggaaaaccatttcgcgccgtctggtggaagccaagaacaataccgttatgctcactacttttaacgaagtggatatgagcgcggtgatggcgatacgcaaacagtataaagaaaaattcaaagaagtgcatggcgtgggtctgggctttatgtcgttttttaccaaagcctgttgctttgccctgcaggaatttcctgccgtgaatgcctacttggacggaactgacctgctctatcatgattattgcgatatctctattgccgtgagcacgccgcgcgggctggtagtgccggtgatccgtaacgcggaaagcctgagcatggcagacatagaaaaagaagtagtggcattggccgcgaaagccagggatggtaaattatctattgaagaaatgacggggggcacctttaccatcaccaacgggggcgtattcggctccctgatgagcactcccattttaaaccccccgcaatctgctattctggggatgcacaagatcgaacaaaggccgaaagtcatggacgggcaggtggtggtcccgcccatgatgtacctggc

SEQ ID NO: 54221 - DNA, 538 bp, Arabidopsis thaliana landsberg
gcatgccatgcaagaggatccccgcgtattatctctagacatgcgtacatcgatgcaaaagtatagagagaattaaatacatttcttggtctttgagccagaggtggttacgccttatatactgggacagaaggagtaataagtaacaacatagtgactggctggtgaaacgaatagatcaataaatctcaatgggactaaaatggattaagcaattgatgtgataccatggaacgttgagcagaaaatattgaattcatcactgccacatatctgcacataaatttgatgaagtgaaaactaggtcctgaaaaaaaactagaaactgcattgatgacgatgcgtgcatactgttcaggtccgtctggagatccctgcaggcacaaaatctgtatctcgtgttagtacaactgccgtggcattataataagtatgagaatactgactacaacaaattatgggccaaacaaagcattattcgttgacacaaatgatgggatagacgtcactcagaactctacactcacccgaggttgtg

SEQ ID NO: 54222 - DNA, 1131 bp, Arabidopsis thaliana landsberg
tttttcattttttggacaaactatataatttattttatgcatgatcaattttttgtatatatatttgcaactacgatagacatgtgaatccgaccacaattgttatcagacaggtcatgtatcacattggtgacagaaacaagactaagcccgtaaggtagcaacattgggctcaaccaaattcggcccatgaatttagactagagaaacagaaccggattaaaccggggattcggtacgaggagaaacagccgactgttgtagaaagaatatgccaaaagagtcaaagattcgtgactcatcatctctgtcgctgttccttttcttcttcttcttcttctccgttttttccaaacttttctctctgttacttacttccattattttcgagcttattcttatcttcatcgcttaaggttcgaattttcgaattcgatctctttttgtagctataccaatcacaaggtccgttctctactcaaatctcgcatattccttatgtcatcactgagctaaatcttttctgtattatgattcaatcgtgtctatgctttgtctctgtttctccggtaacctaattcgttgcaaaattaataattagatagaattcgaatctattgcatgcttaccagatcaattttggataaattgaatccagtaatttacgaaactcttggaacaattagtgttaatcctatgaattcttgttgctttaaacagttagagcaaatctaattatagatgacaggatcttaaaacgacttgtacctaatttctcaatctggcaaaaacttaatttattagttagttgattagtgttttttttgtttccacaattgcaatttattgttaatgttgaatgtgtttttgttttcttgtggtgattgtagcagtagctgaaatcaatagtattaagccaggctagctagaccagcaagtaaatttgctggctagcaggatcctcatgagccctcagagcgtatcgaagactagcaaatcccttgagggtgtccatggggttcatgttgtgtctcattcacatttcggatttgagagtattggccaagtctctggctttgagtctgcggatgcaggaacaaagcagagactattcattgagtaagttcattg

SEQ ID NO: 54223 - DNA, 1342 bp, Arabidopsis thaliana landsberg
ccacccacgatccgcatatgacattatgatcacaattcacaaaacatttttactaacaattatctaaaaagttttgacatgtatatgtaaattgtttgtcatccattgacataagattgggtaacgattgctatgtatgtcttaactactctataagttttttcaacggagttagtcctgataagatggggatgcttaaaacttcataagaccatatatacatcaattattgaattcaaatatacaaagaaaaagaaaaaaaaagaatgtaatgagagattgttggaaaaagtccaaagtcgacaatcgaacaaccaagtttcacataagtctagaaaaacttcaccaactgttagttgattcatagctatcaggccacatttgattctgcctcattcgttaataggtctcaaggaaacaaaactaaacaattagcaatcaatcatttagattttggttgtgtctgtcataacagtcaactacaaactttctttcattttcattattttattaaagaaaagtactagttatgaacttctaatcaatttccatatgttcaatatttttatttaaatatatgtttctaactacaatttatatactctttttgtgtaagttgtagttgtgataatatgtttgcttgtttttttttgtcaaccacacattattatatataatgtatgaaaataaaaattcttcattgataatctaatttggaaaagaaaaaattgcaaataaaactaacatgtcctttaactatggctgaacaagctaagatgatttataaagcaaaataaattcgtccacggaaggtttgagaaagtggataatttctcggggttacgggacatttgatcagcttagaacaattgtctcgaagtctaaaacttttttatcctattggaataataatgatatattgaaaatttggaaatgtcacaaaccacaagaaagaaagaggttaataaaccacagagaaacacaatgctcatgaaaatcaaattcatgcttgacaattttattaatcatttgttattttattttggttgttcgttataattaatatcgattaatttatttgaaatgaagctaaaaagaaaaatcgtggggagcattcattaagctgcttactaagacttggtcttcgactaatacttcatgccctccaaatccttcctctccaatgccgacactcgcctaatttataaaattaataagatcctcttcttttaataatacactaatgttcatctaatttttattttttaaaatctataacacctaaacgttttttccttgatcctgtcttaaaatccagacatttatagagacaataaacaca

SEQ ID NO: 54224 - DNA, 1131 bp, Arabidopsis thaliana landsberg
ccttgttatagagtaaaacgatcaggacatgtaaccaaatgggattgtagtattaccgtcactacatcacgagccgttcatgaaattccggtagtagaattcatccgtaatttcaacaaaactccatatattttggatgatctagagagagcacctttgtggacaatgttattttttggtggtaatcataaataagaaacttcctatccaataatttaacatcaaaaaggcccatctaataaaagtatacttaaaagcccacaaaaagaatccaagtacacgtgttgatgtttgtagaaaagtctactggaattaatgagctgattaaaaaaaaggagcagctaattaagaataagacccacagagagaaaagaaatgagaaacccagaaggatctggaagaagaggaggatccttttcattttttctttcttggataaactctctcctatctttttttttttcttttcttcttctacttttctaatttcttacgacaattctcctcctttcgtacataaaacaaagaaaccctctctttttctcatcttcttcaattttcaaaactcaaaatccttcttcatcgtcgctacatttttctgtgcttctcggtttctgctatcgaacaacaagactcaaaaggtttgctaatttctgttacttttatcgtttctttaaaacggctgatttatggttagggtttcaagatggaacgcagattcttctttcgattttgaatccgaccaaacaaaagctcatatctttgaatcgatgactttgttgtaaacttgtacgatttcgtctactttgataaatgttctggtttgcgattgacgatttcaaaacccttttcatttctcttctataaagtcattttcttttattgacattttgatattattgggtttttcagtgtcttgatgattgggttttattctacgctttgatgttccttattcgctcttaggggttcgatgaacttcattagctgacagatgcatattagtctcttcaacgagatttactcatttagctacatgttcttattctgtgttattttatttttttaattattctttgtggttatttctaggtagaaagaatcggacatggaagaagcagttgaacgagg

SEQ ID NO: 54225 - DNA, 1310 bp, Arabidopsis thaliana landsberg
acactcgattattatattagaaaattgcatcgaaatgtttgatgtgctcattaaacattcttgattactatgatgaaaagacaaaatatcaaagaccatatacgattctgtttggggctggcccaattgctatttgagaaaagggcctcaataattatattactagaattcacaaacttggcccaatgtgatcataacagttaacaaaatagtatgtaggaagatcaaagtgagattcgaaggtgtggatcccaaactaactatggaactaactttagattctataaaactaatatctacagtgagagcaaacatgaacaatctcaacatgagcctccttcagtcaaagaacaattctggaaccatcatcttgtaaagatttgagattcaagaccgggggcatttaccatcggcggctcagaggtaaaccgaggaggaagattctgaagaaggcgaggaaagagaggagactcccaccaacaaggcaaacttgaagagctttcttcttctttcttgggcttaaccaagtaaaagactggagacttgactctaaaatggattcaccatcaaggtaatacacctagcagaaacaaatgctattaagatcatacaaacaagatatttttatgagatttggtgtgggattggatgtagaacttacgggtaagctgttcagaagaactagtgcaagagagacatggaatgtgcaggtcaagcttctttctaggatatttgggaaggactttccaaagaagttaaatagccaacgaggttgatatgcggttaaatgaactgaatgtgacatggcaatcagatcaccgacaaaaacaaacgtgccaagacaatttgaggtattgaaatccagaccaagtctagagcaatcctgtgacgaggttcttttataagtgatctctgtccacaatacgcctggagattgcattgcttgtaagcacaagtcaccctgaaacatcaaatcataaaaattcgaaaatgcaatgatatcatcagtcttaagggtattctcaagcaatattcacctgtggacatacgcagtcactttggttatcggtgtctgatgttgtcacccatccatcaccacatttttgaagcttgacgatatcctttgcatccaaacggacagatacctctcttatggctgcatttgagcatggcattgttcgaaatgcagtgagatcaccgggacaaacaaattggttctcaaccattttccctttgtacccttcttcaatcagagagataaaaacacagtaaaaattcccgtgatgaaatctccttgaacctcggaggtc

SEQ ID NO: 54226 - DNA, 822 bp, Arabidopsis thaliana landsberg
  unsure (1)..(822): unsure at all n locations
gtatagtttgttcttctttctagccaaacttctgacgagcgactttttaccagaagaacctaataagaaggagaagaatagaagcaccttagtattccagattaggtactttacccaaaataaatagagttcccagaatgaattgagtaccctggatagatcatttccctctgtgttttctagagcatactcaaatacttcaacctttgctataagcggtagattgtcatagtctggagcaaaactcaacatatgcttattttcttgattaagaatgatctatgaattcagacaggcatgtgtaagaattaacgtaaaccgcagatagtttcaggactgaaaaccttagtgaatacaagacaaacctttcttgcatctctgtgctctcgaataagatggtgaagggtatcgcagttcggaacccatccgatgagtccactattgggagatagtggtattacagaatagcgttgaatggaaagatctttttcggctgtttttctggaattctcaagcaaagtgttcaccaaaccaaaaagctgaaacacaaataagaggaaagggatagatgtgattttgtagctgaaaactgtatatttgtgaagtgtaaactgaaaacttcaattacgtattctccaacaagaattcatcagaacaatgcataactgatttttttgagaatcacctgcataacacgctcatcttgccttaaatcttcatgtcccttcaacaagaaggcgtagtcctcaccgtcatttgcgtgaatagtcaatttccttggtctttgtttagaggttatanacacaagttggcgtgaaaaag

SEQ ID NO: 54227 - DNA, 618 bp, Arabidopsis thaliana landsberg
tgtaatatacatagagtggctatgacttgatgtacattatggactatgtagaagattatgtttacatattacccatagttcatattgtatattcactaatgtatacacaatatgaatatccactaatgtatacacagtatgaatatccttaggtgtaacaagatatacttatatcaaatcatatatattaggtttataaacatgttgactataacatatgtatatgtatgaccttatattgtattataatcaataattatatgatcatatttgcaaacagcttatgttaataccaacatctaatatttctataatatatagaagatcaatgttgagtatcaaagttcataatgaacatgtataaactacacctatatacattaagcctatatataggttataagtcacgataagcttatatgtttacaaggtaaattgtataagggggttcagtaccttatacacatatcaatatttcatgaatgtatacacaaagacctgatacacatggaatattatggttgatgtcataacttatcacatcaagtcaggtgataagctcaaatgtttggtgttctgtgccaactttgtatttggcatcaataacatattatttta

SEQ ID NO: 54228 - DNA, 535 bp, Arabidopsis thaliana landsberg
caccgtccttatcgtagattcttgcgctgatgatcgaatcggttccggctttccagatcgatccggttctgaggtagaatgtgtatacacagtctggatcatcttcctagataaacaaacagaaactgaaaaagtcaaattatcgaaaaatctaaatctgatcgagagtggttagagattgaggaagtttacggcgaaactacggcggagacggtggcgagaaggaggaggaaagggaggagaacatcgcgacgagccattttgtttttttccggtgaacgatttgtattttttctctgattttttttctgcagaggtgtattaatagatgcgaatattatttgagggaagggttattattgggaattaacaattggggtaataatcacgtgttattcggagtagcgtgtaatgttgacgtggctgactcttatctgttgtgatgtgagaattgagatggataatttgagaggcttggcgattactcggcgagtcggtatatgatgggttggtagattacgaaattatcctttta

SEQ ID NO: 54229 - DNA, 902 bp, Arabidopsis thaliana landsberg
  unsure (1)..(902): unsure at all n locations
agcatagttcaagaaatttttaaaaatatatgtgaagaggaaggaaagagatggatgatcgagtgaaggtggaggaagattgagttctataattaaatgaataaaatttgaataaaaaatatatatatatatatatatatnctttacaccaatgtatttctatttaccaacattgtaattgtaattaaatgaataaaatttgaattcttaaaatatttctttaatatttgtgtttattagtttaaaaaaataattgatatattactaaccctcatgatacacgtatttgaatagtagtaaacacagaatgtcactagttaatgtatattatcagatatttttatcctattttagtatttttttagtcaaaagaagtatttatgatttgttgagaatctctagcaaatccacatggtctgagtctgagatactatattataagaaaacagtcgcttactgtgttcctgactactctaaaagaaattaatggcaaatgtgttatcgtcttgtaatcaacacaatatgtgatggcccgatgccaggtaattgcatgtgatattttatctgaactaaggcattgttaataaaaaaaaataatctttccatttaagacaaaaatgtacagattttttaatgcaaaattgggaagttgtctcgtagatcggaggagatcagaacacaaaagcagggccaatctggaatataggttttgtttgggggtttttatttagattttaaaacatgagaccaaaatttaaatttcagaaatagtgatctatttttgcaataaagatcttaaaaatctatggaagctctaggccatattataatatatgggcttaaaaattctaatagacatgtcacaagcttgcgacttttgggtgacacaatatgagaaatga

SEQ ID NO: 54230 - DNA, 1245 bp, Arabidopsis thaliana landsberg
ttggcgggtttcaatacgagtcttgtctctgtaactgctgacataacatttcctttccttctttaactttcttgttttttacttgaataagtagtacattcgatcagtaacttttaccaaattttatcatttgttttaactttacctaatagtatgaatattatgtacgagtacaattctcttttcctagttcgaataacccacttcaagaaatggtaacaatacaatcattcacagaagttacatttttctaagaacagtttttcattctaacttttttggatggtacatttaaagatttattattggatttatgtatcaggtgttttgaagaaaaagatgagaagagatagaggatttgaagctcagaagtagagagaaagacctaaggccatattgtccatttgaaaattcctaaattgtaaactaatcagaaagattagtatgctaattatatgagtagaatagaattttgtttgagagttcttgtaaagatgagactccccatgttctattctatgttttgtgttttagaattttaaatttgatatccattgtctttgactaaattgatgatgtttatctttttgtgatggttacaaagttgctccaaaacttaaaactaatttatttttgatcgacgaaactcggtcaaaaatactatgatttgtgaaaaattcatgtataagattgtacatatactagggctagggccaccagtttttgaaaagttaggtctcaatgaaactgaagtaaatctttctaaaatactcattttatttttttctgtttgtgagttgcgaacctagtataatgaagattcggggtaatacactacactaacgtagaaccaacatttgcagcaaacaaagataataattgcttaacaaaactaaactaaatatgtctgaaaagattggtcggcttcaattcttctcactcaagtcgtcggtagctttgaatactcttaaccaatccttctctcacgcagaaaagagaacaaacatgtttctcggctacagattatcatctattgtgactgaaccatcaaacagttcgtgttcttgattatgcgacaccacagtcttaattattttcagaacttgaaccaatttctcatgaaacctcaaacttagattgcgacataaaccagaatgaaaaatagtatagcaataagaatacgacatttttcgatatttcaacatttcaaacaaaatgaagtgtgcaggatttcagtaatgtaga

SEQ ID NO: 54231 - DNA, 805 bp, Arabidopsis thaliana landsberg
taaagtctatcatttaatagctaactgctatagcttataatatggtcactgatgtgtttgtgagcaatgccacagctacaggagcatctgtcctggtattcaattctgaaacatagaatccgggagttggatgttcgaattttgtcagtctaccctttttgctctatgttttattcagtaacttttaatgtgttttctatcccacatgaaaagaatttgttttcactaatcattttttctattttacaacatctaaactgctactagaatagaatccaaaagtttgcccctgttattgtatacatctcattaacacgaatctttgttttgttgacattgttaatttttttcaggtgtgatgtttcttggagatcttgtaccctgatttcttacatctttcttgttggaagtttgggactcacatcctaacccttgctatgctgttgtgaaatatgcagagattcaggctggaagctccctgttcagacaattgcctttgcagaaaggccatgagaattttattaatgttactgataataattgctgctcttttgtaggactactagcattatggcccctgctatgcagggtcatagtatctggcataaaatatatcaaattttcaattcagtggcttgtacaaatattttgcttattattcggatgcgtgaaatattgaaaaaaaattctagatgaagaatatggagagaaaattccctctattttttctgaaaataataaatataagtagacacatggagatcgtggaacttgtgggagttaacccttgtagtatgatagaagt

SEQ ID NO: 54232 - DNA, 175 bp, Arabidopsis thaliana landsberg
gacaaacaaagacaaggaacaagaaacgaaattaaacaaaacccaaagcaaagaaaaaacaaaaagccaaaacaaagaaaagaaaaagtccaaaccaaaaccggaaacagggcaagggaacaagaaaaaaaggaaaaacgccaagacagaaaagaaccagaaacccaccgagaca

SEQ ID NO: 54233 - DNA, 556 bp, Arabidopsis thaliana landsberg
catcgcgctggtgctgcatccccacccccagttcgggggcacgattaacatcccgctggtctacgacctcttccacatgggccaggggctgggctgcaccacggtgcgcttcaacttccgcggcgtgggccgcagccagggcaccttcgacaatggctcgggcgaattgtccgatgccgccgccgtgctggactggatgaacacgctttatcccaaccccagccatgtctgggtctgcggcatcagcttcggcgcctggatcggcatgcagcttctgatgcgccggccggagatcaccggcttcgtctccatcgcgccgcccgccagcatgtacgacttcgccttcctggcgccctgccccacctccggcctgatcgtgcacggcaccaaggacagcgtcgtgcccgaacccgatgtgcagaagctggtcgaccgcctcaccgcgcagaagggcatcaagatcacctacaacaagatcgacggcgccaaccatttcttcgacagcacgagaccgatgtggtcgatgcggtgaaaggtacgtctcggatctgatgtc

SEQ ID NO: 54234 - DNA, 1514 bp, Arabidopsis thaliana landsberg
gagtctagacagaagaaagacacaaatgaaaacgcaacacttttttttttccaacaaagcctattggccttttgagtttttaattactcgcaaaccctttacaaggaagtgaaacagacagaggtgaaaaacataaccgttaatatttgtggaaaaatgaagaagaaaacggacacgtccttttttatatcagagtcaacgtaactacatatatctctctggaagactttgaatagttttctagacccaatatatctttagtaataaatattccatctaaaaatgtttggttgggacaatattctattgggaaagtgaaagactatcaaacatgtccaaatactcatcagaaataattttaagataagcttttatatcacattgttcctacatatggagaggacgatcaacttggatagacccgaaaagagagaatgattagaacgtgcaaaaatcaaacacgaccactctgccaattacatatcttatattatatttctggtgtcaaattacatatcaattatatgaagcataatgcatgttgaagatgatcaaatgtaaatgggtgtctaaacttatagattagaatcgataattgtagttaagtttttacataaaaagaaagaaataatctttttaacaaaaaacacagtgtgaaaacgaaacttatattaccaaatacctcgggtcaagaaagactctcgcaaaagtgtataaaagtcgtatgaccttttttcgttgagagaagacaaaattagcaaaatatgcgtcaaaaagtaagattttgctgacttcttagttcttaccattcattttccaaatatatttctgtatgtgaccaaattaaagtcgagagtaagtagtcattgaattggtagtctctcacaaaagtacgcaaaaaggacatgcaataaaaatatcttattgtagtaactaaataagtagtactaataaatccgctaaagtgtaaactttctcattgaccttactataatgctgaaaaatgttgcaatatccatgcggccttgtgaaatcaaatagaataagactttagtcgttggaaaaaaggaatataaagtcaaataggttgaatatttccatgaaacagaaaatgccgtccacgtccaaaactgcaatatgctaatccacaccgtccattaacttgggaaaatcaaatctaaagcgttcatcagagtaatggtttatagatgaatcacgtgtcgagatcttgacgcattaatagcgtgcacttagctctagtggaatcaaaaacaccacgaccgcacaccatgcgagatcgaaggaccagagtgttcaaagtcctcaaaagcagcccacgcgttatctggccacccacttctattttgtaattgctgccgaagtaactaatggtgtaatttattaagtagtaatcaactatttggtcttaaagtatgttatcaaaagacccaaatcatcaactaatcatcaaatgagaagaataaaactatataaatgctttattctctctttat

SEQ ID NO: 54235 - DNA, 413 bp, Arabidopsis thaliana landsberg
ccccccccccagccccccccctaccccctccccctcccccccccccccatcaccccccccccccccttcacccgctcctcccacccctccaccctacccctcccccccctccactccccccccccccacccccctctctcccccccgccccccccccccccctccccctccccccccccacccccccccccccccccccacccccccccccccttcccccctcccccccgcctcccccccccccccctcccctccctcccccccccctcccctccccccccctccaccccccccccctccccctcccccccccccctcccctccccccccccccccccccctccccctcccccacccccaccccccctcccccccccctcccccccccgacaccctccccctcctcccccccc

SEQ ID NO: 54236 - DNA, 1297 bp, Arabidopsis thaliana landsberg
  unsure (1)..(1297): unsure at all n locations
tggccttccgtactatctacagtcagatcagacccaggtcagtcaagatttgtgtttctttctttggtcttgagatttggggagtgactaagctttctttgttcacttgtaaagggaatatctgttcaacgatcagatttggtgggtctgattattcgtcgcaatgaacttgcaaatgacattcttgtggcgtcaacaacccagcaactgccgccgatgttacgggtatgctctgatgtccagcgatgacaatttctcttgggaatattagataattaaattatttattattttgatgctagaacccaaacatatgccggaactgtcgccatctggatgtttgcacaatttatcataaggtattttctcgtttctatgattaataatgctcgaagtcaaatatttacattttagggtattaggttctacatgtttaagcatatggggttaacattttaatatgcatgttatgatctgacttgatggatgtattccactcgctaaataagtaatcaaccgttgatttaaatcacattcttgatactagtcacctgaaactgaatttccattttgttatttgttgcggtatattatagtaagctttttcttagtcatagttattttgcatgtaattcctgagagtacactacatttttcaagcatttttggggaggtgttgaacgttcatcttcatggtattgaaccgtcatcttttgaagcttctaaaacatcttgtctgcttgccccaggcagatggtggaaacacagagagtagcggacttggtgatgtctttgacacacatgtttctcatctatcaactttacatttcaatttcctccgacactgggacaggctaattgacttggaaggtagagagatgcaggtcagccttgaatacaaagttgattgtttactggagtacaaagttaaggatttttccttacttggcgatcttatgtctatgtttgttttcagcttctacggaaagatattgcgcatccacatggttcaaagggcagccactcagctagttatctttcttcaatggttcttgacgtgacaaatgggtttcagcatcataactctcataaagaaactagattcatctatcgttttgtacgtcaaaaatcatctgaatctagagaaagagtaaccagtgaagatatgattaggactggaaaccttgcaactgatgacctggattgaaacttagaactggagatcgtgtggtacaatatttcttgattggtcttatatcatgggtaaattngaaagtttgaaccaataaatttagtt

SEQ ID NO: 54237 - DNA, 554 bp, Arabidopsis thaliana landsberg
tttatgcatgcattttatattttctattgattttcctttttttaatctcgattttttttcctttttcacgtcgggattcacatccaaatatcttgaccctttctcttcagtcacgagtcaagacctctgagacttggttctgtaataatctaaaacctagaaagaagtttgtttctaattacgtgtaacttcatttcacattgaaggaagacaatgatgggactttcgttttttcttaaaaccatcactatcaaatttcattgacttacctttacttctttgttccttgctattatcctccttattgttcggtgctctctcactctattttatcaaagtgaaatataaacactaaaaacagatgaaacattaaaaagagatcagatgatttcaatccaatgttacaatttacatagatacatgtttatctttgcgagttacaagactacacaaatagtgaaatgtacataattaatgcttcaatattgaacccaattgatatcaagatctttaagatcgtgcaaccatttctcggtatcttgagagacgtaagg

SEQ ID NO: 54238 - DNA, 1226 bp, Arabidopsis thaliana landsberg
aagaagatcttgaatttcctcagctttcttcacccatgaggttcagtaacgaattggcaggagagtcttctttccctgagagaaaggttcagcataagtgcaacgattataacattgtgtctacaaccactgaattgagaactcctcagaaggaggtaggtttggccaacggaacagaatgcttggctgtttctcctattcctgaggattggagaactcccttggcgaatctgacaaacacaaacagcagcgcttgcaaagattggcgggtgagttctggagaaaagttagaaactcttcgacagcctcgcaagttgaagagactacgtagacttggagattgctcgagtgctgtaaaggagaataatcctggtattacagaggcagaccatatcagatctcgttctcgcggtaaaaagcacattagaggtaactggttctgtattttcttttactacattgaaatgatctgggagttgacaatgaccgaaaatttacggattctgatgttgcttaacatcaccagaatctccccagtatatgtatgtataccaattggtttgattgattaggaatccataagatcttaatagaatattgccagtgtcatagtgaagtggaaaagtgctgagagttggtttacactttcttctgttgcttttgcgttggtgacaaaaaaggtcaattttcaattaaaatttgagttatttgtggtatacatctgcgttagatcaatgtcttgatgtgctgagagaaatgaaacatttgtcatgttgatctgtttgagtgattgctgcttggttgctctgtgtcttaaggtaagaagaagatgatcatggatgatgatgtccaagtcttcattgacgaggaagctgagtaagttcttctctaatctaaaaataaacatctgatggtctttcttacttccacaaaacagcgagagacaacataacaaaagtagtctttctgactacaaagttgatgttagttgtttcaaacctctctattttgatcagggtctcttcgggagcagagatgtcggctgatgagaacgaagatgtgactggcgattcatttgaagatagtttcatagatgacggaacaatgcctacagcaaatactcaagccgagtctggtaaagttgacatgatggctgtttacaggtacatacaaccaaagatatctttcttctactgcgaggtcaatgagcttaaaaaaatcacaag

SEQ ID NO: 54239 - DNA, 896 bp, Arabidopsis thaliana landsberg
tctaactcatgagaataagattctgcaagagctatgatatagatatagatccaaaagggttctttgagcattgactaaagatcttgtttttcttatcaagaagaagaaaatcacaaacctgagttccgcataaatcatcagactttttagaacagtagtgaccaccgttttctcccatcatccaccacatatttttcttcgaacaagaactcgatttgagatataaagaaccaaactttaccacacaaaaaaagaatcttagaggttggttcaacaagagatacaataaacacaggaactaaagaatccaagcctaaaaaaggggagatttttgaaagaattaaagaataaaacagagggaaaacagagttttttcttatgcgattgtgttttgtttgtgtatatgatgataaatggatattgtctcgaggaggaactaacgagagagaaaaggggtaattaggtcaatgaggaaagtttcaacgttagttccgttgcttggctttgattgatgaagtattatcatttatcattctctccacaccacgcgttgtgtgactcagtcccccacttccagcttttgtcgtgtctttttagttgaaaaagctcagaatcacttatgtactctttcttttctcttcaaccaccacgtggcttccactctaaaatatacacaaataatactatctaatttaatcataaacttagacaatctgtatataatatactctgatgtcaacagttttttagtataagctaagtattcatattagggagagttttggaaagtactaagtcatagcataaagatctgaaaaaaagcactcaccaagtttgagacctagaaaaatgcatatctgacactgttggcttgctgggtctattggttgctacca

SEQ ID NO: 54240 - DNA, 1145 bp, Arabidopsis thaliana landsberg
ggcacagatggtctctgtaaaaaaattagtcgaaataaattaacttttaattctcctcatagattattgcaaacatctatcatgaatagaataatataatattctttaagaaaacaattcaaatcaaagaaatatgttagatgaatattgtcatacacaattctattttataataaatttaattcaaccatccaaaatgtttgaaaaaaaagtgagcatttattgtcaaaaataggattgtagattggaaacataaggtggaagcgaaactgataaaaattgaggaaaaaaatatagaaagtgaaaattgaaatatttcatttcagtggaatcagcaatatttgcggacaataatttaagaattgagctaaagaaagcttatggaatcagcaaactccaaactatttttagagcacacgacttagccacaaaatccaaacttacttgcctcattttcgagctatcttcattttaatttgtgttcaaaacatctttttgtaagaaaacaaaaatcatagttccaaaaatggcaacggatacaacaacttttcctgaaggcgatgcagaagctgaacttaatcctggccaaaacaagaatttcgaagtagatcctgtttcatcagagattgcttctgaaaaggtaattagttgtatttatgatatatcattattgaatgaatgtgttgattttgcatgagtttcaaagaaaccaccaaatatctaaagcttttatcactttttcatgtacaaaaatccatacgtgaattctcaaacttatatatttacttttgggtttgaaatgtgaaggtacaaaaaatcgtagaaaagagggaaaacgcaaaggcaaagagagatggggcacgaacgcttaaaaacacgatcataatatcagcagtgattgtggccgtcgcaggagccgcttttgctataaccaagaaattgaaagagaataaatgatcttatacaagttaatttctcaattttcctttgtaactttttcttacataagaaattaagaaaaaataactattgatattatataataattattaaaatctatatattttttgatatgtaattttttaaaattaaataatgtaattgaatacttttttttcttttttcaaactatggtttgaataatg

SEQ ID NO: 54241 - DNA, 1120 bp, Arabidopsis thaliana landsberg
tatcaggggcccttttgaaattaattgatagaatggaccgaaagtagaagaacttggagggggcgtttttttagctacgcgccttgtagacgcgcccgagtcacgtgctattgtttggcctcatattgctacttatgaacaacgaacggtcacgcaaccataagtcactcacacacaaaggacactaacctagcatatctatatactttataaatggaaaattttcataaaattgtcacaatttttcacaaaaacacattaaccttccgtgttcaatctacatacatttgaaagtgatatatattgaagcatgtaacgtttcactttcacaccacctcatagaaaaccgatgcatgataaatacgacatacacatcttcttttgacgaataaaaagaagtatttcaacaataaattcactacactgtctggctagtaattaaattaattaaacaccaccatgcgttgatgattatgcaaaaatgttagaaattattataaaccattgatcataaaacattttgaaattagctagtgttgtttctttttttaattttcagtgaccgagagtgagtgatcgactgatgatgggttggttatgtacaaaaagtcaaaaactaatttcatccgcctcccaatttccggttttatccggttctggcggacaacgctttcatttttcgatcaaattttcggttcgatctaattcgcgtcggttgaaccatacttgaaaccgtaactcgtatccatatgtatcgttcaaaactcgacgtaaatttcaccagaccactaaaaagtctaaaaccataacgcggttctttcttcgtccttgtccctcaatttgaataattgaaattggagccagattccaccattctcatttactcagacattgtcggaaaaataatcaaaatcttacgtcaaaggtttctgtttttctttgttttacattgtgcacaccacctgctcgataaaatgtctgtgaaactaaccactttgttgctaaagcatttatgctgtgaaattaactggcttgatcctgagttttaatataatttgaatgatgtataaatatcccagggtcttgactactttttgttggccccccctagatccgggcc

SEQ ID NO: 54242 - DNA, 865 bp, Arabidopsis thaliana landsberg
gtgccaacaaaaacgaaagggtttaggaaaatcaaaaccacagacgaaagggttttggtctaattttcttcttctcatggccttctcgagaatcgctcttctttgccaacgattctctagacaacaacaacaacgccaacttcttcacagaccactcactacgaagctagataacaccagattcctccatcccaatcaatccaagcttgcccaaaacctaatcgtgatcttcactagacaacctttttcacctgacgaccctgagctactgatactctctccagagctcaacaccaaggtagtcgaaaccgtcttgaatggattcaaaaggtggggtttggcttatctgttcttcaattgggcttctaaacaggaaggttacagaaacgatatgtatgcttacaatgccatggcttctatcctatcacgtgctcgacaaaatgcctcactgaaagctttggttgtagatgttctgaattctcgttgtttcatgtctcctggagctttcgggtttttcattcggtgtttaggtaatgctgggctagtggatgaagcaagttctgtttttgatcgagttagagagatgggtctttgtgttcctaatgcttatacttataactgtttgttagaagcaatttctaagtcgaattcgagctctgttgagttggttgaggcgaggttgaaggagatgagggattgcggttttcatttcgataaatttactcttacaccagttttgcaggtttattgcaacactggtaagtctgagagagcgttgagtgttttcaatgagattcttaatagaggttggcttgatgaacatatttcaacgattttggttgtttcattttgtaagtggggtcag

SEQ ID NO: 54243 - DNA, 523 bp, Arabidopsis thaliana landsberg
tcgccggctattttcgccgattggacgatctgctgatgcggtgcatggatgcgctgatggcgttcccgtttctgatgctggcgatcgccattgcggcgtcgctgggcaccgggctggtcagcgtcattgtcgcgctcggcgtcgcctattcgccgcgcaccgcgcggatcgcgcgtgccgcggtgatcacggtgcgcggcaccgagtacatcgattccgcgatcctgtccggcgccagccatcgccgcatcctgtggcgccatatcctgccgaacagcctcacgccgctgattgtcgaactcaccctgatctatgcctatgcggtgctggcggaagcggcgctgagctttctcggtgtcggaccgccgccgtcgacgccaacctggggcaacatcatcgccgatgggcgcgactacatcgtcgatgcgccctggatcgcggcgttcccgggcctggcgatctcgctgctggtgctcagcctgaatctgctcggcgatggcctgcgcgacgtgctcgacccgcg

SEQ ID NO: 54244 - DNA, 744 bp, Arabidopsis thaliana landsberg
taacgaaaaagacaaaaatattttatttttttaaaacagattacattattactagaactgaggaaaaaaaaagagagacattacttgaacaaaaatgtgttttggcccatgggctttcacagcattaacttacatttcagctcatgggtttcatgactttaggcccataatcttcattgcctcgagaccaaccgtttgtaatatttaaacatttcatctgagattctaactcgaaacctaagtactactactacaaatttcgttcttgaaatctttcacttccattcatataagaacaagaaagaaaaacaaaaaaaaagggatttagcagtgttaccgaaatttacatgtggtaaactctaagaaacaaaagatattataagccaactttatcccccaccaatcaacaaaaccaaaaaaaaaatgtaagtaacaaaagaaagaaatattgatgtagattttgtatgtatccttgtcaaatgtaaataaaatgtacacctgctgctgaatcagaaaccaactaaaagtcattcttgttgttgcctctgccacggcagataaccagtcacttgatcagcaaaattcgacataaccaaatccttcaatccagtgtcccacacttcacagaaccgtcgtttccaatccggcggctcgattgcctctgtcccgagccctggagctcgatctttagacccttgattctgattctcttgccagtcaacaacataagtagccactcttctg

SEQ ID NO: 54245 - DNA, 844 bp, Arabidopsis thaliana landsberg
  unsure (1)..(844): unsure at all n locations
tgtgggaggttcaaacggcagatctctttggaaaaacttgagacgttttatcaatggatcgtcaaaggcttcatgcatcatctactcgaagccatgcgagaccctctacctctactgtttctatatatttcaaaataagaaaggtttccataaaactctttttccacaatttactatgttgtttgtactctatgtctctccaaaattataaagaatattaaaaatatacttttacgtacccatttatttcattatccctgatcgttatataataaatctgatatagtttttaatattcaacgcgactacacaatttgcttagaaatgaacttatgttaaagtgttaaactatagtgactgcttactatgtatgagtctaagagatacatgaaaaaagatcaaaactagctagatctaccgagagattaaaaagaaaacaatagcttgacattttttttgttggcgaatccgtatgtttgaggaaacaggagaataatcatcgtttataatatgacgtatatattggttaatgtcaagttaaatgtcttatctgacctctactcaatcatctagtttagtaagtttgtaaatactgcttaatatatttctagcaaaagacttttaactttggaaaatcgtaatcttgtggaagttgtattctcagtatgcctttggaacttttttcaaaacccctcatctataacgttaaaaggaaaaaaagaagtctaacattgtcactttgacccactcccctcgtggacgtggccaaaatatctcaccaacttcatatatcctaaccaaacatatcttactacaatttttnttttttaatctattactagat

SEQ ID NO: 54246 - DNA, 1122 bp, Arabidopsis thaliana landsberg
taaaaaaaatgaaattttaattctggaagtaaatgtaatgcatgttgcctaaactcggacactatgtggtagattttgattggtcggaatatatgatctccgaaaagcaacaatgtcaaagctgcgtgaagaaaaaataagctagaaagtaaattatatacatgtacaataatggaaacatatgaataatattaaggagccaaaatcaaaaatgaccggcgatgattaaggtaataaaagtcaaagctcaacacaaccgacgcttttggcaggaaattcgaagacatatggtaagagtcccactttctcattattaatctcttttctttgtcaaaatttgcaacacaaaacacgtttagagtcaatgtcaacatcaggattcagcagtatggtatacggtttgaagagaagcgagaggtaagtgtctgtgtagcaaatgcttgaatctgcttcttggcatctacaaactacaaagtatcaaaaacatatgaataatcatataataaaatattaattgcaccatgccatcattggcttgagactcaagccttgagtgttagaatcataaatagttttgttacctttttggcatttggtgaaatccaacggtgtttgcaaacactaagagtcaagcaaactccaataacaaaaacataatgatccaagcagcttgctgtagaaatagttacataaaagttcatacaaaagtttcatactatggtgacaaatgaaacctatagagacttaggctttattgggcccaatgtttgtgagctacgagcccaaatcaagtgaaagataatgaaactacaaaaaatgtaattaaataaagctctttgtagatttagctggacaaattttttaaaaaatcaatgaaagttaaaaaggacttgtggaaaatgtgacgcgagacatttctaccgacatctgagaagaagtgactgtatatccaataaggaaagagaaaggaattggatcttcgatggagcccacgagtgttcactacgcaccatggaattggttcatatggcccattaagagattaatgggcccaaatcagatggcgcgtgtatctcacggtgattcttcacccaggtaaattgctaatgcggtgtctatgtt

SEQ ID NO: 54247 - DNA, 1295 bp, Arabidopsis thaliana landsberg
  unsure (1)..(1295): unsure at all n locations
acatggttaacagtgttctgaaaagtctataagcacagttctattattatcatcccaagtatgtgtgtaacggctccagatcttgctcacaggaattggtttatgcttgtgcatcaaatgtggcgttagagttaagtccaagtgtatatcagcagaagctttcctttcagatctcttcactacagatagacaacccacttcaaaattcttcgtatcctgtcatattgagatttaatcatgaccacaaagtcattcctcctgattggggaatgaagaacaacaaagcaatacttttgagggaaattgttcagcaagttaggggtaattcctgtgatgctgtagtctacgttgacctatcaaagtggcggaaaaaagatggctcactagtttcttttgagtacataaatattaggtatgattaatggtcaacattctccttagtatccacacagttcattgtattataattatatacattttgttcccaattctcagtttgctttaaataaatgcaggattggtgaatttggacttgagctggagctacaaacacttttatccttactggagttcgtaaaagcagtgcttcccaattctcaggctagactcctgccgctctcagatccaacgctacatcctctgatttatgacactggttccaaggatataagttcagaagatactccacatgcaagaaacattcctgtatttaacaaaaaccagagaagcattgtagctctgcctatagtggttccaataggagctccttggcagcatattcacttgttggctcgaagacgcaggaaaatttatgttgaaacatttgacttggcccctattcagtttactttaaggtgagatagaaattgtcctttcaggataactatacttttggtaacctatctacatgtagattcacatgggtcctttgtgtgtcacaatattgacagcttctgcagtgctccctggatgcttaggaacggcattcttacttcaggagagtcccttatccatgtgtgtaccttcacttttctttccttagatatattgcagaattttatttttgtttatattaaatgcataaaggattttttgacgttaggtttttaatagggattcctttcttttcttggccaaatacccattttgaattttttgcgatattctctttgtttcaactncggtactattacctgatagactatacatagaaggaagggaacagatagtgttctttgaccaatgattaggagcttttatgactttgggagtgatagtgaccccaacccactcgt

SEQ ID NO: 54248 - DNA, 607 bp, Arabidopsis thaliana landsberg
tctattgatgttataaggagtcgccttctgcatcttcttttcctaacatgatactctcgttcctcgtcttcttcacatgtttattatcctatcactactgaatacaaactaataattctttttctatggctaatgtaaatgactaactagattaaatttaccaaatatgttaaaaagaaattacaatatttcaaaaattgggattaaaaacaaacgtagtcttcacgagatatatttggactacatcctgaatttggaatcttatttatggagtatccgtagaagcatggttaactatagcagaactgtgggttctctatcttggtgtggcgatgtggttgatggcatcataatgtggaagagcacaccaaagtcactgctcgttttcttctgcatcttggttttcattttgctgctagagatgatgagttcgttcattcctgttatcatcttcctcatgggtgtcatctcctacttctagagttcagaattaccgccccgacatggctatctctcagacgacttctacaacagatttcgaccttaacgaagagaccggcacaatctagtctggttcacaccatcagaaaggattggcgtggaagtg

SEQ ID NO: 54249 - DNA, 1248 bp, Arabidopsis thaliana landsberg
gctcagtttgtttatcttgttttagtttgttactgagtcagtgattgttcaattcttctcttatttactggctttgttaagtagattgtcctttttttcttaagaacctgtgtattgtttcccacagaaacagcagtaacattgcatctattggccgcatcgcaatccagtctttttgctctcccctgtgtgagtattctgaaaaggtaattaggagagttttctggaacttttagcctatatcaagtcaacaatgctttctaacgaaaattctcttgactctatagttaatgatagctgaagcttgtaccagtatcacgtcgttatgtattatcatgttaattttttgacattttgtttctatcaacacaggaatcagacatgctctcattcataagattgctgaaaagtatgcttatggtttcaaatgcggtagccattgttactttcccgccttccctgctctccccatcttcctctaaaagactgcagcatatggcagataccttgctctctatcaaagcaatcccaggtttgctttccctgattttcttattcataaatagattatcatagttgtttcttgacaagcatccttgccttttttttccagatggtgacaaggaattggagaaactcctcactggctacaaggttataaatggattcctcaacatacacaaggttgctcgtatcaacacacaggtatttacaaattgtgtaattctcaatttatatacggatattaagcaagaacccctttgtattttgccaagtcaaaaaacatattcaatggataaaagtctgatgaaattcaaaatgtctactgaacaacttatccagaaatccccatttaatccatttttctctcttttgatgagaatgacatgaacttgcttagaaaccgttgaaaaaatggattcactatggtcctaaaccactggttttatctgaattgtttaatggaacaggtgcctgtaattcttgaggcaaaaaccttctcaatgagcttgaagaagagaagattcttggctctagagtgtctgaatcaagcccctgtagacgggtccagtggaacatcatatggcacatctggtagctgctcatccaaatccggagcactagatttttgagttgctgagttagtctttcttttcttcttcttagttttttttccctctccattgagttctctaatttcactcagtacattatagattctttggtcttaaaaacagtttttaccaa

SEQ ID NO: 54250 - DNA, 480 bp, Arabidopsis thaliana landsberg
tttgtttaactctcttgtatcataaaaatgcaatcttgaaaaaagaattcatcttttggtcattgagctttctgtacattaatttggtttacattttatagaatgagagagcttgaaactaaatcaaaagttaggagaaatccaccattaagacgtggaagagtatcgcctcgtcttcttgtacctgatcacattccaaggcctccttatgttgagtctggtgtattaccggatatatcaagtgaattccagattcctggtcctgaaggcattgcgaaaatgagagctgcttgcgagcttgctgctcgggttttaaactatgctggaactttggttaaggtaagattttagtttccttgtggatcttttgttttcctatgttatggatatgcggtctgcagtgttgtttatatggttctgcaaccatctgttacgactaatgaaatcgataaagctgtgcattatatgattattgaagct

SEQ ID NO: 54251 - DNA, 821 bp, Arabidopsis thaliana landsberg
gaatttccttttttatgtaaaacacccgcgattaagacaactccttgcaatacaccatataaagatactccaaaaagaaatacatacaaagatatataccatatagagtttttcaagaaaaaatatccacatatcggaaaatgttaaaccaattatgttcatggccataataaaacataatatacgtaaaaataaaaggttcaacgtaattttatgattagcctccactttatatatattcatcaatagtcatacaaatcctcaaattaaacaaccgctaaacaataggtcaataaaagcattgtgcaaggatcgatcttgaatttcagccctccaaccattacttaggtaaccggttagaacgttttatttaattggtaaccaagtaacggttacaagaacctacatttatattcaccaacttaccaatcaaatcttacttgcacaatgtttttcatatgttgcatacttgcattgagtaaaaatttagaaatatacagttaccagaaaaatattaagttaagaagccaacttgatttgttgggccatcgttttatcttgaaaaccccttcacttatatcctaagggaattgggtgctcacaaaaaaaaaaaaaaagggtcgaaggaattgtgtgctgagacttaaaggattgtgagaatgccagggttacttcttctttttaactttatatatttaaactcatttcattttaatattataattcccacaatatgactatatatgaaatgtatatttagcgaccaacatatatagctcattttattccggtggaaaatcatgaaactttgaaaaaatatg

SEQ ID NO: 54252 - DNA, 546 bp, Arabidopsis thaliana landsberg
ggttcgttgctattcgtcgtaatgatcatattaattctttgttttttaacagcccaaaatttattaagttaaagaatgggaatttggaataattcgtaccctaattttcaattcaaaaatatcatttattgatttaaagttctacctaatggttccattgactatatcgaccacaaacatatatatacaaaataaaatttgttatgaatggcaatacaaaagtataatttcgtataattaaaacgagtctatcgaatatataatttagctaaaatgaatagtcaaacgtttttggtaaggactagtctaaaggactaaaggagatgttgaggaccatcgaccaccaaccccaactagttaatgatgatgatgatatatactttgaaaatgtcatcactatataattgttgacgaaccgaatccctggttttaatttttggttgtttgaacttattcctaaactcattttgtatagaagagtttcttgcggaaaaaggcatcctgtgaagcttgagtttcttgagggaaaaggtatccttgtaagct

SEQ ID NO: 54253 - DNA, 840 bp, Arabidopsis thaliana landsberg
agcctgtatcttctgttttccaggattgagctttttgctacatcatcctgaactgtttgctacaataatacaatctctgaagggatccgtcgatctgaacaaggaggagtgtgtccccctccactatgcttcaattttaatatctaagggttttacttgcagcttactggaaattggaataaatcttgagatgcatttgagggtggtgggttcactttaccataaagggctcatcctttacatgcgtagatttatacttatatcctactgtttcttacatacttcattcaggtgagtgcagtagatcgtttgctcaagtcgatacagcaaacagaagaatttctatggattttatgggagttgcgtgatgtttctaggtgagaaatgttttgctgtcatatctcggtttgccaaaatctgcttttgtttgtctttgtcttctttcgaaattaactggaaggcatcctgcaagtgcaggtctgattgtgggcgtgaagctttattgacgttaggtgtttttccagaggtatgaatctgcacccagggaaaagaatatacttctgctctttttgttcatcgtggtctttcacagtctatgataaacttatctgaaaagaattcataattctcattttccccccctgctttacttctgaagctgataaatggtgaaacatctcatggtgaagaaatgacaaacatttgattgtttaaaaaataatgtgtttggtggtgcttttagctaccttcacgaaatttaaacctttggttataatggacactttctgggagattagtggacgaaagtgttgcatccgtggccccctgagctggtcatgt

SEQ ID NO: 54254 - DNA, 584 bp, Arabidopsis thaliana landsberg
gcacgccgctccgactgtctgcctctttggttcgcgcgaagatggagatatcatgagtccgatcgcttattatgtttggttcacctaaccgtgcttcctatccgtagactcgacgattaacaggagtcctcgtgagaagaatcaaggtgacgcccattcatctatatcctccttcgcatagctcatcaccctcccgaatcgaggctttactcgacaatcaaaattcgattgtcaatttcaagtactaagcaaaatctacatttctggtttatgtctttttatttgtatataacgcacgtctatgatatatttacatttatgatttatgtcttttttttattaggatcacattcctgagtttatgtaaatcgatgctcagagtgccgaggccgatcttcaatcacaatgaaaacaatataaataggggaaacgaacactgggctgtaaatccatagcccgcatttagatgggcaggccagttcctatgaatttcgaggggctttttctggacagaaatttcacccacatacagatcatcccagtatgtatccgaatggtgaggctgagcacacatagagaatggt

SEQ ID NO: 54255 - DNA, 1064 bp, Arabidopsis thaliana landsberg
aacagagacaaatttctaactaacaacaaaacatcagaaagaaaacatgtaaatgggtgaccataagtcgacttataatccaataaaagtatactgtagataatcaagtaaatgaaagagctaactcagtatacgtgtcagtctccctgtcaatcatatcagaaaatatggcattacaatatgatatgactaaaatggtgaggaaccagtacctggagaaaaccctgttccaaaataaatcccaaaaccattggcacagcagtgaagacaccaatctgaaacagaaactgagcattcaaggcggcgctaagtgcagtatcgtccagaagaatagctctttctcgaatagtagctccaactccagaaagtgcctagcataaaccaaacacaagcagggttataaagaccttaatccagtactaatatgcaagaattaatcgtacaataatcactgatgaagatagcacatgcgtcacaaccaacattagttcaccaggcttaccagatatgccctcccatataagaaaatatacacagtaagcaccgtcaactgcaaaaggccatgtaaatgtcaataaatcagcatgatttcctggaaaatatacttggagaaacttagaacatatcagttatagctccagataaaaggtaaaaaataaagtgaccgacagaaactagtaatgcaagacttgttgtaaacttcttttctaatatcgcctgctaactgctaagtattgatatgaaggtaaactaagaaccatggagctaagactgctctatttaaaccaggtaaacattcaggaattggatgcaggtatcaacttgaatacaatggtaagaggcaaataaaatcactgtgattcgaaagagggtccacataccattgtacatagatagaagccaacggttgtaaagaagaatgacatcatacggaagaaatcaaggagctggccaagtctgtatacatctcgactaagaacctgttcacaaatcccaccagcaaccttcccttcaaacagagctatttgattgagcccaacatctcgccctttgcccacctgtaa

SEQ ID NO: 54256 - DNA, 469 bp, Arabidopsis thaliana landsberg
gtttgctgggtaatggcaggagctaaggagtttgggagcttgggctcagttgctgccctgggcgtggtcgggtctagtttcagcaacaatctgtaatcaccttcgggtttataagggttttttgggagagttgctctgcaacttctcctctattgtaatgtttttccttttcctctctaatatataagatgcgcagttctcctgcggtttcttaaaaaaaaattacaagttagctcctgttgtgaactgcgatgcactcgcaagatagtcccggtactcagccttcccgtaggaggccctaggagtaaaccagatctactattcttccttccctctactaacaccctgcccctccttatatagagaggtaacctaacttttttttgtcaaaagcgcaggggaactgcgccttaaaatatattaagaagaggaaaaaaaggtctatagtagaccagggttacaacattta

SEQ ID NO: 54257 - DNA, 449 bp, Arabidopsis thaliana landsberg
  unsure (1)..(449): unsure at all n locations
ggaaaaaatataggcggtaaaaaaatatatataaataaaaaaaaaataaagataaaagaaacaggaataccatgaaaaaaaatctacaggaataaacgtaagaatatacagataaacatagagaagaaaaagaaaagaagataggtgggtacttggatttgaagggtggtttaaggcaaaactatatctggatctgtgatggcttgtatcggaggtaggcagtggaaggaattaattgagacnnnnnnnnnnnnnnnnnnnnnnnnnnnnnnnnnnnnnnnnnnnnnnnnnnnnagtgttgtatgtagggattagcttggtgtcggcaccggaagaatagggttcgctttgtgttctatctttttgattggtaggggattagagngtatacaggtactggttgtatgtgggttgctttattatggaaggtttgctctgggtatgatttg

SEQ ID NO: 54258 - DNA, 1014 bp, Arabidopsis thaliana landsberg
gtccaagggaattcaaagctgaaaatttcatatgtccaacaatgttcttattctctagaatattgcagatttaataaattaataattctacatatatctgaaaagaaaaggcttgagttatgtgaaaagaaacctatgttttgaatcaagtcacttgcctgtttggttccttttcttccaccttggtagtctgagcctttagttccattaccagccagagtctgtactctctcgttgacaaaatcaatctctctaccaacaacaattaatgaaactccaaaataagatgccgaaccaaaagtttaagattcctacttgcattagaagacatagttacatacctcaaagcatgattctcggtgtcagcaacataaagaagattcttcttagcattataagctagtccctgaaaaaatacaatcatgtatgcaacaacgaatctatcgatgaacaactaatacaaagtgagagtatatcatatgtacctgaggacgattaaatgcagcatcttcgaaggaaccatcttggaaaccttcttctccactgctgccaatttggactatgaaatttccttcgagatcagttacaatctgaaaatcacacagaatattgatattagataacaagaagagatagcaagggttacagaaagaggctaggacatacaatacggttatggttactgtctgagatgaatagcctgttattaagagtatcaatagccaactttcccggaaatttcaacggagacgtggccaaacgtggatcgctgtctttctccaaacgtgttggaagcggagtactgtctaatacattctttccaccataatatgtcagagctgccgccaccacgtcatcaagatccttcaaaggaaaacaccgaagaacagttaagtgatttgactaactatttattttcacataaaggacgttttcgagaaacagagcattggtgttttccaaaatgaaatctagcaataacgtgagagtcttgacttgctaaagaatctaaag

SEQ ID NO: 54259 - DNA, 744 bp, Arabidopsis thaliana landsberg
aatttttgcaggtaaaatccttggatttgcataagaactagatttggggagatgttttagtatttcactgcgcttaagaatgttgagttcgttgatttgagctgtaacccgtttcaacggtggcttatctttaccaatggagaacatttccagcatttccaacactctccgtcacttgaatttgagccacaatgcgttaaatggcaagtttttcagtgaggagtccattggttcgttcaagaatctcgagattgttgacttagagaataaccagatcaatggtgagttaccgcattttggatcacagccgagtttgagaatattgaagcttgctcgtaacgagttgttcggtttagtacctcaagagttgttgcagagttcgattcctttgctagagctagatctaagtcgaaacggttttacaggttaattcaaatcttacaacttttctcttcttgctacttttagggtatacaggaatagaattattgaactttatgtcattgagcattgatttgactggtttcatggtcttgactagacacttgtgtcacattgtctgaagctgttgtataaatgtatattaaaggagtttcttttggttcaaatgcaggatcaattagtgaaatcaattcatcaacgttaactatgttgaatctttcttctaacggcctgtctggggatcttccgtcgagttttaaaagttgctcagtgatagatttgagtgggaatactttctcttgc

SEQ ID NO: 54260 - DNA, 998 bp, Arabidopsis thaliana landsberg
gaaaaagcacagattcatgtggacgatgattcggtttgtttgctttaatttgcaattagaccatagtggtttttattaattatagcacctaattaataacatgttaatacaaaatagttttttttttattaggcactagatcacatgtttgttgtggcacctaactcataatatgagtggacaaatttctctgtgatttttttgaaactcattacatagatcttcattctatgtactttaacaaacaatttttttttaaaaagattattctatgttcgttcgtacatatctaaaactaaattctgcaatcataattgtagcagcgaaatcattggaagcgctagcatgcatgcgataacgtcgtcttgaaatatcactgaaattatttcaggattcgtgacttgaacaaattcaagttcgatctgtctttttaatttatatacgttcatcaggttgggaaaataagagagaataaaagtgttcaacttaaaaaataatggaattagatagaaaatttgtaatacaaaatattatttactcataaaatcgaagatcatttaatttggacgtaacaattttatggtagtgccactttatgtaaatataaaaatcgactgaaacgagatattttatatcacgaaggaaaaaaatgtttttgtttattattatcttgcggtagatatttttattaaaagaaatagtttaatcatggtcgagaaacttatctgaatttaaaaagacgtataatattatgaatggatacaaaggtttgacctaaaatttggaacgttagagagaaaagatcaaaagagaaggttggccggttctattttattggtggtactcgacaatttgtttttgttaccaatcacctgtaataaaatcacataaatacgtaagaaagatgcggtgtctagatactgttgacaactataatccatcgtaagcagaggaacttctacattttttatttcaaattcgaatatatataaaaaaat

SEQ ID NO: 54261 - DNA, 730 bp, Arabidopsis thaliana landsberg
ctaggggtgatactgatatgaatatattaattgatccttctcaattgattcatccaaaattattttaaaacaaacatcgctttctcgtatgttccagaaaaaaaatatgcatcgttttttaacaaaccaaaaatgtaaagtatcaatttaatgacatccttaggattttgacgatagtacatatagatcgatatatgttatttttattttgttaacggaactttactatagaagtttttcaaatttatttaatttttttttttctgatttacttgttttggcttggattcagatttataagtcttttaagacaaaaaattctcttctatcaaaaacttaatttgaccttttacgaaacgatctgtatgtcagtactaaaacaattaaatcttattgttgataaaagaaatctattatttataataaaactgcaacttgattaatagagttctttctcattaatccaatttggtttgtgtataaaccatggatccaaatccaaacaatcacattttggattcaaaaatgtaaatacctctaaaacaccttttgctcaaagtactctgtcaatctagttattgtttgcaatgagcaataagctagctcacatctctctgatttgagactaaccggtgtaaaatcattgttacacttaatatctcgcaagcctttccttaacataaagagagaccttgctctcagaagtttcctcccatcatttgaagccaga

SEQ ID NO: 54262 - DNA, 504 bp, Arabidopsis thaliana landsberg
tacaaaaatcaatatagtacgacacgtgtgaatctgtttaattgatttatgaaaaaagagaagaaattattgataacttgaaaattggtccaattagttttaaaatgtaacgaatagacccaatcaaaagaaaagacaaaataaagtatagagatgatgaattaacggctttggacaagccacacgattcgctttgcttatcttgctccacccaatccaaattgagacacaatctctatcgaatccacgcgcctctatcttttttcaatcgagtcgccattaacatatttcatcaagctcagtccactcttctcatgaaacttcatcatcatcgaccttgaccctgataggttataaaagttactgcatttgatctctctttgaactgcttctgttgttcaaggttccaaacatgctcagactcagtaattgaataatgggtattcttgttgcaggtttcagacgacacccattattgtaaatctgctgctggagtcttttttg

SEQ ID NO: 54263 - DNA, 939 bp, Arabidopsis thaliana landsberg
actttgttgacgcgcatttgatgccgaatcatccaaatcggtcacgttttctacatgatttgtcgtaaatatgatatacactaacgtgagtaccttaagatctcaagtatatagttaagatcagatcaaatcagaaacacttagtttgagtttcgatttgatcaaccatataataatatatggaacttctagctagcatcatggctttcataatgtgtaggtacgtgtgagtatgagtacacacgtacgtatgtcgtgtaagtggagaatccgatgcccaaacgagtaagcaagcaaaagcaatggtcaaaaagcaaccgatctcaattaattatcttattgtaaaaactcaataaaaagttaagggaaaagaataatcttacaagacatgtatcctccacaacaaaaagaggactgtataaaactatttttttcatgagaccaatgattcgtataaaccatttaaatttgatcaaaccctcacaagattgatcaatcaattctcgagtctctgtttcggtcacataaccgaaaggaaacttttttagtcagaaagaaagatttttggagttgaaagcaacataagagattaatggatgggtcagctggtccaagagatggaggagctatgaagcctgtgattttgagagtttgtgttgctattgtattatcagcaactggtttgattttggctaggtttgtgtctcggaatgaaaataacgaggtaacttcttctacaagtaatccacagtcttcttcatcacctatcagagaaaacgacgaggaacaagaagcagagagtccgaatcatcagaagcaagagattctcaccttaaaatccaaattctatgagcttcaaaagaatgaatactagatggagtttcctttcgagcggttttgtaacttgaaagatcacgatgtcatgcttattgagcctaa

SEQ ID NO: 54264 - DNA, 1013 bp, Arabidopsis thaliana landsberg
  unsure (1)..(1013): unsure at all n locations
gctgcatataaatacataagtttgtgttattaatgtcagatgcttaactttcccgatacaacaccacgtgagatatgtctggatttaattcgtcgttcgactacatacagttcattacatgtagccaaagaaaataaatgaatggaaatcttgtttactctccatttgctctaccgtagatatttctgtgctcaatcaatattttgtattcaccttgaaaaaaaagaaaacaaaataacaattatatatcttttctggcagaaggaagggatcaatcatagttttttgttttgtttttcgttcacatatattgaaagaagatatatatacaaatcccataacgaggtacattattcatatacgcaccaactaaataacggacaacatacagttgataaatttggcgttaaatcggtacgtaaaagagtgagagacgatcaaagtagatcataacgtcatactaagagtaggagttaattatgaagtcagacataaaacaaagtgaggtatagcatacattattttatttttaatatgcaagctaattttaggacacatacctacttatcacttaccaatatcctaaatgtcactagaggttcatttggtttattgactcatttctctaacctagctaacacgtaagtaatcaaaatcaacatccaaaggatacggcacatagtccagtttatacatcatgctcaacgtacaagtttataagttaatcatccacagtccacactttgacccttcttaggagcaaaggtccgacttagctagaaaggaatgtaacccacaaaggttcttaaaggcctagttactgagtgatgattaaaggtctctttctaagggtctcttactgacgatccacatntaattctctaattgatgtttatcttagagaatatttgttgtcgagaaatagagacattttcaaaaaattaatctccgcattcttttctttatgatatcttgtaaataaggtgaaagttcttatatataatcaaaaaaaa

SEQ ID NO: 54265 - DNA, 1280 bp, Arabidopsis thaliana landsberg
gtacctacttattattacatatgtacttgttatatgcttctttcttatacaagtatatggtgaaaagtctgtacagcttgggtattgaaagtggtgcaggtgaattatgtgttctttactccgaagctcctggttctttctctgttgattcaacatttgtcttgtccaagcttatgcgcgagaaatgagacttgaggccaatccaacactggtagtagtcgtgatccaggaaaggagactccagagcccaatgacagactctagggatcaatgctgattcgaacatgaaagccatcgtacctgtgagtttagaaggagccattgcatttactcgagcaattgtcgcctacaaaacaattataaaaatgcttcagacttaattttacattcaggggttagatttagacatgatctcggaggaaaatgaaagcaaacgtgtagttgctgctgtgcataagatggattgatacctcgtacgtggtagtatctggaccatgaggtgtcatacagctatgaagacttgcaccgccagggagaaatccatcagctttcgcctgtgaatggtggagtcagtttacagatttcagtaggaggataacacaagccagctaatgatttgcagaagcaggaacttcaagcagcttacctcgtatgcaccgtagattaagcccataaattcactcatgcagttacgatgatagtaaggaggtcgaaaagtatgctcagcaaccaaccatcgaggaggaaatatgacaaaatcaagcaaggccacaccaggtttatcagttggtgctgtaaggactgagagtacaataattcacccaaagagtgtgattacaataaagaacaagtaaccaacccataacaaaacaaaaagaagaatcgatttagcgcagatgaccaccaacctgtatttatagatggatctccatgatctaaaagcacagtgttgtatggacagaacttcttcaggtcatactgcagacagaaattgaaattctcagaaaaacaatgcattaacgttttacaagattaggctcaataaacaatgtactcaccttataaggcacgtaattgccatgccaggcaaccacattgaatggagagaaatcttgtttagcagtaaagagttcacccgcaaaccttttgaaaaatggtgtattcagggccgcaatccatcctcaaaccatgctgttggtgcaagaaaatctcttgatgcagcaagaccattagcacctgtacacatccaccaataagattcttgcggagaatccatgtta

SEQ ID NO: 54266 - DNA, 540 bp, Arabidopsis thaliana landsberg
cgcaggttgagcgcgaattcaggatggaacgggaaatcacataatagaatacttttttctctttctttcagatgacttcgagtcgaatcgtttgtgtatccgccattgatgatctctcgaggaacccctctggtagatagataggggcccatgaagagctggcccagatgttaacgtctccaattattaagctaagttttcaaaccaaaattgttacttttgacactgattttgaaaatttcacaaacattttatgtaatttattgacaaaacgggattgttaaactatcccgccatctttaattgatttgtgtttaagaaaatcaaagttcaatagtgccacaaaatgcaatgttttaagaaatcatggaatcatgtaaatatttttagaatctagaactattattatggtttttacactacataggtatataaaaagggtggagcatatgatgagacacaatgtttcttatgatgggatgtatgatcaacacactgatctgcagggtagaagacttttgttttataaaccatatatat

SEQ ID NO: 54267 - DNA, 638 bp, Arabidopsis thaliana landsberg
  unsure (1)..(638): unsure at all n locations
tgagcatgtgctagaatgggcatccataatagtaaatataagaaacagtttttagtactaatttattcagtattatccaaagaagaatttagtggaactgttttgagtgtgttgtatagttatgctatttctctcatctatttgcggctcactacaacgatgtgtacagtacttcattgctgaacttggttttcaatggaaattgcctagcatctgcattgtaatttttcatgctccggtcatctcagattgtgaatacttatgttttctgtaataatcatgggtcattttgactacccagggaaattcggagctgtgttcgcctcaattcctgcacccatctttgcagctatgtattgtatcttctttgcttatgccggtgagtgaagaccttgaacctacttgtgtttgttctattagttcaaactatgacgattgatgcatcagatatgtgtaatgtaatgaactgtgttggtaatttgtcaacaggttctgctgggatcggcttccttcagttctgtaactcaacacctttaggccaagttcaccttgggttccagtttnnnnnnnnnnnnnnnnnnnnnnnnnnnnagtaccactatgctggttaggtctgttccaccatcaagatgggatgt

SEQ ID NO: 54268 - DNA, 506 bp, Arabidopsis thaliana landsberg
agatttaaactttttttccggtcaacagacattattcggcatttgaactgatgcgtctgctcgtttttttcagaactgatacgcgagcgccatcgccgtcgcgtaacgtcccgccagactctccacgccggtcgattcgcttttatattccttgagtccctgcggcttgccgtcggcgaaataaacgacgcgctctttgccggcgccccaggcgcgatcgcccgattcattctgtggaaagcgccagccctgattgatcgcggtggtcggtgacctgttgaaaaagctggtcgtgttgcggatgcaatttcagcatgcaatcaagtgcccattttgctttgacgaggatgtccggaattccattggtgccacgctggtccaatgcattgcatgcgtcggcaaatttcccggaaattttttcgcgcggtttttttgttccaaacaaaaagcttttgcgtaccatatggcgtttgctgctcggaaagtagtcacgccaggagcatttg

SEQ ID NO: 54269 - DNA, 634 bp, Arabidopsis thaliana landsberg
tagtcaacgttggaactcattttatcaatcccctaccacaatcacttttttataacggccgctttcaatgttatggcgccggtggtaagtgcgtagagaaaaccgctgcaggctgcgctcatatcgtacccccaggcattggtggcgcctatggcatcgcagatcaggttggctgtggcgggaaataccatatcgggtgttactgtggcacagatcaggcaatcgatctctttggggtccaggttcctttttcgcaacagttcctgtaccgcaggtatggccatggcactactgcctttaccgggctcgcgcagtatccttctctcttcaatgccggtacgggtacggatccattcatcattggtatccactattttttcaaggtcgaaattggtaagttttgtttcgggaacatatccgccaacacaggtgatggctgcagtgagtttgctcatacttgataggatctactgaaattaaagtgcaaatatcatgggaaaagtcaaaagtgaaaagtcaaagtgaagggcaataattagcagccctccaacaggcggtcattaaccaattaaccgattacttatcaacgtgtcaaccaatcatctgattatcaatatattaaattcttttctct

SEQ ID NO: 54270 - DNA, 788 bp, Arabidopsis thaliana landsberg
tgtaatgcccataattgagaaatagctatattcattatggagaggacccattcttgtccttgatttctgaattcattgtgcaactagcttaagttcattatgcaaaggttccattcttatcgaaacacgaagctgtctaaagattcccagtttattccttcttttgctagccctcttgatcattgctgtttttaagaagagtctgcctattccacagtttctgaattttatgtacttctatttattgcaggttaggcaaatcacggtaaccgtaaggtacatttaagctttaccacttttctatgtactcatcacaagccattctcgcaaattcttaagactaaactcttcattttgatccgcaggactatcatcaacggtatatgctatctagcaacatttgttttcggtctcaacgcgttcggacttctcctttactctggtcaattagccttcaatgaagattctgctgaagaaaacatgaaggccacaacacaacctggagactcatcatcaggtgacaacagtgaagtaaataaaagcaatgaggatcaaagttcaggtgattgattagtccggtctttactatgaaacatgtattaataatatcatattcatgtagccaactatgcataaaattgttttcttcttttcaatttattgtaactatctatctgtttgttgggaagcgttagttgttgttagtttcgatgggacttcatcgaccagagagtgagacattagactaacggacaaaaaaaacggatacagattttcataaagaaact

SEQ ID NO: 54271 - DNA, 1076 bp, Arabidopsis thaliana landsberg
cgagtgattagtctatttctgttacatattaattaatgttggtgcgtacctatcatttttcatattttacatctgtgtttcatcgttttgatccacatgaataaataaataaaaagtttatatttatacatatatctttgaaacaaacaaccctgttagacttacgttctttctttacaataattagttttaaatagagataaattacatatggtctacctaaaatatacattgaatcttgaaacgataattgtttacttatagtgtaatagaaagagaattttaaaatagtcttactgtcatacgtactgaataaatactagaagctaaaagaaataacttcgaatgtaagaaagaaagtgaagtggtagtgttgttgtggtcagagaaaagaaaagaaacacgaaacatggggaaggcttcagtttccaaagcaaacggcttcacacagtttcagttcacatgaatctaagcagttggatctcccacactcttttccttttccaaaactatatagtacttactagtatataatagaatttagatttgcttttttcctaattttagtgttaacgacaaaaaaaagagtatttaatagtattattagtaatttacttttaccgacgcatctcagaagttccaattcgaacaaggaggagtaggaccgtgccggtaaagagcctcagtttccacgttactgttcgggttttaactgaaccaccccatgtgaacttttttactgttcagattttagtttattgatagagtggtgtttatttctcctaatccgatcattttattttccaaataagaacagctttgctttaatccatcggtactaatatataattcggtgatatttttacgatataataaaactagaggtttaagaaagatagcatttctaagtaaatcaacgaagagaatttgaaatatatatacccaaaataatgattggttacaacgactaaatcatatgatttgaattatattcgaattggtttaattttcttatgatatcaagaataaagtcggcttattattacataaaatgcatactaaaaagttgacgccga

SEQ ID NO: 54272 - DNA, 863 bp, Arabidopsis thaliana landsberg
tatatattgacttgtatttttgtggtttaacgcaaatttacacaatcttatagaaacatttgaaacaaaatccaaatgtcatcattatgtatgtattagtctttaaacgttctccgaccgttcttcgcacgtcaaactcaaaagtcaaattgaacagtcctatccaataatgtacgacagaaaattttccaaaaatgccctcaaaagagacacagtattacagtaaagccccgaaatattggcgcctattcgaatttcccactaactaaacaataataataataaatggaaatgaaaaacacgaagtttagatgatcttgagagagagagagagagagagagagagctgacacatatcactctctctcatttaccaaaaacggtaattggagaacaaatctagggttttcctttcccggtaaagttgttcactttctgtctacccatcactaaaaatcgcaactttcttttctctttcttcttcttttcgggttttatggaggaagtagattgcagtttaccagtcacgaagaccacggattcttgtccgacagaggacgccattcgagctttattagaaagcttagtcgaccctttgcttccatcaaaaccaactgatgatcttccttccacttctatccgtgaatctgttgccaaacaggtgggacttcgaaatctcttaaattggttttcttaattagactgcaatgccttgtttttaaagttctgtttttttcttctttcaaaaatggtgtttgtttgattccaggttcatgctgttgtgttgctctacaactattaccacagaaaagacaatcctcatcttgaatgtttgtcttttgagtctttccgtagcttagcta

SEQ ID NO: 54273 - DNA, 1026 bp, Arabidopsis thaliana landsberg
aaaaatctttccagcaaattctcaccgaccgatatgagtcccgagacccgcagacggtttactcagagaaccaagtggaagaaattttgaatattatgtctggtgtgcaagcaactcgactcccacaaccccagatatataagatatccggttgagctacatgtttggtcccccaccaagtttaggaccatcattcccatcacaagactttgaagaaaacaatatcaaacactcatggaagataagaaatccgaacacaaaaaaatctagatgggtcgataaaacaagttagaatagcagaaacaacactaaattggcaatgagagaacgcagcagccggaactatctcttgagccaaattaataaaaaggtatccatcatagacctttatatcaaagatattaccaaacaaatttcctctctacacaaagaactccttcatctagccaatacagttttcataaattcacccctcatgtcccaaaaagaatcagaactaaaatccctaagagcccagttaaattccatacaaaactagccaaaaaaccagccaatacaatatgatcttttcacaccttaccccatttatacttcgccttatgcagttcaaacacaacctttatctttttctcaagatccaagtatttttggttcatcctcctttttaccaaaaagggttgctatagaaagacaagccataaaaaggaagcaatcaacgggcaaagaaaaagaacatatcccaagcacctcaaagcctcaaactccacccgaaagaaatgacaaacaatttatggtggaacatgccaacccaatcactactttccttgagaaggttgcttatcaagaaagaaatcctaagcggcaaaccacgacaacaatgtctgaaaatataaaggatgaaccagccgaagaggtcttaatcccgcatttcatgatggccgaaccaactgtagaagaaaaggacatggagagcgatgatggcagaatctatgaagaaaggtaagaatctcgtaagcctccgctaga

SEQ ID NO: 54274 - DNA, 446 bp, Arabidopsis thaliana landsberg
gttcctttgctcagggacggggctaaggccgcggcgaaacgcggcaggttttcataggactttccggcgatgttcatgcggccgttttcgatcatgtagatgccatctcggacgcgaagctcagtgacggcctcccggctgagcgggagcagggcgaacatgccggtctgctgcgccaccgaggcgagttgcggcacggctcgcgccagttccgcacgcatggcgttcaggcgggcgcgcatggtggtgagttcggcctgccagcttgcggtcagttcgggtgattccagaatggtgcgaaccacagacgcgccgtgatcgggaggcatggaccacatggaccggccgaccttcatgcatgtagcgcgggcacgtagcgccgcttgcgcatgggtgaccttgatccacagggcgccgaggcgctcgcggaagaggccgaaattctt

SEQ ID NO: 54275 - DNA, 249 bp, Arabidopsis thaliana landsberg
ctctagaggatcgagatgatccctgaagccatgcaaattggtaattcgcttgcaaagaatagttaagctttaaattgcgggaacatgcatgcaataagagaattaagagtgagatcccttcaaaagtagagctctcattgttgtttttttcttttatcaaggcatttcttgttgactctgttatgtcaagtatggactagtattagtaatatagtatctagatcaatttctataggcaatcgtatattg

SEQ ID NO: 54276 - DNA, 1207 bp, Arabidopsis thaliana landsberg
agaaatcactttataaagaatcttttggattctcgcttagtatattcgcattcccatcttttacttattctacttactaggagcaaaagttattagttctttaatttgattgctagatagtgctggaaactttatttcaggaaatggaatttttaggctggctaaatagtgttctggattcttgagggaccctgttacgcctaaaaataatgttgtttttttgaagctcatcaaaataaacattttataagacagtaaaaaaagaaataagacaattatatttatgtagtcaaacgcttgtttttgctggatatataattacataaaagttgcatttatcctttaatcaattgccaaaaagcaagaaataatatcaatccaatcttataaacaactatattatgaaaaagatgataattattgtacgcaagatgttatacgacacacgtaatttgtagatacacaaaaaggtcaaggtcaacaaataacacgatcaattgcattaaatgtgtactagcatgattatcagaaaaaaaaattgataccatcgatagacgacaaaaccaaccgtaatttcaaaatttccgtaattgtttctcttctcttttcttgttttatcgacgattatggaatttgtttttttttttaacggaaatgtttggtccgacaacgtgacggtaaatcctccactgtcttcgcttaaggacaaacgacaattactctttttaactcctcgtttcacttgcaaagttatttcatcattttagtagtttactctcattctactaaatttgtatttttattgtaacataacggtaatatcagtatttggttagttgattatgtgacatgactatggataataagacttgatatgaattcccatatataagaaatcatcgacataaaactactttatctactaacttcataaggcaaaaatgagtagataattagattattagaaagagagagacaatgagattgatattttttatatgggagtccaaaatcaagatagatatacttgaaaacactcgaaccccacaaggatcgacaaaatatttctttttaaatagctcaaaaaaattattaaaaaaattcaaaatctttttaaaatatccaaaatgttgaaaagttgtaaatcgataaaagagaaaaataataatacttgtgcccatagagagaaagagagagaccagagaag

SEQ ID NO: 54277 - DNA, 865 bp, Arabidopsis thaliana landsberg
caggccaaaatctataggagaatatgttaatcttgactatttacatttctgtgcatgaccacaggactgaatgtagaagggtgtgccgtttgtgtgttgcaggcaaggaggctgcaggagaaaggatggaaaccaagatggtttgaaaaagatgaagaaggaaattatcggtatctaggaggttactgggaagcaagagagaagaaagattgggatagaatcactgacattttcaagaagcaacaacagcgtaactcgctctcatcttcttcatcgtctacctttctttaatcatcaattatcccatgttttttttttgtgctttgataatttaatacatatagaaagaatcttcaccattccctcattgtgcttctgtgaaaatttggccggaacctttgttggtgtgcgtgtatctgtagatgtcaaagagactaattattggaaatgatgaatttttccttcagaattccaatcttcatgtttgttagttcatagaatggtggtaaaaaccaaaaaaagtatatggcaagaaggaacaaaatagtaatttattaatcccactgtaaataaaacgtatgatgacaggaaaaacgacaattttatgccgatacctcaatatcaaaactgcagacaaagaacaaaacataattatgcaaaaactgaaccaaaacaaaactgtgtatagttttgagacggaagaattgagagatttggtcattttttcacttccaagctttccttcctctaaactggcttccgctgatgctattcttcatcttcttaattcgttttgatttaccagcctttgatcttattgcagcaagaggcatattctttctgtgctccttctgtttattgcttg

SEQ ID NO: 54278 - DNA, 884 bp, Arabidopsis thaliana landsberg
aactgttgtctccttttataacttctgtctttgcttctgatcagacattctaaattaatgtgacgacaagatggtatctaaggtttctttttctccagtacaggtgtggggggtactaaagccaggttttctcgccttattggaagatccatttgatgcgaagctattagatataattgtttttgatgtcctaccagtttctaatggaaatgatggtgtggatatatcactagcagtagaactgaaggatcataatcctttgcggcatgcattcaaggtcagcaattactgtcctacttatcttttaatcaattatatgtgtgcttactccatctaaataagctttcttgatcatctttttatacaatcctccttgtttgataatctacgatgttgttcttttatgcttcattgcttcttagagaaattaaaataaattgtccaagttatatatccgaattttatttctattacgcatggacactaatgcgccgtggagaactgataaccaagaaaattagaatattccttttgttgtaaattaaaatgggagcctactgaatccttcttttattagctaaaagttgaatcatcctcatttttcttgcccctcttctgctgcacaaatatttctggggttatatgtcaagaaagctagggataatccatgtatataacttttgttaaaatatcccaggtaacatctggaaaccggagtataagaataagggcaaagaatagtgcaaaagttaaagattgggtggcttctattaacgatgctgctcttagacctcctgagggttggtgccaccccatcgctctggtcatatgctccgcgaggggtctgcggatgacggagcaagcccagtggtttgtagatggtg

SEQ ID NO: 54279 - DNA, 1083 bp, Arabidopsis thaliana landsberg
gaacgatgacctacctacaatacaatcaagttcattcaaatataactatacgaaatggacacgttgtttatttcattacacccaacttgtgttaggtcttttagttagtgcatgcttctcttttctatcttttccaaagattgatgtttccagttgttttagctagattgatgttactagttatctaagttgtgtataattcttttcttacttaattcgatccattggactttataatgtcaatctgtaacacaaataagacttaatgatttttgtttttttaaaacaaaaagttagcagtagtagtagtatctagattttctaaaaaaattctgtgttaagatttgatttaaataaaaataaaatttatcgttggatttctcgattaaaagtttgaaattcaacaagaaatatgttatgcagtagcgtctatgacgacgacaaaaaaaatcaaaaaataaaaaaaatatatatatcaaatgaaatcaaatataacagtaaaagtaacacttaagccgacaaagcttcgtgtaaaaaagtagattacagtgtctgttcaaacccagtttatcacgtgcccaccaaaccttacaatttgcaactcaattggcttcttcggattctctctttttcttttttgttgatctctttgaatttcagcaaaataagtagattagaattttgatttaccttagaaatatttttattatatttctcaatattggaattccaacggtggctccgtttttataatttactaaatttaataaagtatcctctctagaaagtatgtaggtttattttcactactaatctttaaaaagattgcatctatttcatattgtaacttttgagaaatatatttttattattttcttaaaaaaagttaaacatgtttttttcttaaaatctttttatgtcacagaatttcttaaacataaacttctctctatttatcgtcaattgattttgagttgaaaataattcatattgagtattcataatttctaaacgaattgatataaagatccttttataaaccgaattagagaaaccctgtaaatcttctcattgcacaaatac

SEQ ID NO: 54280 - DNA, 397 bp, Arabidopsis thaliana landsberg
  unsure (1)..(397): unsure at all n locations
ccccccccaannnccttttccccctctctttttttttnccctcccccccttttctttttcttcctcccccccttccccccccccccccccccccccccccccttccccccccccccccgtcctccctctcnctccctccgtctgtgcccccccccccccccccacccccccaccccccccccccccccccccccnccttttccccctccnnnnncnccccnnctcccccccccccccccccttcttcnngccccccccctcccggccccccccccccccccccgcgccccccccccccccccccccccccccccccccccggctcccccccctccccccctcccctcccccccccccccccccccccgcggngccgcccccccccccccccccccct

SEQ ID NO: 54281 - DNA, 590 bp, Arabidopsis thaliana landsberg
taagataattaatgaatataaaaattcataataccacaaaaagatttcatatgctatctaattcaaggctttttctcttatgtaccactcattattactaccaaaacttggactactcaaatcccaaaaaaaatattttgcattatctaagtcagagtagcactacttgttatcacaaaaataaccaaagaaataacaaagctatgaaaaacttacgatttggtaaatttgacggtcatcgcaacaaatcacgatatttttaaccccacggtgaattgattcatataacccagtaattagtgctagaaaatctgcttcttcgtggttaatcacagcttcattaagtgatttattcattccatagaataagttatccgcctcgttgtatattgcgactccaaaaccaactttcacaatcgttttcttgtatgacgccgttttaaccgatcaccaaacccttgaagtacaatttgtagactacattatccacacaactttgtgtatcaaaggttggattggccaaccttagaacttccctcacctttgcgaatagagatatatttggctaccgcataatcaatcgacgtttt

SEQ ID NO: 54282 - DNA, 505 bp, Arabidopsis thaliana landsberg
taaacttatttgttcttcctttcaaaataaatatcgtttgaaaaatatgtatatttattcataattcaattatatctttaataaaaaatctgataaatgttttacaattttacattttgcctttaaaaagtataaattaattttacaaagtcaaaataataagcgatataatcttcatatatatattctaaaattttcacggtcgcatacattatatttgaatttgttttaaatagttggtcgtaagaacttcaaatttggtattattaaaattttagaaatttaacgatgatgacgatgagttatattacttattattttttattttgtatcgactcatttgtattatttaaaaacagatgattaaattaaaaaatatggcaattataaaggttttttttttttgtagaaaaccatatttgtttgtgtctttgttaaaattttgactcttgttattatgttctgttgatatagtattttttccttgtagaaagatttttaaatt

SEQ ID NO: 54283 - DNA, 914 bp, Arabidopsis thaliana landsberg
tgctccgttctaggatcgaacctgatgagtttacctttggaagcatattgaaagcttgcactggtggttctttaggttacggtatggagatccattccagcattgtcaaatcaggaatggcttcaaactcctctgtcggatgctctctgatcgatatgtattcaaagtgtggaatgatagaagaggcggagaagatacatagtcgattctttcaacgagccaatgtcacgggaacaatggaagagcttgaaaagatgcacaataagagactgcaggaaatgtgtgtttcatggaattcaatcatttccggatatgtaatgaaggaacaaagcgaggatgctcagatgctttttacccggatgatggagatgggtataactcctgacaaatttacttatgcaacagttcttgatacctgtgcgaatcttgcttccgctggattaggtaaacagattcatgctcaggtcatcaagaaagaattgcaatctgatgtgtatatctgtagcaccctcgttgacatgtactcgaaatgtggagatctccatgattcaagattgatgtttgagaagtcgctgagaagagatttcgtgacctggaacgccatgatttgcgggtatgcacatcatgggaaaggagaggaagctatacaactgtttgagagaatgatactcgaaaacatcaaaccaaatcacgttactttcatatcgatactccgagcttgtgctcacatgggtctgatcgacaaagggctcgagtacttctatatgatgaagagagactatggcctggatcctcagctaccgcattactcgaacatggtagatatattaggaaaatccggaaaagtcaagagagcattagagcttattcgagagatgccatttgaagcagacgatgtcatatggagaaccctg

SEQ ID NO: 54284 - DNA, 739 bp, Arabidopsis thaliana landsberg
agctgtatctttgcttgagtgtgtgtcctctactgtgtttacaaattggataatttcttgtctttactaggaagatgagccaatcttgagaggccagcaaaagtctgaccctttttttttttttttgagtttttttctcttcttagcgactgaatccaaacaccaaaggacgaaatttcagtttcaagacttcttagctttttgataccagtttttctttaacttaaattcaaatttgacttatggtacgaggacttcttgtgtgcaataaattattagcttaaggacgttacacacggaaacttggccaggtgtattttcataaggttctttccacttgcacaaaccaaataaagaagcatttttatgggattcttgtggatatgatgagctcattgtcttttcttctttttcctttttggtctctacttattcgcattgaaatcgaatcacttttcagtctttttataaataaagcaaattgttttataacctaactgttgagtcaaagaaattgcagctttaacttaaaatgttcttcactgtggccggggggaatgattagcacatagatgttatgttaacctttgttaccaaagatatttcagctacattagctttatttctcttttgtaagatcagtgatataattgacgttccaatggtgtttcagaaccattctgtctttaaaaagcaaaatgaaaatttaagcaagcaatgggtgatggatctttttact

SEQ ID NO: 54285 - DNA, 1167 bp, Arabidopsis thaliana landsberg
tgtgtgtgactaatcttatgttgtatccgagtttataaaaactgagagtgattgtgcaatttggtgcagtcgagccaaattgggcagcagatgaacttgacatgtatcacgaatggaaaaacagagatgtacaagctctctaacgataaaccgtctcggattcagcagttgtgttcccaattgtgcagatgaataccactaaacgtctaatttttatactcttgtagaaagttaggaatgtgtcttgaggaagagaagattgttcatttaacatgatcatgcacttgtggattcttctttctgatcattgtttgtttccacttcttgttttattgttgcatatgtattgaccatgatctatgtaatgagaacataggtgaagagaaagttgaacaaagtttttgttcttaaacattttaattataaattcagatgtttaatctaatcttaaatttcttttgcatttaagttgcataaaaatgaaaataatattttgttgtatatcaaatcattttatatatttaaatgaaaatttattagtgtaatagttatgtcaaatgataaatgtaatttactatcattcgcaactttcgaatttccaagaagaaaattatataattaatttaaaaattgaaatttgcttacttaaaagttaaaggagtctaatcatattttattatttcatacgtatatggttagtgcgaatacgaaaactccactaatatcttcttcatttttatatttttacgtacatgtgcgttgaatttacatgataatctataaggctataaccttatcacaagacacaaatcattattaactatatgcacaaaatagaataaataactatatggtaacttttttaaaacaaaattttgtattatataaaaaaatccagttaaacgaacatggaatatattactttttgaaaagtattgttatgtagtgtagtataagtctaggcgttcgaatattcgtttcggttttagtttaataccattctatttcgattatttcaattttgaagtttaaaatctatgtaaacacccgaaagaaattcggttatgttcagaatttatatatggttttttttatttagaaatctatgatccattcaaattttttttttttttttttgatgcaatagttttagatatggttatttga

SEQ ID NO: 54286 - DNA, 761 bp, Arabidopsis thaliana landsberg
aaactcaagccgcagcatcagaatggatctccaaagcccttaactctgatcaatgaaaaaggtcatactcgtaaattatgttacatgatttggccaaaactctcccaacaaatctgatttactggattctgcaatttgtttgttcttgtggtcttgttgtcatcttaacccttttgtttattttatttatttgatctccctacaagtctgggttgctcttgttggcttatttgtttgtcactagctgttttaacctttgtaatcggaaaaaaggtcggtctgcgttttctctatttcgaattcagacaattttgtaaaccttttgattgagaagaacgatcttttacctaaatactatggctgatagtttgtaattaacgcatctctttggctatcggttaaatctgagcagaatgatattgaatcatgtcattgcactacttttaagtctcaaatctctggcaagcatcttgtctcacattttatcttcttcgatctcagtccttcacgacaacacctaggaatcgcatttcaggatacaagaagtataaatgtaaattgcaacttttgcatagatactaacaccttgcactatccaggtactacaagagggacaagaccactcccccccctgttagtcttattaaatgctgaacaacattaatataatgagcgaacaacatagataacagaaacataaccaaatgtttcgagtaggcttatgcactttgattgtcaaagtgacatgatatatgaaggtg

SEQ ID NO: 54287 - DNA, 689 bp, Arabidopsis thaliana landsberg
tgccaagagtgtgaacaaaagtccacaaaacaaaagcctctgacggagaaggaggcttttaggtgttacccaaacaaaacgcacacaatacggcgtcgtttagaatcagaaaagacatttctttatggtcacttgattctctcttccttcatcaatcaatctcgtctcctggaaaacattagggagcctctcagatcctcaagaaaaccctaaatcaaaagtcgagatcgatggcgtccttcgctcgccgtgccatgagcttagctcagatcccatctgctcgtatttcctctggagccgcttctattggtcagcgtcgttgtctcgccggcgccgctggtaaattctctctccctcttccttctcttttcgatatttacgatttttttcggtatcaattttggtggcgtatagcttatttcgcacattttatgtctaatttgtgttttcacgaattttagatgaaccaaatgttacaactttgtgaagattttgtatatcattggcgttgtcaggttccaaattgaatcactgtatacaaaaaattgagtttttgagcattttgtggatttgtctgtgtactgtgcagatcaccatggatctaccaacgttgacttctggaaacagcccacgaacccaagaaactggaaagaggagcatgtatgtatcaatcatgtgtttgggacact

SEQ ID NO: 54288 - DNA, 191 bp, Arabidopsis thaliana landsberg
  unsure (1)..(191): unsure at all n locations
aaacccccccccnnnngnnnntttattttttttttttttttttcccccttccccccccccctttgttttcccccggggcggggggggccaggggggaaaaaaataaaagaggggggggggnccccccncncaaaaaaaaaaaaaaaaaaaaccccccnccccccccccgcccccccccccccccccccccc

SEQ ID NO: 54289 - DNA, 1280 bp, Arabidopsis thaliana landsberg
ctggtgatagggagcacagaagacactcacaagttaataacctttcataagagaggcaatgattgggggaactggggctctttgtattccatctaaatggtctttttaaaagacctttggcacttcgatgcccaaccatgtgaacttgactgctacatgggtcggatcagtcgttggaaccatgctctctgtattttatgttgattatatatctattcgtggcatatttgcacaatccaacgacttgaactaggactcatcatcctaaaaggatgttgagaagctaattaggtgtttcttcctgtaaccactccatgctagggttctttaattatgcataattacctgcttttttccatctaatctaaaccgggctaaggtttgattctgcttggcaacttcatagtcacatttacttcgtttccttatattgatgcgcattgtgaaaaagtttcctctagtacggtaaaattagtgtcaggtcataggaagtaatgtataggttgtggttaagtccacttgataacttctttgttactgtacattgttgaattgagtttacttttgatgccaaaatattgttacgaccaatgttttcttaagttatatatgatgtaaaagagagaaacctttgtattgtacggtatcaaaatgaactatatgtacttttaagtctgtcagattttgttttctttgaaaagtgatattttgtatcggagaagtgccatctgattcggaagcataaatacaaagaaagcatgtagaaagaaagaacgaaaataactaaatatgtaactcttctgttatctagaaaagaaaggaagagatctatagagtagaacattctaaaatataaaatataaaaaaatcgacttccaccaacctagagtttggcaaaagaagcctgaacctacgtaaagaaattattttgttttgttttgttaatagcgtgtcgcacatatccaaactttagcttttaaaagggacaagctatctagtttcacttagataactgacgccatttgtaaacgacagaatcatgacgtcacttttcttaatcttagcattggttttaattgacattaaaactcttatactttcaacttacatgctcccaaatagctatatccgatccgactagacaagatccgacccaatagcaccttataaagatgttctatgcaaatcaacaaatctcaaaatattttccacataaaaaggtttataatatctctctatttcataatctttttcatggcttacaactacaatatgcatac

SEQ ID NO: 54290 - DNA, 1262 bp, Arabidopsis thaliana landsberg
  unsure (1)..(1262): unsure at all n locations
aaatcacattgtctatatatccaatggacgattatgattcttatgtaaatcgatcaacatttttcacagtgatatttgtaatgcacgactcaaaaaataaaataaaactctcatcaaatattcgtttttcgattttaaaactctcccattaaaagataggtatttgagatttcgtaatcttggcgccatactataaattgtcgggtttctcattgcaaaatgttatataannnnnnnnnnnnnnnnnnnnnnnnnnnnntttaattatgatgatatattatctataactgtttgtataacggtcaacgtgttggtaatgaaacaggtaatactttcgttttattttattttggttatcctttagaaatgtcaactagttatctaaatatcatatttgattttaagttcaaatgagatacggtatatagtacaactataaattatagggtataaaacctatttcaaatcaaagaaaaacaataccagcatgatgtttttagtatttatttcttaatatgataatataatgttttcttagagaaaatgtagaagaggtgcaatgaatataaccaaatagccaataggaaagtaaacaagtgccacgaaggcacgtttcgtcgccagcaatgaatctttaaaatgtctgaaacgtgtctcccgggatttttttgtcggctactccacaattattggaactctcgtcgttttcctataagtaatgttttattaatatagtatgtgaaaatatgcaactatctatcgtacacattaaccaattaacgaccactcgtaaactgtttttaacgtccttgctttggcctatatgccttatagtgcccatgtctctcgaatggtcggtcgccaaaattattcaaactcaaatcgtgttgaatattcgtcaactcatagtcatagaggcttttattatcttcttataagtacacttaaaacacatttgacatagattgtcacttattattcaaaccgtaaaatgtccataaccattagttatatctcaatatactactagactatgcacagtttcaagagttttgcgtgctagtagggcttgagatgtaactagcaactattacaatcatgaatcctctaaaagtaaattccgatgaatttatacctgcttcaaggtaaatgatacggatgagaacaaacggagttatcttgacaccatcaacaatagaagggtattcccacaaagattgattcccagcctccttcctcgaaagataccataaaggatttat

SEQ ID NO: 54291 - DNA, 872 bp, Arabidopsis thaliana landsberg
gaatgtgtcagaaagagatgcgtttttcatgagcgtcaacaccaaataagctcttttcacgcccttccttaggcatttcgtttaataaataacatagagacgatatttaattatcaataatatgccgttataaagataataacagtttttattgacaatgtaaaagcacagcgattattaatttattatctttcaatttatatcttacaatggaaaaacaaaacccaatattaatctatcaattattcatcttaccaaaaaaatctatcaattattcataagtagtgattagtgaatgaatatatttcatccttcatttgaagtgtggtgacaagacgcgcgaaccagagaaataactctaatccggtttggttcgatttataatatcaaaatggtttaaattttggttcattaagtttgatcggtttggttgtggttttttattgtttcccaaactgccgatgaatagtcaaagttatgtcaagtcggtgatcggagaactttttgacgccgagagagagacagagaagaagcgagagcgagagagaaatggcgcaaccaagctaagaaccctgcaagaaagaggcttgtgacatccaagcctgtctttccaaaaacaattttcttcctcaaaggtgattgattccttctctttcttttttgctttcattatatcccgcactttgattattcatcgcgattgtccgtgaaatcgattctgatggtgaagtgctttttgcatttgaagattccttcatgtttcttatgacttatgaggctagtgaattggatatccatttaattgaacacttgggtctggatcttacttttgggggtttagggttcatggtttcaatcattatgttttcagc

SEQ ID NO: 54292 - DNA, 195 bp, Arabidopsis thaliana landsberg
  unsure (1)..(195): unsure at all n locations
cacgcgcgctctgccgcactctcgcacgcgcacgcacgcgcgcacgccgctcgcacgcacacaccgcgcctcactccaccactcgccacangncacacgcgccacgccacgcgccgccgccacacactctaccgccacactccctcgcaccaccgcgcgcgacgcgtcacctcgcaccacgtcacacatcacacc

SEQ ID NO: 54293 - DNA, 798 bp, Arabidopsis thaliana landsberg
acgaaacctctctctataaaacgcaccctttggatcgttcttgaatttggttttgagaatgtgctcgacgtttgcaggatctgcggtcatgattccgtaagccccaccgaaccaaattcctctgtaatgaaacgtcccaccagctctgaccacgcttctggtgcaccaagtaaacagatcgtgtttgtttagggctaacatcggtatgattcccaacactggccacatcactggcccacctttgctcactaacttctcacgcaagcaactaaaaagaaaaagccctactagggctaaagccacgtctgataacctcaagtgagtgtatacccataccaccgcaaaaatcaacacgttcatcttcgtcacctcatatttgttttcagtatatagtggaaaaaacacgaaggaagaagcttttgggtgagttgcaaaagtagaattaagatggcaagggtaataaataattcgattccgagttatgagataacaatattattaaatgatcacaccaacttcattagaccctaataaactttattaattcagctatatagttttactgaatgaggaatcatagttataagagtggggttaagctatacgtagcaggttactgaatatatagcatatcacacaaatgtcaagatagtaatgtgttttacagaaatatacactttggctgattatataaactatcctaaaatgtataacgcaatgtttaaaaaaatgtttttgctgcagaaattatctctacgccttagataattcttcaacataatggttttcactttcaca

SEQ ID NO: 54294 - DNA, 624 bp, Arabidopsis thaliana landsberg
  unsure (1)..(624): unsure at all n locations
ccccccccccccccccccccccccgccccccccccccccccccggaatcccctcccccccccccctttttttnngggggccccccccccccccccccccccccttttccccccggggggggggnccccccccccccccccccccnncctnnncccccccccccccccccccccnccccccccccccccccccccccccccccccctcctccccccccccccccccccccccccccccccccccgggccccncccccccccccccccccccccccccccttcttttctctcggggtttgtttgggggccgatnnnnnnccnccnccnnaaagaaccccacccccccgcacaaacgcccccccccccnttctcntctttntntcccttccccccttcccccccctctcccccccccccccccnnnctcccgccgcccccccccccccccccccccccccccccccctctccgccccccccgcccggacgcccccgcccccccccccccccctccccccccccccccccccgcccccggtcccccccccggccccccccccccccccccgcccccccacccccgcgccccccgcccccccccccgccccgccccccccccccccccc

SEQ ID NO: 54295 - DNA, 968 bp, Arabidopsis thaliana landsberg
agataccataacatactcaatcaaaacctccacatatataacacatctaaatgcaagcccaacatccaacacatacccagaaatgaaaaagccaaggtaactagtttataagagacttaccaaagtcccatacaaaggaatcttatgaggcaattgttcagcacattgtagtagaaactgttaagacgaaaacaaaaataatgagaacacacaataataatatccacagagatacatcacaacagatcctaaaattgaaggctcgaagtcacttacaggcaaaacttgatctccagaacgctcgatttctctacgaatgacaccgaaacaagtctcctgtatatagagaatcggaaaagttttgagtagtgagaaaattagggtttaagagcgaggatgaatcgagagagagatactgacgatgtggtctttgtagtcgggggaagtgccgtactcaggtcccttttcgccgatgcgaaggagaagagttttccaattgctcatctggttccgagaggtttggcttcagttcgtctctttgttgtttctcctttggtatcagtcactctgccctagttttttttttttatgtccgtgtctcgtcaaaactaatttttttttttttttctcataagtgttgtcatctaagaaaaagagttcacaaaaagagtttgacaaaaagtttctctctctcttctttctcttagtagctgaaactagccgttaaaacaatagtcgtcccagttaactttgagcctaaagacttttctctcagatgttctattctgaacggagcttctaccagaaatatttacgtgttcggtccggtctaaattgttgttttcttcctcggattttgggtagttctgactctttctctgttacgagagtctgctttgtgattctcagttctgtgttgggtattatctgaattactcggatttcttcactggtttttctcttggagt

SEQ ID NO: 54296 - DNA, 615 bp, Arabidopsis thaliana landsberg
  unsure (1)..(615): unsure at all n locations
catattcatcctcactagattatatcagtagcaaacagagagtaaaagaaaacaaaacgacgcacctgagattaaaatttgaaggggctaagaaagtggatgaggaagaagagatcatcgaagaaactaactgatggnnnnnnnnnnnnnnnnnnnnnnnnnnnnnnnnnnnnnnnnnnnnnnnttgcagagcaaatgaaccatgggagatagttggtgagactgataaaactagggttcttcttcggtttggtctgagaggaaattaatccggtttgttccggttcggttttactagaaatttttgggaattttccaattcagttcaatttatttatttctctctctggctcggacaatgattttgctctgcgcctgctggaaaacgccgaggaatcgcacgatttcgtgaagctgctactagatatctgaatctgagtcaattcgatttcgtggtaattaatctcgaccaatagggttctccaaaaatccccttttcgattgttgtgtgtttacgtaattttgtttgttttgcttcgttgatttcgttgtcgaaagaacgtagctttagtggaagttctgtgattaagaagcaatgatttagatagctgtagt

SEQ ID NO: 54297 - DNA, 501 bp, Arabidopsis thaliana landsberg
acgttgaacgtacaagattttaacaaagccgattgactcccacacgttaaatttaaatcgagcggctcacaacgtttcatcgaaacggtacgttaaattggattccagtcgtaagatcaccgatccatggtcgaaagccccttacccttccttctaatcttacccgtacacggcctgatcaatggcccaacgcactcgagatccgtttcgtccaccgaccgcccaattatgatcctgcgtcttggaagtcgtcttctatccccagctacaggggcacagtggcattccccactacggcggcataatcgtcggtgaacctaaatctcgcccctggcgatctatcaaggtattgaacgagcaagaggaggtgacggcaaacgccagaaggtgtcttaccgaaagtttgaagcggcgatgagagctgaccacgacgcatggtgatccgctgccgaggacgaacaacgacgagattctagcggcacaacacgaaatccaccaggc

SEQ ID NO: 54298 - DNA, 585 bp, Arabidopsis thaliana landsberg
acaacattcggattttgtcgacgtccaataacttgcggtggagtttgcggcggagggttcatcggagccgccgtgatatctaaatcaatcaccgaagaaacttctctcgctcgctttcttgtatcaacccctgttttttttacccgcccaaaaagataaccggttagatattaataaaccgattgatttctcaacaaaaacgagaatttagaaaacaaaccggcgttgattgaatgaaactgagatttatgcggctgatcattcccttcttgtccgttgttgaggaagaagagagtagaaggatggtgatgagcttgaaccgccatgaacagagagaagaaaaagaaaagaaagaaggaaacttcttcttaatgagagaatctctctttaataagtataaatcacacgaaagatatgtatgtatgtatgtgtatcggacatgatgatgatgatggaagattgaaagtttgcttcgggattctgatttactttttataagtatgatgatgagaaataaatggtgaagaagaagaaggagaaggaagaggaagaggaatggaattgggaagcttttaagggaagggc

SEQ ID NO: 54299 - DNA, 549 bp, Arabidopsis thaliana landsberg
tgaaaaactaaaacaagatctcccagcccgatccttatcgccgccttgccgccgagttctaaaaaaatgccgctgccgtggagattttttttctcctggattttttcaacgaccgcactctgctggtcgccaacgcgctcatctccctcaaccttatctcctgcgctgctccagctcgtagaaaaatcccaacgctgctctctcccggcgttctcctctcctgccgtgcccatctccctcctctgctcggctttcctcctccctctctgctcgccgaccgagctccttccctgcagccgagcttcttcttccacagcccgccgcgcctgctccctttatccggctcgtccccatggcgactgctcggccctgccctcagccgcgagctcccaggtgccgcgcgcgcccctggcttggcccagcgctccgttcctgcatcgcctggccgcgattccccaaccatggatgcgtgcactccctggcatttcctcctactcggttctatgcgtgctcgcggccgaacgtgtttagtgcgctcgtcatgcagcg

SEQ ID NO: 54300 - DNA, 653 bp, Arabidopsis thaliana landsberg
agaaaacatgtttataaacatataaacaatatattaagatataaattattgttaataatataagattaaaccctaccctgagccgcatatcttgacttttatgcttcgaattagccgaatttcccaagctcaaatcgaggttgtgatcttgtggagtagtaggattccctgatgactctatatacaccaaattcaaaatctttaaaccaagttcgaacaccaaagtgatgaaactaaggaccaaaaaatatataaaattactcgattaaatgagacaatttaccggcattgagttcctcatcgtaaatactcggatcaaagttggtcacggcgtctttgccgttacatttgattgcagctttatcgtaagctctgtgattatatataaaataatgaaaatcaattagtaacgagaaaaacacattatacaacaatgtgtgttgtagaatcaaacaaaaagacatttacctagcagcttcgacctcggtgtcgaacaaacccaaataaacatacctattttataagattcaagaaacaaaaactcaaagttaaaataacaaactaaaaatgaagttttcgagtgaatataaaatgagagaaattatactttttgcctaagaattgacccattcgagcttcccaacgaccacact

SEQ ID NO: 54301 - DNA, 873 bp, Arabidopsis thaliana landsberg
taactaactcgttcacgaaaccaatataatccacgattttgtgaaaggaaattattatttctggcttctattttcagacacttaggctagactatacgtcaatggtcttaatcatatatttacttttcttagtattacacaatttttttgtgaaataataatttttttttttataacatatcactttccaaattcaaaggttatttttattgttttaacgttgttaaaatgagctcgaatcttgtttgaagatcatttacgtttataaaaattagcacaacttttcaaatattggttgtaaactagaaaggttattatataagattgtgtagtataatgataattgatgattaatataattgtcatttgaattataaagctcatatcgaatgcgtggtgctgaaattatatgagattccatgtgatccgtttttaggatggaagatgatctctttttattgaaggttactgtgtgacagtgagataaacatgctgattaatgtaacataccatataaaaatggattcatttaatagtgatgaatgtcgttgtcccaaaaataatattcaatttttttttaataagtcaaattttaagtcgcatattgcatggtgtctctttcagctggcggctgtggtctgtggataaccactttccctcgttataatattcaattcattgtaccgattagataaataaactaactagttaaaaatggcttatcttaattaattgagtgggttcataataaactagtttagcagtgacagaagtcttttaacgtgtacatactacataatgtttgacaatcattgattgttggcaacttattaatatgtaagtttaaactattcgtttcttcgtcactaaatt

SEQ ID NO: 54302 - DNA, 810 bp, Arabidopsis thaliana landsberg
tgaacaagataatctagacgaagaagagctttattcctccaacaagagacaaaccaaggaaccttcaaatgatgacatgaagtcggagatatcaaaccctgttgcgtctccggtggtggataacgcctctagttttcgcgatatcactagtaatccggctaaatcgagttctggtgaccgtgtcgggtcttgttctggttcctatgagactataactgatgagaaacacagtgaatactgttcatcgctagctaatagtgatgctgtaccgtcaagtttcgaaagggagattccaaagcatcttagcacaactgggataacgaaaatcacatttaagctcagtaaacgaaatgaggatttctgtgatttgcccatgattcaagagcatacttgggagggttatccttccaatgtagcttcttcaactttaggtgtgaaaatgttgaagaagattgactctaccaacttcctatctaatgtgaagaagctattggggacggggattctcgatggtgctcgggtgaagtacctttcaacctcagctgctgtaagtttctgttctttgtggtttctcctgctattagtttggatattctcatatatatgttcttatgttactttttgtggtcattagagagagcttcaagggataatccactcgggtgggtatttgtgtggctgtactgcgtgcgatttctcgaaagtaagtttgtcattcttcatagttttcttgtggggttgtacttaagtgcaatttctcaaatttttaactttgtcatatttcgttttgtgggaggttctaggtgcata

SEQ ID NO: 54303 - DNA, 506 bp, Arabidopsis thaliana landsberg
ctcgatcgctctcaatgctcaccaactactaaccacaagtcaacatgtttgcgagcacattgatccgagggtgcccttaggcctaggaaaccttgaaggtgacacctggagatggtgtgaatgtcggataacagagggggctacgatgacgaaagcatgaagacattatcgatgatcgatatatgtctaacccgagcagacccccgggaggttgcgaagactaacaagcccccttcctagctacgacccgatgcgtcctagacctctccacaaggcctcctcacagtcagagcagaggcccaacaatgaagactcctagagcgaaggcgtacaagacgggccaaagaggactaagtgcaggaggttgaatcgagttggggctacctagtcgcaccatttgggcccgcctgctagcctcttgagcgggtacaacgctcagtgtaaccaggcaaggggtattattattctgtaattactctgttgtagagtatatatcaggaatgtag

SEQ ID NO: 54304 - DNA, 431 bp, Arabidopsis thaliana landsberg
tttgtttataagctttgagtgtaatgttaccatatccattatttgcttgattgtatgtattgctacagctagaggcgaggcgacgaggaatctaaaacccaactattgggtcagcatctagactacaaggttaccgcaagtataaggctagttgtggcactgatcactcttatttacctaataatgtcattgttcatcattgtgatagactcaggttaacttgatgggacctattaggttaccttagtttgtttaccctactccttgcagatcatgaactattgggtagtcctgctattattctatctggttttggtattaatattatacctgaactacgatcatgttacattattattatgggttattcttaatcatgataatatcattatgttaattggaagacggagaacactttgaaaacagggcta

SEQ ID NO: 54305 - DNA, 518 bp, Arabidopsis thaliana landsberg
catgcgacgatggattacaagtctacactctacaggaatagccgaataggatggactgatggagtacaagaacaaaaattcagtagtccagtccagaatgacacaacacatacaaggatgaaggatgaagattgaagaacagaactacacaaaagaatacctccagaagatgaactcatgccgacgaaaaattctggatttctggatctgcgcgtgtctggattggaaccgctagtgtctagactctggacgagaaatctgggtcggtgaagtccggaacttggaactggattcacgcgtgtctggattggaccgtgagtgtactggtgaggtgagttggatctagaacaagaagtctaggaccggtaggaaatagagaagaagagaagaaaaaagattgagaagccaggaaagtagagatgtgaaccgtcggtttagtagagagtagagactgttggcgttccatctccctgtagccgggccgccgccaaaaaacccacgaaatcaaaaaatctgga

SEQ ID NO: 54306 - DNA, 269 bp, Arabidopsis thaliana landsberg
tatctacagtacccaagggggctattatctcatctaatcacggttagttacatggtatcagagaaggtcacgattagggtttcttagattttagttccatccaccatctctccttccggccgccgtcgcgtccccattgccgccgtcgtagtcatctccgccgtcgatcgggccttattgtctgctgcctcatctacgcgagatccgcacgctgtcgcctagatgcgaagatcgtacgaatgctggatcccgtcgcagcgagctcatct

SEQ ID NO: 54307 - DNA, 302 bp, Arabidopsis thaliana landsberg
ggccggacatgtaagccctgtcggagatggaacaagaacattaccatcccggttttttgttttatcgacaatcaagttgcgctaggaaaagcgcatggggtcatgtcttacggtgcggttctgcacgccggaccatgggcggtataggagccgatgcctaagaaagtgatgatcgatgaggataacgagctcaatatgaagctcttccgcgacctgatcgaagccagagggtacgagaccgtttgcacccgcaacggactcgaagccctcgatctcgcccggtagtaccgtccgaacctgat

SEQ ID NO: 54308 - DNA, 672 bp, Arabidopsis thaliana landsberg
  unsure (1)..(672): unsure at all n locations
ccccccccccccccctacccccccgccccccccccccccccccccccgccccccctaatccggcacccccccccccccccccccctaccgcccccccccaccccccccccccccccccccacccnccccccccacacccctctctccccccccccggggttcccccccccnccccacccaaccccnnccccccccccccccttcccccccccccttcccccccccccccccctcccccccccccctcccccccccccccccccccccccccctcccccctcccccccccccctccctcccccccctccctcccccgccccccccccccccccctctttttctctccccccccgggttgtttgccccccccccccccgccccccccccccgacaaccaccaacccccccccccccccctcctccctccccccctctcccccccccctcctccttcccctccccccccccccctcccccccccccctccccccctcccccccccccccccccccccccccccttctctccccccccccccccctccccccctccccccccctctctccctcccccccccccctccccccccccccccccccccccccctcctccccccccctctcccccccccccccccccctcccccccccccccctcccttctccccccccc

SEQ ID NO: 54309 - DNA, 1016 bp, Arabidopsis thaliana landsberg
gtaggcagaggttaaactctagcgatgacacaacgatgatactaacacaaagtatatgtcatacatatttcctagtttaacatgctgatataaatacataccatttgagtttagagtatttaatataaatgtttatatggaccaaaacatttcagatggaacttgcattatatagtgatcgccaatataaataggaaaacaaaaatgacgaaaagtttctaatcaatatacaacatgaagagattgaggaggcaggttgaatgaatttatgccataacgtgtagtccattttagggtcatcagcatcccattcatttgctcatgttacttagacaaaacatcacttagaatctctcctttagcataatatatctattgttaaccgaatcaagtagaattgtctagatatttcggtaaaggaaataaatacccttaggattcttggatgtagactatctaaactaaacaaaaatatcgtcacgtcggccgtgtcgtacatttagcttatgaatagcttttgttaagctatatgagttcaattttattatcaggttaaataacatattttcataatcataataagatcaacaatataagtttgtctactctgaattattgtccaacaatgtctcactccattttcagacctcttaaaccgtatctatcatagtctacttcatacaagaaaagatacataaatcaaatttcttttcaaataaattaaaattttatcctatgaaaaaatattcagttgttcatgagatattttttttcttcacttgaattccaaacttaactttgttcatgataaaatttttttattccaaacgatttgattctccacttggtaaaaggaaaactagaatcatccacattcaattaactatgaagttctgactgaataacaaaagaaattgattaggggctaaacagccattttcacctctcccttcttgtgaggatcatggccaatgagctcaaagtcatcagcaacaaaaaaatctatatctttcttc

SEQ ID NO: 54310 - DNA, 1165 bp, Arabidopsis thaliana landsberg
attggttgctaccaggtaaagttgaaatcattacaatatctgtttaaaaaagtttgtgaagaaagtaatgcaaaaatcccaaatttactcctaaacttgtgtgtgtatgcatgcagtctttagaattatggaacatgtcagagaacaagacgatgacattaccagctcacgaagggctaattacatctttggctgtttcaactgcaactggattggttgcatcagctagtcatgataagctagtgaaactgtggaagtgaaaactatgagagaggaaaagagacgtttgttgtttaggtattattagtaatcatggttttttttttaacttgtagtgttctctctcggccattatctcgatctcaagatagttttccagatgttgaacaaatgttgttgtatgatctgacgaaattgggatcttgagaaattgtgaacaactcttgttgtaatctttactagtccttttggctcagctttaatttactggcactcttcttcacttagtttgggttggtttggtattttatgtttgaacgtttcaataactctttagcttttcgaaacgcttgaaaattgaaatgtgagagccaatccaataatacagttgcatcttatttcaaaactacaaaagtataaaactaaacgcaaacgtgatagttgaaaacgcaaacgtgaaagttgtaaacgcaaacgtgatcctaaacgcaatgtcgaagtgaaagtcgtgatggctccgtcgtatctgaaatcgtggtaattggtgatggagaaagacgataacagtgacaaggttagcaatttagcaggatcttcatcgatttctttttgcttaattttgattcctcaatcgaaggatgaaatgttcgatgataacttgatctgttagagcaaactctgatatactctggaaaccacaggtttgtctttcagtgaaggagaaatatacgtcagagcagcctgaggaaatggtgacaaatctgaaggcatctgtaagagaattgagtgtgaaagtgaaagaacaggtgctttgtttcttctttcctcagcaaataaagtctcttgcttctatcttatggtgttttatgatcaaaccgtgcaaaggtttttacttttgttgtcatttgtaacttagaatcagagaaaatgtgatgctaaggataag

SEQ ID NO: 54311 - DNA, 1018 bp, Arabidopsis thaliana landsberg
tttttttaatttgcatctgatatggagtttgtggactctgcaaatattcaggaaagctggttaaaccaagtgagatatatgcaatcacattgtgatgaaggtctgcaacacttgagcttgagttctggtcagaatttcttacagttagggatgccattggactctaggtatgtccatttcactacctattcgtctcattaccagttgaatatgtttccccaatccaagttttttagttacctgctgtccaaattgtgttgcagagctgcaaacgcgctgatctcagataaggatttagtcattaaagcagctgcagcctctatatactcgacctgcagttttctagaggagaacataacctgtagctgaattccttaaaacttctgaccaggatctgatttaagctttttagttgaaaactttttctcagttactttagtgtaaactttcatagcagagtttttctttgtaatatccatttgtaacactaggagcttttacttttcctgtttccttttatagattcatttttcagccatttgtttcacagtaagaaccttggtatgctaaattagttaagatctgatagtttataaacatctcttcttgaataaggaagtaatcttgagacaacagtgtattgtattatgatcctaatatgttctggctattcaaagtttggatatttcactaagactgatttcctcaaacctcttacatggagtaactactacattttacaatatgcaacagtgatctggatctgtagacaagtttttttgggttcttacatagcgaacctaggagcagaaactggtgtcatcatgttgtaaacaaggttggtttgtttagagccagttagagaccatcttgtgtggtgttgctttagctgatggatcttctggagctttagccaatgaacgatactgaagcttcacactctctgcgttgaccagtgttttcaccacatacctgcaatataagtttatgtagcaaatgagctctgaagctcagaaaa

SEQ ID NO: 54312 - DNA, 426 bp, Arabidopsis thaliana landsberg
taaagagtattaaacataaaatagataccattttgccaacaaaaggaagagagtatagttttgaggctaataaagagaaaggtccagatagcgctagaccgatgatttacctcccgagaaacaatagtgatggaagaaccgaattttggtagcattcaagattggtttgagaaatgtccaacgccaagtttctgtgcttcgattttaagtgacttgtgatactgaacagcttcatcaagaacgcaagctgtattcatctgttctcctccagggacaattttccttaatactcccatcatcttctttatcttcttacgtcctttcccattattgttactactactagcactgtccgataaactctgctttcttgagttgttgttgttgatgatgttgttgtaaccataactggaacaacaagatttt

SEQ ID NO: 54313 - DNA, 1309 bp, Arabidopsis thaliana landsberg
tattttgtctgctgtgttgacaaaacaagaaaatttctgttgtgtacaagagatttataacttcattgttttttttttgtttttgagaaatattctagagtttaacgctactttgatttgaatgaatatgtttagacttgtcatttttaatgtatcattcttttgtctgaacaactcatgcgaaataatgtagttgatttcgaaaacgattcgaaatgcacacacatgtaaaatctctattactgtatataatattctttataaggtttacaaaaaaataaaaataaaaataataatatttctaacaacataaagaaaggcactaaacccaaacttacacatctaaatatcatctatatgggaccgaccataatcatttttgtctttgatcacatcagtttctaaaagtcgcatcagactcacatgcaatcgaattctacctctcctcgcggcttctttaatcatatcacatttgatggaatagttctttactttctatcatttgttcctttctaggttggtcccaaatagacttatctactaggcctatagatatagtaagtggcaccaaagtatatgagaaagcctgataacaaaaatctcaggcttttcaaatcttagcccaatatttatgacaatgtgaagggaagaaagctacaacgagaaacaggaggagagtcttttctcaagaatcctcaagaccactacgtgttagtacgaatgttagcttctgagttcaatagagtgaacaaataaccataacatacgacaccaaacaaatttgtttatgaaccaattgattttactagtttaaaacataaaatcagatgtaaataatacattgctgtccacatattttggtgtatccaaaacaaaccaaaccgaaattttcatcaaagccaagaaaatcaaacggtatatcatagtccataaccaaaaaaaaaacctaaaaaaacaaacaaaatcttaaacccattatacaccttctagtgttcaataagtaggctccaaaaccattttactagaattttccttaaaaatttaagagacctgaccgagtgaccggaaaattcatcaaatataagatactcatacaacaagttctaatttaacacacacgagtaaccaagaatagactacaacgtaatgccaaaagaacaatagcaagcaaacagataaatggtatatatgacccaatccagtaggaagattctattccaattcgttgttagagatcaaatattccctcagaaaaagccagaaaagtagaacttttgtcagtcacacaagcgtcaaatatcacaagatg

SEQ ID NO: 54314 - DNA, 404 bp, Arabidopsis thaliana landsberg
tataatctatcgctcgcggtggcggatgtggaggaggcgaagatcgagcagccggataccgcggttgcgattgtgagagtgtagaggaagataagggagagaccggagagagatgggaagagacggagggagattgtgaggaagatgcaacttgaggctgagcctaagaggatgtagttgcagagaaggaagatgttgtgtgtgttgcctttcgatttcgacattcccattttctcgaattcaagaagagaactttggtttttttttggggttttgatgtttgtttttgtgtttcttgataagttcactttgatttggggtttatatgcatacataagaaacaaagttgaggtaagagaaagtagagattttgttggatacggtcgtttttgtttttagaatat

SEQ ID NO: 54315 - DNA, 411 bp, Arabidopsis thaliana landsberg
taattaagaacttacttgttacatttcttttagatgtaattttacatctaaatagtaaattttgcaatttgttaccaagctaaatcattcgcctgactgatggatgatgatatattgactaattctaattcattgtaatcaacattaagataacaaaataactttattttttatgctaaaaaataacaccaagtatgtagcatatgagtacatgtgaatagcatacttctatatctctgttttgttatattattgaatagaaatgtgaatagcatactatatctctgggatatttcgcaccatagacaatgatttcttgccgccaataaaagaacacgagccaatttacaaatctgcaaatgggtcataaaccggtttgaattatgcatcaaaccataaaactttgcttat

SEQ ID NO: 54316 - DNA, 749 bp, Arabidopsis thaliana landsberg
ccatattcatctagttcgatatgaggtgctttgaatggtaatgatttgtctcaaaaaatctatctagctagttttcaaatataagagatctaaaaatagatatatacatagttatccgtaattagtgagatttgggatgtgctaaaacactctccaagggttcgagctttcctaaaacaaatatcacatttatatcgaaaatctagattagaccctaatagtttatattatgatggtagtccaacaataggctatatggctactcccaaacattagtatggaaatattccaaattcgagataagcagtgtagcggtcatttaagaaaaaaatccactttgtaatattttaataccttcctaaccaaactaaccagatcaactaatataatttataataaaaaaaatagatagtctaagtcatgcttaaatatccagatatttatacatgcaaaaaaagtctcttgtgaattagatctgacaatcattttgagagtaatctaatagaaactgaatgccctattagtaggcccaggatagttgaaaaagtagaaaaacatttcaaaaacaaagagagttaataggcagaacccaaatggctgggttttgggatcatactgaccagcaaatacagctgagcagcatccaaataacaaaatgagcactacataaaaaaagtaaaaaccttctacagggaaaaccaactgaaccaacacgaaaattccaaaaaccactgatatgatcaaaacag

SEQ ID NO: 54317 - DNA, 632 bp, Arabidopsis thaliana landsberg
  unsure (1)..(632): unsure at all n locations
tattctataggttcttatcgatgcatccttcgcccgagcaattttagctaccaacaacacatttctacctaatacgttattgctcaaatatctttctaccaacatttaattttcctgtgtatgctatacacttgccagtaaaaaacaactaaaactataatgataactttggcctttcgtagattgagaagnaacaatgcctctactaaaaagagtggaataatctataaccactcttaatgacacaccaaaatacaccaaaacaaaggtttattcttccataaccattattgataacaagggacactcttaatggtaacacgtcaaaaaaactttaggaaagctnnnnnnnnnnnnnnnnnnnnnnnttggttgccgtatacgagtatgactaggctccacgatataggttagacatgattggttgtcttggggacgctgaagccaagctgtgtggatgcaaaaatatagcggaacgctggctcgctaaaatgcatagagcaaccgttttcgataggcctggctcacacggtgcagaggagtagtggatcgttgatcgctggatccaggtaaccaatctggcatcacacatggtctagctgtctaggtacatgcaagaaaacaaaagctag

SEQ ID NO: 54318 - DNA, 418 bp, Arabidopsis thaliana landsberg
tgaagaattgtattgctcaatcaactgcttttcttgactatgaatcattttagtttatgagatgtcttgcataatcaccagcatcttctatgtatttacccatgccctttctaaggttttgccattctgccctgctgcagttgctcatggttgatggaaatggatggctccacgcgcgaggtaaaacacaaatcgctcgcgtgctgatattggcagtctcattttcaaagtaatggtttcaagtagctaacttgttgcatatagctactttaatgttgcagttgatccatattttgacgctatcaggtacgtgtagtgacgtaaggttagaattttactgctcaatcagttagttttctcatgctaatacctctcagctgactactactttggctccttagcctgatgacacatattg

SEQ ID NO: 54319 - DNA, 964 bp, Arabidopsis thaliana landsberg
  unsure (1)..(964): unsure at all n locations
tgtgacgagatcctctagatctgtttactgtgaacactgctgtgtcgttggtgagtctttgtccctctttaaatttcaaaaagtttcaaccttttatctcttacctcttgatatggtgcatgcatagactgagaaaatctgttggttttgaaggttggagtagtcatccagtgtgtagaaagaggtaccgcttcatcataaggtcaggaggagacactaaggcttgcacgaggtgtggtaatactcagaatttgtctgaaggtagcaattgcaaatggtgcagcatggctttagacattgaaaactgggtttactctcagctagaggataacactcacctccttcacggcgttatccactctaatggctacgctcatctactgtgtcttaatggaagagaaggtggctctggttttttgactggtcgtgccattatggacttctgggataggctttgttcctcccttgctgttcgaaaagctagtgtgatggatgtgtcaaggaagtatgggatggactaccggttgcttcatgggattactagagggtgttcgtggtacagtgagtggggttatgaattcaaatcggggagctatgcactcaccaaagaagcttaccagagtgcagtggatactttatctgcgattcctctctctgagtttttgttccaggggaggaaaccaagaactcagctccactccattattagcttctaccaatnnnnnnnnnnnnnnnnnnnnnngactgtcaaagacctcttctcctttctcctacagatgattcgtgagaacagttccaaacctgcatctaagtcgtctgtactgtgtgcttggtctaaaagtgatgtggaacgtgtacagcaaaccatggttaagatactgaaagcttcaagacgcccacaagccaactgggttacacggtgggctctcaagaggtctatttgcaaatcagcctcttcacaact

SEQ ID NO: 54320 - DNA, 1377 bp, Arabidopsis thaliana landsberg
tattgattttcttgttaaaaatttctttctgtttttccatttcttctcttattgggtgttttccacgtgtcttcttccttatatgatttactttgtaatttataaatatttggacatcttttagcaactattgcttacggtattattgtttcatcaaaacaacaatcatactaattttagaaaaataaattagaccatgtaaaaagaaaaaattgtaatatagtaaaatctatttaagttaaagttcatttttagttatatatttcttctatgccaaatgaacctatgctaaaaagatgtcacttgcattttaatccaactttatgtattttcttcatagaagttatattaaatctggtatggtatgacatatatacttgaaatggtcgtggttatataaccaaatttaaacatgtacgtcctgagttttgaaacgatacataagttaaaagatagtgtatagagaaatcagtctaaagatagtatactatatatatgtatgatatgtatatggagatcatgagcaaaagtagtaagcaacaaaaggaaaagtagaaacttaacaaattgagcaaaactaaaagaatctaagctcgtggccttgaagacaacatcccaataatatccattatcttcgcctttgttacatctccacccttcttttcttcccattaaatatccctttttactctctttcagtttattattcgatgtagcgtacatattttatatacaatatctcgatccactaagatacggttacatctccaccattagcttccaaatactaaaataattaattacttctaattagaaggacgtaatctctatcttcagtagtaaaccaaatgttcgtcatcatacgaagtggatttagaacatatagtcgtttttgaagcagatcccaagaatagtcttcgatcggtcgaggtgcccaagtagaaaaaaagaaggcaggaaggtttgtttaatgagtgatctttgtagtcacgagagttgtgacttgtgaggttgctttgtatcacggtgatgcaattattattattttttgtttttaaataagtgaattataggtaagtttttttaattcgaatattaacatattggtttaattaaaactcaacattcgaatggcaaataaataaaaactgaacatatgatctacaaattatcataaattaaggagaatagtgagtctttagtgaataattaaatttccaagcagttttaaataaataaaattaaagagagaggttctataattgatttcttctaattaattagaagatcggatttttttttttaatttgacgttagagcttagaagaccagattaaaatatcagtctctgttattttgaaatatataggtagatcg

SEQ ID NO: 54321 - DNA, 1097 bp, Arabidopsis thaliana landsberg
catctctcttttttttctgtcatgtagatcgccaaaaaatgatgacattgtcactcaaataacattcatcaagttcgatccaactttggacacaccttctcaataccttgtgcaaaaaaaaaaaaaatctttagatcaactgaacaactcaggtaattaagacggttttaatatcaaagttatgatacaattcaatagaaagggaaatgtattttctcatttatggagaaaataattaatggtatgctagcattaaattatggataaaatatgacatggagtcaagatatattataatttatatagaaaatgatctaaatatctttattttttagatcatcaccatatttgaaatttctttaaaatgacatagcttatcaagaaaattattaccaactagtcattgtaataatcaagaaagatgaagtcatatatatatccttagaaaaagggataaggaaagatagatggtcaaagtgtaacagctagtctgctaatatccaacctttttatttatctctaaaatcttgatcatagtgatcacaactagttcacaaccctcagtcaaattttattacaaagagggagaccagaatattcctccttttgtcttcaagattttaaagccatggccggtggagctcttaccgatgaaggaggcctaaagagagctcatctctatgaacatcggatcacttcttacttcatcttcgcttgcatcgtcggatccatgggaggctctcttttcggctatgatcttggagtctctggttagataactttctcgatctggttttatcttataccaatcaaatagccagattctgaaactgccaagtattgtttttgaaaagggcctgcttcagttttgttaaatttcccctgttttgtccgaaaatatcagttccctctctgacgagagttagcttcagctttgtttaagtgtcgactgcttagtttcttgtaaatcaaggaacctatgcaagaccaatgctcatttttgtttattcgtccttgttaaacgcaggtggtgttacatcaatggacgatttcttgaaagagttcttcccagggatctcaaaagaaagcaaatcatc

SEQ ID NO: 54322 - DNA, 591 bp, Arabidopsis thaliana landsberg
  unsure (1)..(591): unsure at all n locations
tcaggactgtccgcggctaaggataaagatcattaaagatcttgttgttccttgccgtccaaatcacccaaagaatccatggtgccaaaaatccttctccaagcccgattggagggaggcatgttagtaatttggaggcttcgaaaccggatatgaagcttgagattcgctccaagtttagtgagttcttgaagggggccaattcccataatttctttgcaaattgacaattgaagaagaggtgtaggatcgaatcctcatcagcttcacaatggatacaacgagctgattccaggatatctcaggacttcagattctctccaacaggtaaggcattttgcaatgctttccatagaaacagtttgatcttaggtggacacttcgaattccatagccttgccttctaatcataggtttcagggnnnnnnnnnnnnnnnnnnnnntgttcctcaatattgagagcttcatagtagcttgatttattgagtagactccattcggtgtaggaagtcatgcccaccgatcgagtccatcgtttttacttggnnnnnnnnnnnnnnnnnntctttcatattcgggtagaatttgaag

SEQ ID NO: 54323 - DNA, 676 bp, Arabidopsis thaliana landsberg
atgagaagatattacttattgacgagaacaataggttgcttgaggctcttgttgctgctgagaatttgagcaagaaggctaaagaagagaatcataaggttagggatatactaaaacaagcgattaacgaagctaatgttgcgaaagaagcagctgggattgcgagagctgagaattcgaatttgaaggatgccttgttggataaggaagaggaactgcagtttgctttgaaggagattgagagagtgaaggttaatgaagctgtggctaatgacaatgttaagaagttgaagaagatgctgtctgaaatagaggtagctatggaggaagagaaacagagaagcttaaacagacaagagttgatgccaaaggaagttgtagaagttgttgagaagaagattgaggagaaggagaagaaggaagagaagaaagaaaacaagaaggagaagaaagagagcaagaaggagaagaaagaacatagcgagaagaaagaagacaaggagaagaaagagcagacacatcagaacttcgataagaggatgattgggaaaacttgtagtttcagtatcatgaagctagctcatcacaatcacaaccacaagcacaacaaagaaacatcagaggaagagacaaaaaacgcaaacggtgggaatcatcaagagaagagtgacggaag

SEQ ID NO: 54324 - DNA, 191 bp, Arabidopsis thaliana landsberg
  unsure (1)..(191): unsure at all n locations
ccccccccccccccccccccccccctccccnatnnnttctccccccccgcggcgcctgcgctcctcccccccccccccgccggcccccccccccccccttcacctccccccccccacagcgccctcccccccccccccccttcccccaccctccaccccccccccccaccacaccccgccccccccccccc

SEQ ID NO: 54325 - DNA, 824 bp, Arabidopsis thaliana landsberg
tggggtcactcctgacctttccacctataacactgtgttggcagctttggcccgtggaggaatgtgggaacaatctgaaaaagttcttgcagagatggaggatggtcggtgcaaaccaaatgaattaacttactgctctctacttcatgcatatgcaaatggcaaggagattggtctgatgcattctctagcagaagaggtttattctggagttatcgagcctcgagctgtgcttttgaagacccttgtcttggtttgtagtaagtgtgatcttttgccagaggctgaacgtgcattctctgagctcaaagaaagagggttttcaccagacataaccacattaaattccatggtctccatatatggaagaaggcagatggtggcaaaggcgaacggagtcttggactacatgaaagaaaggggtttcacaccaagcatggcgacctacaatagcctcatgtatatgcatagtcggtctgctgatttcggaaaatcagaggaaatcttgagggaaatactggctaaggggatcaagccagacatcatatcgtacaacacagtcatttacgcctattgtagaaatactcggatgagagatgcatctagaatattttcagagatgaggaattcagggattgcccctgatgttatcacctacaatacgtttattggttcttatgcagctgactcaatgtttgaggaggccatcagccgtcgttaggtacatgatcaagcatggttgtagaccaaaccagaacacctagcaactccatagtcgatggatactgcaagctaaacaggaatgatgaggcacaactttttgt

SEQ ID NO: 54326 - DNA, 527 bp, Arabidopsis thaliana landsberg
gcacctcagagtagaacacaactagaatggagaccacatgaacaaagccgtgaaaaagataccaactagtggtagaagttgaaatgaaacttttaataagtttgcgtttggtccagtggtatgtaatttgtataggttgaaatgggtaccaacaagttcgaatcttgagatgaccatatttttttgccttttgctccaaccactaatgggaatatgtctgcactttgcaatatcaagcagataacaatcatcaaatcccattttaggattttttgtataaacactgtttataaaggcaatttcataatcactaagtattttacttcttcaaataaagctaagtggtatagactcaggtcaaaactagtgagctaagccctggggatttctcaagacctcttttctccatttctactctcaacgcttcatctgtttgccatctttcggtgtgtgcatacaagttcgatatccatgcaagatggttttcgctgtaactgttagtgatgctttcaccaggctagatgatc

SEQ ID NO: 54327 - DNA, 715 bp, Arabidopsis thaliana landsberg
gcaagtaattaaagaaaaatacaacaggcaggaattctttgaagactaaattttcacatttttctataattttttgaaaactagaaaaaaaataaaaaccactacattatccatcagaaaggactttgaaaaaaaaaaacgaatctggggaacgaatagaaaatgaacataccttcaggcgtaagacagcttctttggcaccattttgtatactgccatttgaacttcgaaacatagacacaagtttgtggaagaaacgaatctgatccggaaaagacaatcaagttattatgatgatcctgatacatatgtagagtatccggctgtagaaggatattgcatttatattacactatgttactaagactgacctgaacatcagtctgcagttcatcataaaatcgattgcttagcttctccaaaatggtaagacaaggagaaataacagcaggacgttctgaagccatacaatccacctgtaaaagcaaacatctgtgactggaacaaaaaggtttccatgcaaccaaagaaaatatcagagaatgaacttttcttacattcaatgcgctcagtatatgatcatcaagagactgccctttaaacgatgatgttcgcatcatggagcactgacacagggagagaaaaagaaagggaaattttgttaactgtagtgcaggcagtagctagttttcctctaacacgaatgggaaaaagt

SEQ ID NO: 54328 - DNA, 1126 bp, Arabidopsis thaliana landsberg
caaactagtctcgtcactcgtatctgagattttgcaaaaaatgataattaactagatccgggttaatttaatttcaacgaaagtacgaaacaatttcaagtaagtataaataacacataacaaaaaaggtaccaccaagactgatctagtccaagtggttggagtctagcgtgtagattccacgtaaagcttcggaccttgtttcgaatcagtcttggtacctctttctcaatctctcttccgcgactcgctgttgttgttgatgttgttgtcgttaggaaaatgaggtaatctaaattaccttttttttttgacgtcacttctattattattatagtatcaataattacaatttatttatttattgaaggattatcttgttgtaaccacacaaaaaaaattgtgaaagataaaagtctctaaagtaaactacaaaaaactttgtttaacttttcggttacaaaacataactgaattccaaattatacgaaaacataactgatctcaatctctctacttaaatctaccatcgcggtttccataagcgtcgcttctatagtaaaattgatcgttgtcactgttcttgttttcgtcgttgttggtgtgaatctcatgatggccatagagaccataaccatgtccagtctctcggacaaaggctggctcttgctcgttttcctcatccatcgtgctccggtgattctcaggcatgaataaaatgtggtttttatcggttagtccggttaaggtttggcggtttcttgcttgtgtttgcgtaagaaagaaagatgagatgaagaagctgagacagagaagagacgtaaggtttagtgattgagccattttttgtggtttatgttggtcaattagagattatacatatatatggttttttgcctctttttttgttgtaaattaccaaacattaggtcgagttaattggtcaaattagttagacatatattaccaaacgcccggtacaaaaacaaatgatgggttcacaaaaaaagagtgatgagaaagtaacgaaaagagactaaagagcttccttagtttggttgcttgatttgcggaaaaaaaattcgaatgatcgaccaccgaaagtatacattagaaaaaatgttgg

SEQ ID NO: 54329 - DNA, 750 bp, Arabidopsis thaliana landsberg
ccttggagcggcaaaatgaaaatcattcaattttgtcacatactgaccgtggcaaactatctcaccttcttgcattacgattttttttttttcaaatataaaagaaaagcaaattttatttgtcttttgtatatgaaacgagtttgaggaatcaaaactatctaaaaagacgtaccgaaagtgaaaactaagaatatactgtatgagacattagaggaggttgtcatctactcatagtgttgacttttgatgaaacccaaatgaatgaatgaatggtggcgccatttcctttatgaaggaacaccccttttgttttgtcattttctatttgtacagcctaattgttaggttgttttcattttgaagacgggcctacgagatcacttttgtttgtttatcgtatcatatgggctctataaatatgacccacccatgtaaagcccaagcaatctgcatatagaattctcatagctcgatattgttagttatgagattgttctgatcatatgacctaatcatcaactgggccaccagcctacaaaatgggcccaaatcatattcatggtcgcacgtgctcaccatagcacatcccgtgtatcttatccatttttgttacacaaacccatttgtcattagttaataacaagatcgtctagttggctagttgctggctctccaaacggcaattttattaaattaatcacaatttaaccgatgcaattatcgggttaagcaattgccggaaaaact

SEQ ID NO: 54330 - DNA, 127 bp, Arabidopsis thaliana landsberg
cccccgaggaacgccgaggacaccgcccacgcgctttccagagtttgaatgccgaattggcacaagaagggcactagggagaggcagaaggatgacaccggcacaaaacaccggcgaaggcactcac

SEQ ID NO: 54331 - DNA, 464 bp, Arabidopsis thaliana landsberg
tccatcccatgattcacaacctgcccattaccatagcttacttgtttagcaagaaatctagatatcaccgcatgtgctttagggtttagagaaccaacctgaaagaagccgtaggttttgcaggcctcggctatggttcgtagaacatgaggccggttaggtccaaggagctcagcgaaatctatgagggggagctttaggtttttgtttggtttgatgagcttgtccgattttgtcaagatgggtcggtcaggttcaggccatatatacttggttggtactttggtcagaccattttcacaaagatgtttcacgcctttttggtatttcttgttctcttcttccatcaccggagctatcattgacggcgacattcttctccgttacactgttaattaatgagacattgtcacgtacatgcatcaataatcaattagcaaatatagagaactttatcaagaacg

SEQ ID NO: 54332 - DNA, 1267 bp, Arabidopsis thaliana landsberg
tgggacttggctcgtggtcttgtcttgcttccaactttttttccttatatttctcattcaatagagacttcgagcaggcctaggcacagagggggtgagaaccatcctcatggttccgaggaatttgctaaaaatgaagactatggtaatcaaatggtatgaatgatttctcataagattcgtaatgattctagtaatcaaatttacttacaaactgcatagaaattctttttttaactatgtctattttcttcttttgcagaacgtaaattccccaagaaaacaccgagtttattgatcaccaaaccatcttaaaaggttaacgttctatgttttaaacacttagattctgtaatactttttaaaaacacttgggcgtttttttaaatccaagaaaaaaaaagatttgggtttgttttgtgcctcaagaatctataaatgcaggaagttcttaaaagaatgataattttatttttgtcatcttcatgaaagattacaatgtttctttcacactatatttgagtaaccttgtttatcgttagtggttccaaagcattgttctgtactcgacgcgtctttgctattaagtgtctctaacttgcagccaattgttccaatggtgtgaaccatttaaaagtatagttaattttcatgtaatctaatcaaatggaccaaaaccagtggaaagagtcagacataaacggctcccatactatacttccacaagtcaaattttgtgtgtaaaacttactaatagaaaaaaatactaaaaactatagaataattcttttacattgattatttattaggtgtttactgtttagcgaatttttgacattgatttatatgtttccagttttgttatccgttgaagtagaaaagtatcggttaccattgttttggcttaccataaaagaaaacaaatatgcatgtgtgatgtggtgatgaatgttatcaatcaaccaattaaaatgcgaacgtaatgtcatagacacgtgaacgttaccaatgaaataagtctgtcacgtaattaggtcacagtcccgtacctttcgtagtcttcgagtatcttaattttctttccttaactcttctctttctcttcttcttcttcttcatctttttttttataacagatctggtggaaattttatcttttgaccccaccactggatctttctatatacacatttatctgagttatagagtaaaaactaaacacaagaagctattttgaagaattgtgagagatttgctaacctcgctc

SEQ ID NO: 54333 - DNA, 1079 bp, Arabidopsis thaliana landsberg
caacttcttttgtgggtaagggccaacggtaaggctcaaggaatggtaagcaagtcagtgggtattctgctaggaatagtggttgccaattgcataggaacctctacaagtcttgcccttgctgcatttggagttgtgactacaatccatatgtataccaatctcaaatcttaccagtgtatccagctccggactctaaacccataccgtgcaagtaaatcccactcctgcagacgtccaattcattcaaatcgtcttacaagacgaaaataacatctctgtttattttgcaggtttgatttttagtgaatatctaatcagcggccaagctcctctaatcaaggaggtcaacgatgaagaaccgctcttcccaacagttcggtttttaaacatgaaatctccagaaaaggtaaaagtgttcattcaccttattatacactctgagatctcttatcaactagtttaaaatctaaaaactttctcggatgaacaaaacaatacttgatgacctgattgattgattcttagtatctgctctattcagctgcaagattttgtcttatcatcagaagcaaaagcagcagccgcagacatagaggaacggcttcaactagggtcaaagctcagcgatgttatccacaacaaggaagaagcaatagcactgtttgatctatatcgcaatgaaggctacatccttacagaacacaaaggaagattctgcgtaagcaatgataaaccttctcataattattattacccaggggaatctctcaccattctatctcctcttgtaattgtcaggtgatgctcaaggaaagctcaactccacaagacatgctcaggtcattatttcaagtgaactacctctactggctagagaagaatgctgggatcgaacccgcaagcacttactcagactgcaaaccgggtggtcgcctacacatttctttagattatgtgcgacgagagtttgaacacgccaaagaagacagcgaatcagtagggttgggtcactgaaggactgatagctagacctctaccaaccagaatccgtctaggtcatgatcgtgaactattat

SEQ ID NO: 54334 - DNA, 1214 bp, Arabidopsis thaliana landsberg
attaaaataccgtttttttaacctagtatctaaaattcggatttaaatttggaaaataataacatgtaattgtaatcgaacaaatccactataatattatatattataaatatatttagagtggggcttggaaaaaaatgcaaaaggtatctaaaaagcttacaagggcactggccagtggccactgggtctgtgactctgtgtgtggggagaaagagtgcaacacatttacatacacacacgaaaaagactttaaaatccattgtttttgtaatgttattcattagttgttaaattcggaagtgtttggttgttatcagaatgtgtcgttgtgtcatacatgcatgagcttcgtatacttattctttggttggctaacaatttgtatacatttattttgttctccaagtatagtagtatctccttagtattgtcataatcttgtcgttcttaagaataatattttgacttattaatatgcatgcaacgttattaaacatttaaatagtgaaagggaaggagtatatgattatttaaggggttagatatcattaaaaccatatttactttgtcctaattatacttctatcaatggccaattaatcatcaccccaatcaattcaagtagacaagtggttataagtaagacttagaaaagtggttatgagcacggacattgcctaagatgatagaagctggacatcttctatctttaggtataagtaatgcccacttggtaagacaacgaagacgaaataaagtttttttttgtatgttgtaaaagaagcatataaatactaaaatacaacagctttttgttttggtctctgctgtgatttggagcaaataatagatgaaaggttaaagagaaaatgagtgttcttgactcttgaggcgaatatcttttgtttaggtttttgttattaatctaataataaagtttgcaaaacttagttttatatacgtttcaaacaaatctttagcctcatatcctccaaaaaacttaatcacttaatcagtcacggtttcaaagtcaccgtacataatttcatactatatcccccacaaaattttgaatgttctaagaaacgaaatctaccgtcacaacaacatggataaagaatatcagagtggttgtaccaatcacaaaatggttaattagtaacggcatctgttaaaatttgggtgtatttattgtttaataagaattcagc

SEQ ID NO: 54335 - DNA, 764 bp, Arabidopsis thaliana landsberg
  unsure (1)..(764): unsure at all n locations
accccggtccatagtctctccccaaccaaatcctttcctttgtgcttaggtattctagtttgaatcatttattcaggagataaatataacattctggttatctaactatctttatttcttctcttctagcttccaattggagttttgtgtctgacatttattaatctctttcgctacagttgctcgtcgtaggaggagctgacatcaatcctgcagatctgaagggaaattctccacttcatttaatgccctcttgatggcgggagccagtgttgcagccaccaccctcaaaggagatactgtaagtattttttcttatttttcttatgttatttcttatttatgaatgtgcaggctctgcatttactgcaaggagaagtgactacacggatatcattactgcatgatcaagagtctcttggctggaggggccatccgtggagccataaatgcttttggaaaggtaatacaccattagagaaatatatacaattatacatatcgtttttgagtttgggtattgtttgattttacggacacctctaatggttgcaggactattgaagccataaatcttctgcaaactccttaactacgtgtgtagttgctgcaatcacttggatcaactctctctttttttttttttttgtgttgacagaacattgtgtgtttgtcattaactttttaagtaaattttaagaatcaacaatataaaatactctgaattctctttgtttgaatataagaatttacaacangatatg

SEQ ID NO: 54336 - DNA, 346 bp, Arabidopsis thaliana landsberg
aattcctaatatatagcacaaaaaccgaagagagttggattctagcatttcatgcattatgcttcagctgatgaggcatagatctgctctttactcgtttgcaagctaattcggttgggttgaacagcttttgttcttttatttctcctttaaacttttttttttctctgtcaccaagttgaagaaaagcaatcacgtatatatcatcatcacatggttctcatataccggcaacattttgatattgatataatattccgttagccaacaagaatctcaatatcttacattataccctaacatgtacgtgtgatttgaaactgcctgtgagatggttccctctgct

SEQ ID NO: 54337 - DNA, 243 bp, Arabidopsis thaliana landsberg
cataaataacctctcctaattgggagaatgctttcttcatttctttctctgtaacattttggtccaaattggcaactgaaatctgtacaccaaaaccaatgcatgaaaacaatcaggagacttgacgagaaaaaaaaactcaagcttttcagataaaacttaccgttgtacaggtgacatcactttcaggtggagcaacgtatgcttggactggtgcagcaactgcaaatgggactgtaactg

SEQ ID NO: 54338 - DNA, 230 bp, Arabidopsis thaliana landsberg
tccgagctcaagatcggaatcagggacatacccgcccccgctgtatcggagccatccgcccaggacactgtacgcacatgtgacgcgcaagccataagtggcatgccgacggtgcgtcatccgcgagctcacccagcttaacagcggcactctcactaggcgccttcaagccgcggtagcagccgtacccgatggatgaacgcgtcggccgactcacgccgagaccgcga

SEQ ID NO: 54339 - DNA, 111 bp, Arabidopsis thaliana landsberg
ctgggacttgctgtttggggatggtcgctatggtttttgtcttgaagaattggagtggtatctttatggcgagaacaggcaggtgttcacggatcatacgtgtcttaagga

SEQ ID NO: 54340 - DNA, 1092 bp, Arabidopsis thaliana landsberg
actttgagaaattaataaaaatcattcttctatttcgtggccaccttttagatttttatttattatattagataattaacctattatcttaaaatgaaatatgattggttttaaaagttttgaatgttttagaatagttaaaaagacaaatggtgtcttttgaaaatggttaaagatagtaggcagcagtaggcactatggttaaaatagtgagataaaaaattagtaaattacttacacattatgattgagatatgtgcatacattatttatgatacttcataatacagtatcaattaagagttaattgtatcatgtcctcttaaatctctatatttactagtagtaacttttactgcaagtgttagtattttcttaattttaaaacgtgtgttagtatttggtcaaaaaataaaaataatcaatgggacttgtatctgtcctcttaaatgtttctatttatgtgcttttaatgaaagtgttggtatttgttttaaaaatatatactatatttagtgaacttgtggtgatagcttgttactaaatgttgatcaattgctttctagtctactaagattttcaccgagtatgtcctacatctataatatatgcaaatgcaatcgtgagtgagattcgtaaggagttatcgcgttaatatcgatcaattactagaacaattacataaaggatatatcttattaaattaagagagtaactgagtaagagtatgacgaaaacatggtatttttatcatttaatattcacatttgcccaaaaataaaaccataactttttttctataaaattttgacagaaacattattactccgtcattcacgacacctatactctctctactttttcctttttagtttcaccatttttagtctaggattttgccagttatacttataaccgttaattgtatgatacgtagtataaacgaatgttactataaatagatgaaatgaaatctctgaataatattgtttccacgtgaatcgtaagctaaacgtttattctaaatagtgatgacatgacgttatatattaatagtatcattgacttaaaaaaaagtttcaatgcgtgggt

SEQ ID NO: 54341 - DNA, 921 bp, Arabidopsis thaliana landsberg
tcaaaaatgagaagaatgatctctattactatttataatatatatacacatggagatgtttggatcaaattcgtaccatttcagccagagatttagagactgcatctttttcaacttcatcatacacatcaaatccaggccagccaatataatccatttggtatcaaactgatcggtgacaccaccttcaagagatcacagaaaatattgaacattatcacactatgttaatatatatctatatgtcttatgacttacctagaagatcaaatttgccaccaggactcatttccagagaccaagaatgttccccggttctctttgcagaagctggaagccggttagccaccacaagcagtgtttgcctttcaccacatacattatcataagccatcaacttctttcaaaattcgtaagacacttatcaaattaactattgatctgcaaaactttgttttctgtatatattaaactataaatgacgtcaagaaacagagaaattcggaacttttggtgaagaaaaatattttggcgtgatttttattagttagattgaggcacaactctatatattaaactaaatattccaaattttaattttttacgatcatttaccataaatttttatttatcttggcaagtcttccaaaatgtcaataaatcttattattatttttgaatgtaatctcaataaatcttatatgtacatgtttatatttttatgctttggttttcacatgttaatttatcagttagattgatgcacaactctatatattaaactaaatattccaaaattttttttttaccatcaattagcaaaacaaaatatttatcttggcaagtcttccaacaataaatcttattattattttttgtaatggcaaaaaatcttatatgtacatgttcctatttctatgc

SEQ ID NO: 54342 - DNA, 230 bp, Arabidopsis thaliana landsberg
cgcatgttattaacataggtcgggtcggacctacactctggttgacccaagcttcatcctggtcattgtgtgatcacccaaggaagggtccataagcagggacaattgccctatgaagactcgctttcgctacggctaccgcgggacccattaaccaaaccacagaccattagtccccggcatcaattttaaacaggcactcggtcaaagccctcggcacactccattgc

SEQ ID NO: 54343 - DNA, 113 bp, Arabidopsis thaliana landsberg
tgctctacaggcgtggacacctctagcgcgcctccggtacgttttgggtggcctacacctgacagaaactgtatgcctgatactgagcccttgcgcccttctgctgctagaca

SEQ ID NO: 54344 - DNA, 1365 bp, Arabidopsis thaliana landsberg
  unsure (1)..(1365): unsure at all n locations
ttttgtttcttatatagatatttctttttggcagattctcactgggatagccttctctttatttgaaaaggaaaatgtcgacattgcggttatagaggtggctcatctttttacattagacatttaaagagacttgcttatgctattgtgttgaagattgccgtctagtgtaattagcttatgtataccactgttttatattttcttgggtatcatcaggctgggctaggaggagctcgagacgctacaaatgtcattgaaagttcaaattttgctgcatcggtcataacaacgggaggtgatgaggacatggcagcacttgggggttccttggaaagtatagcagaggctaaatctggaattattaaacacggtcgcccagttaggtggtttttatgtgtttgcttgtcttataacctttgaattataagcacattgatagatagagttttacgtgttgttatgaaacttgtaggtggttttaggtggaccgtttcttcctcatatcgagggcattctccgttctaaagcagcttcagtgtcgtcatcggttattttggcatctaatattggatctagttcttcaatcaaaggcatcattaacaaaaatgggatcgggctttgccagtcctgtgacatcgtgatacagaatgagaaagatgatcaaccagtaagtttcaaaaaccttttattttttattcaagaaatgggtctgtgattcttaatatatcaacaaattgtacatataaatgcagattgttgagcttagtgatgtaaacctacgtatgcttggacatcaccagctccaaaatgctgttactgccacatgtgtgtctctttgtcttcgcgatcaaggtataatgcacttttgagtctctatatatagcaacaaaagaattgaacaagcttacaaattttgttacttttattatggaataatcaggatgtgggagagtgacagatgaagcaattaggattggtttagagaacactcgtttacttgggagaagtcagtttctgacaccaaaagaagtagagactttactattacccggagcaacagtgcttcttgatggaggttggttatagctttaatgtttctacttcggatcttagtcaattgaaagttttgtttcttctctatgagtatcgtaatgttagaaccgatcctctttgcttgaaacttttggtttacggtatcaatctatggtctgtttttcagctcacaccaaagagtcagcgcgagccctcaaggagatgataaagaaggattttccagagaaaagattggtatttgtggttgccatggctagtgacggagttctatgtgtcatttacccaagaccatctnttgtgtctaaaacc

SEQ ID NO: 54345 - DNA, 176 bp, Arabidopsis thaliana landsberg
gctctacaggccatgcaaactggctacctgcggctgttccttggcccgcatgtcgtgacccaagggttttattgtgattcttccacaggggtctctcactgctggctcgggcccccccagacgggggcctggttttccatccacctaagctgtgcacgagacgcccaaagtcaact

SEQ ID NO: 54346 - DNA, 886 bp, Arabidopsis thaliana landsberg
tgtcagtaattttacatccattcttctttacaaagtcttccttggtcttgaaactcttgacgggttctaaacacagctcattatatgtctatttagtattttacacattggtttcagacggctcttaaaggtctctctagcttcatgtcaaccatctaaaccaaccaccattaatgttcctctgcccattttcaagaaattagaaatcatttttctctaagttcttgatcgtcgccatgaacgatcttatctcaagctcattcaagagatacacagacttaaaccaccaggtccaactcgatgacatcgagtctcaaaatgtttctcttgattcaggtaacctcgatgagttctttggatatgttgagagtgttaaagaagacatgaaagctgtcgacgaaattcataagcgtctccaagatgctaatgaagagtccaagaccgtacatgattccaaggccgtgaagaagcttcgtgctcgtatggattcgagtgttacagaggtcttgaaacgcgtcaagatgatacagactaagcttgtagctttggagaaatcaaatgctgcgcagaggaaagtcgctggttgtggtcctggctcgtctgctgatcggaccagaacatctgtcgttagtggattggggaagaagcttaaagacatgatggatgattttcagagactacgaaccaaaatggctactgaatacaaagaaacggtcgagagaaggtaaattttatttcttgatctttcatttaggtgttactctgatccaacaaagaacaaatccttttactatgattgaacaaagatcaaatcttatttcgagaaatgttctatctttcgcagtaagagatggtaaggttttgagtatgtggttgaatcattgaa

SEQ ID NO: 54347 - DNA, 654 bp, Arabidopsis thaliana landsberg
accacataaattattattaatatataaaagcattcttttgttcacacaattggtcttcatttggtttcttgatcctccaacaaaaccatcaaatgctatagttttttgcctttgaatatcttattaagaaaaggacaagtgctatgtttattatatatgatcgttagatattcggaacaaatcttaatgaatggttctcgcgctcgggaaaaggttagtatagttgttgtcgattacttctatggggctaaggttctacagtgattatagcatagcgaaaaaagaaaaccaatcataactgtttaaataaaacacctactcttactcacaaatctttatcaaacttcgttagtgttttcactttacatttttgcaaaaatattatatgaaaaaactgaaaataataatgttttatacacaaaaagtggaatcttttttgaaatttgtttcacatgtaaatctaataactacgatctcataaatatgtcctagctagtagctaaggtctttgatgaaaggtttggccaatgagactcattattcaagaaaattccaagatatttacatcaaattataagattgttttctcaatgtacaacttgtaaaagaaagtagaaaagactagttgtatatagtgaatgttctgaacatttt

SEQ ID NO: 54348 - DNA, 676 bp, Arabidopsis thaliana landsberg
accttgcagtatttgtaagtaccttaccccgtagtttccaaccggttctgcagacatgattcctacataccgccttccagatatcacctgattgaataaacaaaattgtttagcccaaagatagactcattgcgcatagagtaaagctaagtgaatgcatttttgttcgaaactgtatagaatctacatgtgagtagtttaatgactcgtaaccataagacaaagaacaataacaagactcatagctaagatacttaaaagaacaaaatcctaacagaactaagcaaaagtggcaaagaaacaacaccatatctccatccagtgtaactatactattgaagtggttatacttaaaaagattgcatctttgttaaaacccatcaaggatctatgaatgatcagccactagaacagaaaactagtagtcataaggtagagaaacaaaaacacggcgtattggttaaccgtagcctaatctacataaacctcgtcttcaagtttttaagtacatgtcgtgacaagaacaacaacctagttgtcaataatttcacagggattataaaaaagtcaaagagccaccaaactagaatttcctttaaccagaatccatctagaaccaagcataagttggagtaagaacaacaagctagtggtcacaattttagctggaccaaag

SEQ ID NO: 54349 - DNA, 684 bp, Arabidopsis thaliana landsberg
  unsure (1)..(684): unsure at all n locations
ggcaatcactggccctgcatctaacttacgcacagtaaatgctaatgattctcttgtttccgggacaccatcctagtgcaaacaccaagtgttattgtgcacacttgaagcaacagtcttagcaatgtagtaagtaagaagctaagcaataacatgaagagtgtaatgagttcatattgaaaaaacaattgcacctgtaatgctctttgaactggagctgcaccacggtacagcggcagcaaacttgggtgtatgttcactgtccctaaaacattaaacattggcttcaaaacacaagactcatttgcagctatctactataaagaaactacattcgtttccataagtccatcaaccaattctttaactaaccatgtaccggaatcttaaggaacttagtaggcaaaatattcccataagctgctgtaatacaaagctcaggttgcaactctcttaaagnnnnnnnnnnnnnnnnnnnnnnnnnnnaatcacaagatatagcaatgtcatcgtcacaagaaagaacaaaagatcacatctttccaaaagcaatagcttgatattaatcagacaagaattcttacatctcctgccttctcaggggagaaaatgagatcagaaggtaagcctttatcaagagcgtattgcgctactggtgaaggcaacacttttttacccctatct

SEQ ID NO: 54350 - DNA, 1127 bp, Arabidopsis thaliana landsberg
aaatgtaatttaaagttctttttgctgtgagctctcttgtaattgttattatgctatctcatttgtatatttaggttatagatatgtcttttcagagaagctgtttgacattgagttaaatcaggtaatttaattcatacattatatttgtggttagacaaaactatttgttttaaaacactgtaaaccgtagtaaaagaactgcgactgatctaatgaactctttgcatatttgagttaatacttatttacttactgtatatagtaaaagaaagatcgaggcttttaaaaatctccacaaaatcttttaggaaccaatattttatccgtaattttgcaaaacttagttagtattaagtacaatattttggcaacattatctttagatctttacctgaacaattccttaaaaaaacttgtaatagccatcaatctgaatcttcacactctcaatttattttaaaataaatgataaataagtagtctagtggttcatattaatattgtcatttgtaatttgtatcatcaccatccaaattcaaactggcacatgttattgacataaaaacagttataaaatttcgaccagaaaaacaattacaatattaaatgtttgttttgaaatttatttgttaatgtttgtttctttgataaccagctgttgatttatattgtacaatataaagattggtttcggacaatctttaatacttgatttgatgcgatagtggtccactgcagatttgtctccctacgtgttttcaatgataacccttccctctttggtatgtttactcacactcacacaatgattaatcattcttttaatcttaataaactcccattaatggctgtttgttatgatcattatacaatataatacactctctttgccagaaatacttttcttttccttttaatgcttgttacactttgttcgtttataggtttattacaaatcgttcggtaactgctctaatgtcatcattcgaactcatagctagtaaagactagtggtgtgttagagagaccgagtcacagagagcaaagcaacgattgttggacacttgatagttgtgattttggtttttttacatctttatattttttcctattaattatgaaac

SEQ ID NO: 54351 - DNA, 174 bp, Arabidopsis thaliana landsberg
tgtgctctacaggcggggaaaccccggcacgcgtccggtacgttttgggaggcctgcactcgatagaacctgtatacctgattctgacccttggtcctcataccctgacacagggttagctttgtagcacttccagagtggcatctcactactaggtcggagccccccccaagg

SEQ ID NO: 54352 - DNA, 820 bp, Arabidopsis thaliana landsberg
ccgggacacttgtggaatcttgagagcacatatcattggattgcatcattttcttatgttgtttataatgttgggtttctcggtagtcttcgactcagtaaaagctccaggtttaggattaggcgcgagatatatattcacgatgggagttggacgtcttttaagagctataacctttgtatcaactatcttaccttcagctagaccttggtgtgcttcagctaggtttaacaatgtaccttctcagcctcatcgttgggctcagaaatattatgtcccttatgctaatgatcctactgcaattagaaagctccttcattgggatgcagcttatggtaatatctagtctcgctccacttattacttaggtatttattgcttactgattagtacttttttattttaacagctgatccaggaagttacattggtgactatagagctgattggggttcaatgagcttccttaatgagttcttgagaccgagttactctgaagggccttcttggtttgctctattaaagaaagccgggggtggttgtaatgatctcatgtatagtggtcatatgcttgtagctgtcctaaccgctatggcttggacggtaaaactcttttcacttgtcagctaaatgcattaaagagattttgttatgacgccttaactattctgtggtgaatttatcaacaggaggcttatggaggtttctcttctgcaatgatatggttgttcgtggcacacagcgcacagagagaaatacgagagcgacaccattacacggtagactgcattgtggcgatatatgttggtatccttctctg

SEQ ID NO: 54353 - DNA, 645 bp, Arabidopsis thaliana landsberg
taagaaacttaagtaaaaattacgaaatggtccaccaagtttcttcaaattacacatgcgtaccatgggaatgggaggtagcattagcataccccctcaacactaacaatcttctcgtattgcactaaaaacaaacatatcttaacccaatatcaaaaatttagtaagaaccaaagcaaaacctcaaatttttgcaagtcagatcagatgattcagagtttaactagctctcttctctttatggtcttcttcttcttcttcttccagcaaatacttctcaagaattgccactgttgcttgtttcgcgctgaattaacaacacaagcaacattattataagtcattttagctcaacaactccacaaagattcaaactctaaatccattaattcgcatttactgatctaaacataccttccgggcctaatgatcttgtactttccaactttagtcagatcgactattgtagatcctgcgcggtccgatggaagtaaaccaccatcatagacataagcacaatgctgccaaagattctcaaaatctttcacacaaacgctgcttttatcaccgcttatattagcacttgttagagccaacacactggccgaacctctcgatacttctctaatgaattcacaatctggg

SEQ ID NO: 54354 - DNA, 760 bp, Arabidopsis thaliana landsberg
ttaatatagtttttgaggcatttcttgggacgagttttaatactaaaaatatattaattctgaagcatgtgggaagattatatactagtgggggcttaattggttccactatttggaaagaaaacaaaaggctaatctggttgttgaggaaagtatgagagaaaggacactcaagcagatcgtcgaggggatcaaacgttacttttactgtccaagcgtttatcaacatttacaattttattgacttgttcaacatgcttgttccttttttggtcctaatactttcagttttttcactaaacaatctaatggaagaacgagaaacagttaaactaaaccaattggttaaagatattgaaaccgaccttgaactgatttaactcagaaatgtcggtttcgttgtttgtctgaattttgtgaacctcgagaaaacaataaaataatattaaaaaaaagacagagaaagagtctctgtttctatcttcttcttttttttcccggtaacagggagctcgcacgggcggctacgaaatcgctgtattttcaaatcgtctctcagtttccatgacttcaggtattgcaatcttggattcaattttattaattttgacgaattgaatcagatcaatacatgacaccgagaacagatcaattttgagaaattctctctgttgattaaactttctctatattttcattcaaaaatcattatgatgggaaccgtttggctttgagtatccttcgaaactcgtataatgga

SEQ ID NO: 54355 - DNA, 723 bp, Arabidopsis thaliana landsberg
cattaattggagattgaagaaaaaacactgcttttcatattctgtaacaccacttcaattcctttttctcttgtttcctattcagtactatgtcctgagagtgcccataactttttttgtctttttatctcagtttccataagaaataatcaactcaagccacaatgtgtgtgtgtgtgtgattagttttgtgataagacattccataattttcctattgtgtgtttaggataagtgaagatgcttttggtttggaccatattatataaataacatgtgtctgcaatgccgcaaagtggagctttcttcactcacaataatcattttttttttcattgaatgaaacaaacaagacattcaaaatagaacaaaagttctacagagatagagagagaaagagagcttttcttcatgggtggttctacaagcaaggatgagagaaacagtagtaagagacgcatcaaggtgaaagcaaatgaacagagaaggagagaaacaagaagagagcttgatgagaaagagagagtgattttggcgttgaagatggcagagacagagtggaggaaagagaggaagagactgagagaggaagtgaagaggctgagacagaagatggaagagaaggaagaaggaaaggcgaaacaacacgagtgggaatgggtcgtggaacagatgtgtttagagagagcagtgagggaagaagctgtggagaggtggaagcag

SEQ ID NO: 54356 - DNA, 1175 bp, Arabidopsis thaliana landsberg
tttagagtagtcattgaaaactgaaaacaaagtgaaaaaaactcgagccttgaaatcttaatttatgtgatttgttttattaaactattgtggaatgtaaaaaaaaaaaaaaagtaatttatatcatcactccaagaatatagggaaatatgggtatttgcatgggaggattgatataaggatagtcgtgacgccgacggtgaatcgttttgtcggtggtgggttccattttcatctcttttttttttacttatttataaattttaaaaaatgtaaattagaactctaaaaaacgattggtgactttagtaaaagaaaaaacaacttgctactttttggtagcaaacctaaaattccgggaactacaatctataataatcttttacgattttctagagtggaggatctatcaatttatagaattttcgaattttcacagatttgttttctatagcaattttttaaaattctcataattgttatattagtactagatattttagtgatgatacctactgaaaaataaatatcttgcaatagaaaacgatttttccatcatcattattaacaaagaaacaacatgtgactattattttgttctttgtttcatcaacattcaataacaaataaaattcatgaaaaataataattaaataaaaccaaaacaatagtgtaattatgtgaaaataatagttagattttaaaagaaatgaaaaagatagaaaacgaaaggagagacagagagtgaacggaaagaaaaaaagatggacgataaaataaataaataattttttttttttgcacacccaaaaattgcagaaggaagctatatatgttaacgttagcttctctgcaaatctccttatctcactctctcgcgtccatttttttttctcaattcgtcttcaaaaattcgttagattgagaagaatctaaaagtctctctcggtcatcggaatatcttcttctcaggaattcgaggagactattcgaaatcggaaatcgcgctttgaatctgaaactcagaatttagaggacgcttactccaaagaatctagggtaaattctacgttcctttcgtctctataatcaaattatatatgcacagatcgagttttctgtttgggtttcttcatgaagctcgacgaaatttgtagaaaccagatctggatttc

SEQ ID NO: 54357 - DNA, 434 bp, Arabidopsis thaliana landsberg
acccgccctgctccagggcggtcagctgcgcgtcgatcggcagggagcccgtgcccggctcgttgcggccgggggcgtcggcgatctgcacgtgcgcgatgcggtcgacgtgatcggcgatcaccttgtcgacgtggtcaccgttgacggcgaggtgatagaggtccgccagcaagccgatgttgctcgcgccagaaccctgctgcacctggtcgatcacggcgagcgcgtcggctgccgtcagcagcgggtaggcgggcgagccgctgaccggctcgatcagcacggtgccaccgatgcgctcgagacccttggctgccagcgcgatgttctcggcagcgaggtcgtcctgggctgccgcgtcaccgccgtcgatccggttgccgtagagggcgttgaaccccgtacagtccagctgctcaccgatgccgacg

SEQ ID NO: 54358 - DNA, 804 bp, Arabidopsis thaliana landsberg
ttatttgttcattccatatgattatgcacgtcgtcttgacttaaagactcataaacctttattaaactaacacaatttcataattgttgtgtcctttcaaacaaggcaaaattacaccgtttttgaactcatagcttgtatgactcatcttcatatctagatagtcataagaacgatcgaaaatatctcatcttatcaaccaataattccattgacttttaacgactcgtctggcatgattgaatattgatagtttaaatttattcttcaaataaaattttaattgcttgactcaaacgaccaaaaggccaaaatccaatatatgttatgagaggcatgtgcttatgtataatgtaagtttataaagctagctagtatttaaattttatgcaaacctacttgaccaccaaattatataccaattcaactaaaacgattcatataccaatcataacataatccgaatatataaaacattaaactttttaagatctttcgttgcaatttccaaataaatttttattagcttttttttggtaggatgaatttatattagctttaacaacgaatgaggtggttttggattagtgattgtttaataacagtggttgtgcgatttcgaaatcaacacgactaataacttttatcaaaaggattcgtattctgtatgatgtaagtagaagtaaagtcagcgaagtacattcgtacgaattatatatatgtcaacaacgagcttttataacattctgttcgacctattccaaattgctttttaaataaatttaccgattttttttccttctt

SEQ ID NO: 54359 - DNA, 917 bp, Arabidopsis thaliana landsberg
gtccaaaaatgttaaaagtcccgaggaagtacaaattcaaatggaattcaaaatcacataagaattcaatgtctaatattagtgcaaagaagagaattcttgagcgcagtgcttcagcagctctatcttatttccacagtctatcacaacaaaagcttgacgagccttcagtgttatcaacaaattatgatgggttgagtttggatatgctattagttaaaggtgatagagaaatcagtaatcaatatgatcgacatgtgccgtatggtgagcaatcattagctaatgatttggacgggaaaggttatcgagtgaggggtaaaaggctccttggtgtaaaaaaggcttccacgttagacaagttcacagtatcatgtgatccattccttatgactgttgatagactctgtgcactcttacaaactaaacgaagcccatctgttgaagatattgtgaattcttctgaatctgagactttaagcagtcagagaggggatatatctatgaatgttgttaatcagaatactgacgatgttccacatggtaatcgaagtggaaatcagcctcgtgactttacgttcaaaaagcatgagcatcaacctgtagcaaaccattggcgtcccagctggccacggaacaaaaaattaaaagaagcagtgtttaatattttaactggttcctctaagaagttaacaggaagggcagatccgaatgctcctcacttgagcgatgaactggagaagctgcctgctgtttatgttgagaagacactaccagttatgcttgactctgtgcagtttaaaggtgggacacttcatctattagcttatggcgatacagagcccacgtgaggggcatttatcgctgattatgtaatgtctaaatcagccatactatgcccttatttttactttcca

SEQ ID NO: 54360 - DNA, 366 bp, Arabidopsis thaliana landsberg
tacaactttattgtaccgcatttagctcattgcacttcgcttccttattgcttcacgctgggtgactccattatcacaaagcagatccaaaactcgcttgattcctatatgtggggagaatggtgcatcaccatttagcaacatctactaagactttgttcggtttcttggacaatacattccatccatttctctttacccaataaccaatttataaaccctccactataacctaaacaaataccgcttcctcatgaatctatcttgaatctgacatcttttggatcaactttatccaatttttgctgaaggagcaacttccttttttaccttaaacagctcaaaaaactcttaatttcttacttt

SEQ ID NO: 54361 - DNA, 1367 bp, Arabidopsis thaliana landsberg
ttaacaccccatctaatatattcattaatcaactgaaaattacataagattttttatagaacacaaagaacactatccatatgtaaattctaaaccaaaacattcgtaccaaaccgctttatattacttatacaaataatattcttcaaacttgatttttgagcctaaaataaaatttgatgacaaaaaagaaacacaatacataataaattgaaaaatgagtttaaacgatagttttacactacaagcctcattcattaacaaatatgcataaatcctatacatttacaatagaatctcacaagctttgatttgtttttcctcactttagttctttttattttatttttttaatcgaggaactctaaaccgagacccatatatcaccctatcgagagtacgatagttcctctgggagtgagaatcgaactggagaactaagtaacataacccttacaaaatttaggtaattcactactagctagcccaaaggtattggttctctgtatatctaagattccatgtcttatgtgtaatctaaataatattttacatacaatctctagtgagagtaacaatatcaatagtttcattaacccatagttcatgaaatctccatcctcgtcccttgttaacattacggacctatggttacatatgagaaccatcagaagtcttgcgtattttctgcttgtcaacaacgatttgagttttactaaaatggaatgaattcaaacaaaaaccaaaccaaactacaacaatttgtttaatatctttctataaaaccaaaaaaaaaaaacccgaaaccaaaccatatattttaagttcgtaattttcaaccatcaccaacttctcctccaaatcaattaaatgcttttcggagactataaaaccttagttttctctataaataaactattctcttttcttcaaaaaaccaaatccaacactcgcccaaaagaatggctacaaaactcaatctcctcttcacgattttgcttctcacactaacactctctcactcacgcccggcccgacccgaatcatcatcatcaaccggatcctactcggatcagctcaagaaacactctaaagataactataacaagggctatggatcaggaggataccctggccttacaaccgaaccagcaaccggttttattttaccgggttccggtcctggcggtagttacagcgaacttagcggcggatatagcaaaggacgtggggtgagactaacggtgatgtgtgaagagaaaggtcattgttacatgaagaagctgacttgtccggcaaagtgtttcaagtctttaagccggaaaggcaaaggatacggtggtggtggtggtggttgcaccattgta

SEQ ID NO: 54362 - DNA, 1060 bp, Arabidopsis thaliana landsberg
caggggctggtgatgatgaagagagttgggctagaggtttatccccaaatgttttttggacacatgttgttgttttgattcactcagggcctgacttgtgtaaccagaaagttgcagagattgttgaaaacgatagagtgtatcgagcgcatagaggtcaagaagctcctcaggttgttgtcaaatgctcaaaatctaatggtggagtcaatcacgctaagagtgatgaaatcttatgtcttagtgcacaaataccgaaagttgatgaagaaagattagtattttggttgtcatcaacgaatcttgctgttggtgcatcacaagtaggtgagtttaagtttcttactacaattgtagtctctttcttttccattaactaggaaaatcttcagattctcaacatttgtctctttcttactacaaatgttgttgctttggcctctcatcaaatcttcttatccttttgtgttgcagcttgtaaggagacatcaattgactgcatattaaattgtgatcaaaatcctatctcagtccctgtatcatatcttgaagagcatttgcatctacccatgaaggtatgtacctttaagacaaaccaaactcttgtatgacacacaatgttttcctctaacaaatattcattaaatgtatatatgttcaccaatcaccagggttcaaaatttgatagattttctatatcaagaaatcttcctcccgcggttaattttgctaagctcaagatgagttcagggaagaaagtcttggtttgttgtcaagatggtaagtttgttaaagcatagtgtgtagtttgtaactcttatgtaggtctgatccatattgtaattgtaatgataggggaagatatcagtatatgtgtttgcttggccatcttgatgtcattatacaatgaagaatgcgatgtcttgtacttctttttctgaaccataatggtgtctttaaccttatggcccataaaactaacccacttggatctatcggcctatgattgttacatgatgctgggatatatgaattataaaacattctgcaggggcctttg

SEQ ID NO: 54363 - DNA, 1178 bp, Arabidopsis thaliana landsberg
ggatagaaaatggagggaccgataattagaatctcaatttctaggcagagtgtcaatttttttttcttattcttggcattgtagaaaatgacccggaagaaaaaccttaaagtttaatgaaggcgatggttggtgtttggattagattccagcttttgataggtttagcatcaacaatgtcttggttcttgttctttaagtctaaggtttttcttttactatcaatctttggttcattcctgaaactgtcttcaagaaataaccgtaattgaactagaataaacagaatctttggtgtagtttgaacgcaaaacaacttttccattgaaaaaggtcgaacaagacatcatcaaatcatggggacataattatccatgattttctaagacaggacttgcgcaaactctaagctttcgtaagaaaaatctctttatataataataaactcacattgaatcatcagaatcttctgattcacttctctccggttcaactcctgttggattactagtgcctgtctcaggagcttcaggcttttcaacaggtgtaggtgaagaagaagatactttcttacttgcattactagcattctcgttcgtagctggttcctcttgctcatgtacctacaccaaaaaaagttcaaataaatgaagttactaaatccaaggagcaaatatagacacatcatgtgtcgaaaatagaaagaaaagcttacattttctaccgttccgccactcaatatattcaacaagtctctctcaacccgctgtacaagctccggctgcaacattttggcaaatcaatatgttaacttaatagaaagaactttggagttccaaaagatacgtttcactacagactttcaatcataatcacaagtattagtgaaacaatgttgatggatagataacaacaaatgaaaattacattaaggtcaggctctcgacgaaatctcctctttcgagcatccttcattggaggagttagaccatgtctgtattcaactgtattaggcgcaggatcaccaggctccctaaccatgatcatctgtgtgccaaatcaaagcatccatattgagttttagtccaaaattacagaagttaacgcatataaaaaaatagatgaatcaagtaacttgattttacctgcccaatatcagcaggtttactaatgcacaa

SEQ ID NO: 54364 - DNA, 305 bp, Arabidopsis thaliana landsberg
gggtcctggtacttatattgtggagggatgctacaccaatgtagcgcagatgaggttaataccgtttgatgttctcagagcttgtgtgattcattgatattaacagcccctgctattaagcgggaaatttttcaaaaagaccaggaaaaaaacaagtttcccagccataaacaagagccttttatggagtaaccgaactgctggcgaatagtatgtaggatcatgtttgcgagctaccaagatagtagctcctaggacttggtgtacaggactcacatcatgtgatctctgtgttagcaagactg

SEQ ID NO: 54365 - DNA, 582 bp, Arabidopsis thaliana landsberg
tgcactgaggtttagacaactcatagtgatcacactctttttacacagctagaagatggaatttttgttgtcattgtggtgtatgctgatgacatcataatagcaagcagttgtgaaagagtggttcctattctgattactcaactcgagaaacttttaagcttaggaatattggagctcctcaatactttcttggaatagagatagccagaacatcaaaaggtatttctctttgtcaaaggaaatatgctttggaattgttggtggaaacaggttttcttggctgcaaaccgtcttctattccaatggagcccaatcattccttacacaaagatgacactcctcttattccagatcctaaactctacagaaagctgattggtaagctactgtatctttgcacaacacgacctggcatctcttttgttgagggcaagttatgtcaattctcttctgctccaagagaggttcatcttcaagcattatataaggtgttgaggtatatcaaaagtactgttggcaatggcttgtactactcttctgatccggatcttactttaagaggatacactgatgctgact

SEQ ID NO: 54366 - DNA, 946 bp, Arabidopsis thaliana landsberg
cagagaattgttttaagaaaaagaaaaaggcgtatacctttgggagggaataggcaggcacaatcggtgtagtgcagcgtaagaatcggtctaggatagattcattgtcaaaagaccatcattatccaacaaagaaccagactttgacccaggaaaaaataaatatgagagaggagagagtattgcgggattctctttccctgacgtttcaaagagcttagttttcggacaaaagtgttagctttattagacgagcatttgagactttcacggcaatgtcagaaacagggaaagattgaacgaaaagggacaaactttttaaagaaaactccaacggaactctgttttgagcaatgagaaaaaaaacaagtaaaattgtatctactttgagataaaagaaagtaaggaaataggtttatataatcaaccaaactccatgagacccattcttcttaggcaggagattattggtagattcacctgtctttctcacaactctccaccttctccatttattttcattttcatttaataaaatatagtttcgtttctctaactttgtcggatgagattgagttttgtttgtttgggtttagtataaaacgttatggcttcttaatatcttcattttgcatagttcgtgaacaacacaacaaaaacagagctattattcctaagtcttagatgatgacatctcccaatacaaagtctccttcttttggatacatcttgaaagaagagaaactaggtcgatcacatataacaagatttcaagagaaactgggtcaatgacttttttgtttacattttataattcatatggtttaaaagaatcattaacataaaaagacatgtgtgacaggatcagtcggcactgttgtaatccaagttaaactaaatatctactatagaagtttgacacattctaatagtacgacgacatggg

SEQ ID NO: 54367 - DNA, 1280 bp, Arabidopsis thaliana landsberg
aaactctggtaaaataaataaggaaccagatcgatcaaaccaacctgaatagacgtataagattagcttttaaacgcattcccaataccaaaacctcctcccgcctaaaccgcgtagatccagaaggactgctctcgtctatgtaagatccaaattacagcaattcaaaaggatatagaactctcctcaagcttcacattcagaaactaagcacagagagatgaggaagaagagggtatgaatccgtcggtcgattagagtgcgctcttatgctctcgcacgaccctttgtgttttttttgctttgatttcacaacaccgttttattgcgttacctttggaaataatttaattaaacaaaaaacatcccacaaaaatcaaattttaacaaaaaaaaaaattggatttctgtctgtttctggcgttaacacgtggtgattgctgattgtgacagaccaataagagttgagtatgagtggtgttgaagctttagtgacgctgacgtgtcatgcgggtgatggaaaggattgtatttgtatccaagttttggctttttggtccaatgtttctttcgcttggacttacatttataaaaggaaaaaacaaactttgatttttgtttgtttatgtttttagttaatgactcaatggtggttcgtaacttcgtttaatactatttttttgttaatttagtgtaacgtaaacacgaatattaactgattttgttgttgtaggacttatctaattaaggactataatataatgttaatgcattcgttttatgaactgagagcttcatcattgtgatgttaaaacttgaataagaatatggagtactaaacaagcaaatttaaaatgaaattttttatataagaagtcttgaagtcacttatcatgaattttattctatcttttttttggtactccactttaaactaaattttgaattggtcttgaagtattttagggtttgtctgaatttgaataccgtaacaataaaggaattcacatgatcctagaaatatgtgacatctacggcatatgatctataattcattccttaaaacaagatacacacacaatatgcatgcactttcgtgtagacttgtagttgcacacaaaacattatcgaacacataaacacaacgaatgttttcacacttcacactttataaatgattcttataaagttgtaatgaaggttcattttcgttatttaaaaaaagattcaccagtgtagtgttacaatcagttttagttcggtcataatttttttttgtc

SEQ ID NO: 54368 - DNA, 578 bp, Arabidopsis thaliana landsberg
agattgggtctgttgagtctattgcccggaactgccacgagcttgtgtgccttgaggtgcagcataacggggacgagtactactcccagcttgtccctggttagtagcccttcttttctctcctagcccaactctcttgtgttccagagctatagccttgtctagcagtctctagaaggacgggaatgtgtgggacatcagttggtattggagtggcccgatcaatccttccagaaataactcctgctttttctcatcatcatcaacttcctcaggagtatatcaggatagctggatgaatttctctgtattcacttattgacatgcctccctgtttgagggataggaactccttcttaatcttcatgaggccagcaggaatgttgtagttcctgaagttagtggagaattctgcccaggtaatggtgttagcagctgcgtgagtcacgcaatacgcatcccacaaattcgcagtggggccagtgaggtgaccgatgcatatagcactttctccctgtctgtgcactgagctatattgagcacctttccacgaactttaccagtcgcgacttgtagtg

SEQ ID NO: 54369 - DNA, 474 bp, Arabidopsis thaliana landsberg
ggtctgatatgcgtccaaaagaaataccagcacctcgcaaacaagtccgagagccgccctctgttccccacagttagcaagagcgtcctgccatccccatgaagaataggtaacctgcactacccacttatgtgcctacacctgctcagatatagatatctatcccaggcgcgagttcagctggtatcatcagtatcctacccgatgcgatgaatcgcctggaaaaccactcccagctgccacatatgaatcaccgcagcgtacagaagcacgcacgggatatcgggaggcgattctattacaggcctccatgtactcttccggttcagcaggtcgatacgcgagcgatggacgacggaagaaactgcaggctgtatgtacccatggtttgttgagaccagagcaccggagctagaggatcagctgatgctactggatcccatggacggtaaagcccgacacaagtcgcgagaa

SEQ ID NO: 54370 - DNA, 584 bp, Arabidopsis thaliana landsberg
ccaagacaagtggagcttgattatctcaaccaggagaaaccaaggagaccggaaccaacttagggaggacgaaagaaacttacccccataagtgaaactcaccgcacctacctttgctggaaagattgatcccgcaacttacttggaatgggagaaaagaatggagcacctctttgagtattatcactacacagagcccaagaagatagccctagcggttgcaagtcttacggatcatgctctagcatggtgggaccgagaagtagctgagaagaggaggcttagatacgcacaaatcacacgctggcctgacatgaagcttgagcttcgcaaaaggtatgtaccccctcactaccaccgcgagttactaaaacagtttcgtgctttgtttcagggatctaggagtgtagaggagtattatgaggattttgaactcataaggagccgccttgagcttgaggagaccgaagaatatctaatgtcccagtttgtagatggcatccaagaccgtatacaacgaaaagtggagacgcaaccttaccacacactacaagaagttcttcacttgctatccacgtgaacac

SEQ ID NO: 54371 - DNA, 663 bp, Arabidopsis thaliana landsberg
atttgatacttgtgattgaatctgagaatttccttgtcctatcgagactcaatcatttccagttgcgatatgtgaacgcgagaaagacacattcgaactgcgttcgatatgtataccatctgtatttggactatcagaaggagcagtgatgttgagtcttgtccctttgaagtctctgcattctactaatgctatatgaaagaacttgctattcactgagcttatccttctcacaactgttctgttcatccccacaaacttcaagctctgaaatcaattaatatactttaaaaaaggagaaaaccttaagatcaaattcaatgtttgtagagttaatctcacagttggaaggagtttgcagttagaatcagaagtacagttattaaacggccaagctaaagcgccttgaccgtcaaatgttccacctccggtaagagttaagccattgatccatccaaactgaatccaaccaccgcctgatctatactttgacagatcagttgatgccttgagatgaccctaatttcagttacgtggacagaaagaaagcattaaatcaagcacacaacgcaacaaagacagattttggagagtgttgataaaactaccttaactcggacagtgagattggatacattagtgcaaggaccagagaatctggag

SEQ ID NO: 54372 - DNA, 910 bp, Arabidopsis thaliana landsberg
cggaagaatcatcttcaaaaccaaagacgacatatgtgcgagtatactttgggattgaatggctaaagagttctagacatcagaaaagggtgacgaaaaacatcctagtaaatctgcaagatcgtctgaagatgacatttggattcttggaaaaggattttagcagcagacaacagcaacaacaagtaacataatatacatacatacatagcctttggtctaaaaatggagggctcgaagcaactcgttccagcttgaaaaacggaggtttgctcttgtatgtatgcacacaagtagtcatgtgaagacgagagagtgtgaatggaggtttgctctgctagtgcaactttgttgattctttatttttatctgcattcactgcttctttattgtatgatttgtctgtagtgaaaggagcagagttttgtgattatgttaatatgctctgctactgcctaaaactcttatagaaactgatgatgctctctagcattcttataaaattgctagatgagagacattggttttgttgatgaaagaaactacttgttttagatttatttctaaatgtttttcttcatttatcatgaacaacaccataaattgacatatgaggtttgtatcgtttggtcgtatcgaaatttgctttatgtggagagcaataaagtagtagtatgtgagtataggtaacccaaatttgaccattacaaatatatttgtaactttttatatctggcgagccataggttctacaagttaatcttttggtttaaggtgagattattaaaatttttaactaaatccgatccaaaattatctgttaacttttttttaaagagaaaaaaaaaaagtaaaattgaaaaaaaaagaagttggaaagtcaggccgtataaaactgaataaaataaag

SEQ ID NO: 54373 - DNA, 613 bp, Arabidopsis thaliana landsberg
ctcttgtagtcttattttgtctagctagataaaacattttgtaaaatagattttatgcttaaaactagattggactgggctatacatgtacatgtgggtcggcctggcccggcacgacacgggccacaaagacacaacacataaaagcacatatctaattatgggccgtgcttgccagcacgtgtccctgtcatcggcccacgacacggcccacaattagttatgtatgcgaggccggcctaaatagccaaaaatgccttaatgtgtcagaccggtccatatacatacaacagtaataaaaaacaaaaagtatagaatatatatgaccaaaataaaactaagatgttttgtggatgcatattaaaacctttggtcagaaagaaaacaatattacaactagcttattcaggtctctgtttagtgtttaactatgtactatacaaccatacagaatacatatacaatgatcatcatcgctatttactatcccatctagatattggttcccgaagcctattaaagcctaagattctccaaattgtactggtcatgtaggctttacgagccttagttaaatactaagtctataattagtgggcctcgatagacctta

SEQ ID NO: 54374 - DNA, 1016 bp, Arabidopsis thaliana landsberg
taaaatctataataatatatactaagaaaactgttgtagaccaaccaccataaaccattttttacatacaaataaaattgatctgtaacaatttattatctatttgaaaataaaacatatttatattatcgatggatttatctattctgatcgccgtaaccattcgaaccaaaaaatccatagtatttagaaaattttagcaagagaagaaaaaaattcctttattcggccaagaatggtgaatataggacgtgagatatattactccttatatatccaaacattaaatttacaacaataataaaacagaaaagaaggaaagaaaaaatcccaaatagtaattgcggcaacagcttagctggcttatggcgggattaccgggaaagtcaaaccaaacaattaaacgacgtcactttaccccacactaggtttatttaattaaatttaatctaatttcaaaattattaattaatcaaattcgtaattaataataaatcaatttcgaagtttcttgcaaagacgagagagaggagtgtcacagtctacagttgttatctcaacaatctcgatcttcttcttcttcttctctctttctctctctaaagatttttttcactcaacaaatcactttttgttttgtctgattttaaggattagtgaaaaatttctactttttcttctcataaattaggatttagagagagagagaaagagaaagagaggtgctttaatgtctgtgaaggtaggagctgtaattggatccagtaacagagcaaacccagttcgatatctgtctctttcttcctctctaaagatcgaaagacgtgatttttattagggttgttgaattgggtattttgcttaaatcctgaaaaaaatagtctctgtctctctctgggtttgggtgatgagtgttgatgggtcattggattgagtttgataagcaatggttgatcaaagaagaagcgctttgggttttgacttgatgttgttgtgtttggtactgttcttcgact

SEQ ID NO: 54375 - DNA, 118 bp, Arabidopsis thaliana landsberg
  unsure (1)..(118): unsure at all n locations
gggggggggggcgggggggngnncaaaaaaaaaaaaaaaaaaaaaaacacccnccccccccccgcccgccccccccccccccccnccccccccccccccccccccccccccccgcggg

SEQ ID NO: 54376 - DNA, 485 bp, Arabidopsis thaliana landsberg
ttctaaacaatgttatcggttgagttaatgtttccgaaattacattaccgccactattatatttttctaattttggtatacaatatagatgattaatcattttatgcaaggtttagtgatcaatcattttgttaaaaaacattatctaaaaattataattgtcaaatcatgttttgttatgcaatgtgatcatgaatttcgtggattttcaagttttaattttcttgcttggatatatattatagatatagagaactctcaaaataattatgactcttaaactcatcttatgacactgcgattaagatttaagacacagtcagcatgcttttgaacttattatggaacccctactacatagcacatgatttttcttgtctgattttgaaacttgtctcaagttttatagatacaaacacatagaatgaaatagtctaagacgccaagattaattattatatgttggtctgatggggagtgagaga

SEQ ID NO: 54377 - DNA, 762 bp, Arabidopsis thaliana landsberg
atcttcccaaaacagaagcaagcaaggggaaaacagaccagatgagagaggaagacgaagagagaaacagaacagagtagggatcgatagaccgaggaatctcagaatcacaaacactttgcaaaagggttttcaattcctatttatttacaaagaaatcatcaatagtagtggtctctagggttttgcttgctcttcttcgtgacccctttttacctgcaaacaacaacttcaaaattggcgtgtttcgtacggtctatctaaccctaatctgtcacaaaacactcttcttctctcacccctttttctgggtttattcaattctcgtgcttttggttctgttttcttctctggggatttggttttcttgagtgagtttttctcctctttcttatgttcttgatttgattattatatagaattatggtaatggaggatgagcctagagaagccacaataaagccttcttattggctagatgcttgcgaggacatctcttgtgatcttatcgatgatctcgtgtctgaatttgatccttcctctgttgctgtcaatgaatccactgatgaaaacggcgtcatcaatgattttttcggtgggattgatcacattttagatagtatcaagaacggtggaggcttaccaaacaatggcgtttctgataccaattctcaaatcaacgaggttactgtaactcctcaggttattgctaaggagacagtgaaggagaatgggttgcaaaagaatggcggtaagagagac

SEQ ID NO: 54378 - DNA, 885 bp, Arabidopsis thaliana landsberg
cggtataatacatgtgaattcctagaattaaagaatattttcccatctcctgccagttataagttaattacaatatgatgaaagaagaagataagagagatccaaagagataagaataacattaaagttactctctcggtgtgggtatgacgacgaattgacttaaaattttcgttagtcatcgtttgtcaatttcgtttcaatcatttttgacacaaaaagtatggaacttcaagtccttgttcttcgtccaatcttcttcttcttcttcttcgtcttcttgacaattctacaacaatcctcttctgctcgggttcttacaatcaccaagcctgatagacatgactacgccgcaagtgctcgttggcttgtctctcagaattcttggggtgttcttaggtatctaattctcgtctctttctgcttatcttgcttctcaagtttagatgatagcttttgctccactctcaattattaggagctttattagggctattgaatccaatcagtgataaaagattgaatcttttgaaattgaaattggtaaaggttatatttttacagaaagtttgtagcttttttagcagattgaatcctattgttgataaactttgttgggttcttgagacttgctatggatttgcttcatcaagctttaatactattgaaattgatattgactttcaagtactgttgggttcctgagatttggtagttcgtcaagtttgattcttttgaaattgaaatgtttttaggatttcagatttgacactaggagtaacaaatggttcctctatactctgtagttaccactggtcactctatacactatagttacctgagatctttattagtgaaagagattgttgcattgttgttatcagc

SEQ ID NO: 54379 - DNA, 324 bp, Arabidopsis thaliana landsberg
  unsure (1)..(324): unsure at all n locations
atnnnnnnnnnnnnnnnnnnnnnnnnnnnnnnnnnnnnnnnnnnnnnnnnnnnnnnnnnnnnnnnnnnnnnnnnnnnnnnnnnnnnnnnnnnnnnnnnnnnnnnnnnnnnnnnnnnnnnnnnnnnnnnnnnnnnnnnnnnnnnnnnnnnnnnnnnnnnnnnnnnnnnnnnnnnnnnnnnnnnnnnnnnnnnnnnnnnnnnnnnnnnnnnnnnnnnnnnnacagtatagtgaccagcgtagttatttgaagttagacgtataacgattatatcttgcgactatctaattttacatatagcatgtattaacggtagaattcgcata

SEQ ID NO: 54380 - DNA, 1135 bp, Arabidopsis thaliana landsberg
tttttccttagatttacgtatgaaattggtgtgtgtctgtttcttctttacccaaatttggatgatgtcattatcttaaaattggtgtgtgacgcatgaattttatttactcactggatttggttcttatgcatatacatgtattaaaagcttctttaccatgatgaaagaaaagcttggtacttttttttgggtatcaaaaaagcacgtcagtactattgtcactctcatttttggtgatgagatgtatcaactatgtgtaggtcgagctctctgcttagctcttgcagagaaaggagtttttgtaaccgtctctgatttttcggagtgagaaaggacaagagactacttcgcttgttcgaaaagcgaatgccaagtctcatcacgggataaactttccttctgctatctttgtgaaatgtgatgtgactaatagaggttagttagtgtattggtttagctttaatgatgaaacagaaaactctgtcttagtgttgttattcattctctggtttattggaaacaggagatctcctcgctgctttcgataagcatttagccacatttggaacacttgacatctgtatcaacaatgctgggattagcactcctttaagatttgataaagatgacactgatggatctaaatcatggaaacacaccattaatgtcgatctgattgcagtagttgaaggcacacaacttgcggtaagtctcgtattccttggcttgtaaagctctgatttttgttatctcggttttatctgattatttatgattttcaacttttgtgtagatcaaagctatgaaagcaaaacaaaagcctggagttatcattaacatgggatcagctgcgggtctttatccaatgcccattgatcctatctatgctgcctctaaaggttttatgttacttgtgtcttattgtttctttcatttgttcattgaattatataaagatgtttaattctttttgcttatcccatatgttacatttctgcagccggtgtcgtattattcactagatcattagcatattacaggcgccaggggattcgcatcaatgtgctttgccctgaagtaagacaaatatctgaatattcaaaatgtttattaatgctctattgggggtttg

SEQ ID NO: 54381 - DNA, 377 bp, Arabidopsis thaliana landsberg
agtcggttttctctcctaatcgagcttcaactcggcctcagcgttccacaaattaccaaaaacttttattttatgtgatacagagtccaaaaaaggcgctaatattcccctagttaaacacgcccgctctatcatccattgtccctaagagacaccacgatgtccttggaagaggaataagctttttatccattctagccctatatatgtcgaattattcgtcttaatcttcagctccctcctccaattctgtgtgggtggcggcgacaccagagcccttttcaccaacggcaattatctcggcatcggcatccacatgggatttgggagctcagtgagtgcccggtacaaatagtggggaggatagaaacacctca

SEQ ID NO: 54382 - DNA, 140 bp, Arabidopsis thaliana landsberg
  unsure (1)..(140): unsure at all n locations
aactttatcccaancaaattttatttttatctacgaaaaagaattacctttggggttnggaataaattaaaaacttcttncatnaccttctacttttntatcatttcntactcnttctttncttcaaacttaacctaaaa

SEQ ID NO: 54383 - DNA, 572 bp, Arabidopsis thaliana landsberg
gtcaatttccatgaagctggacttgaatagttaggctgtctattcttcgtttttatgtcttttacgtgaacaactcgtaatttttatatgtttttctgaacatatgtttgttgtcgcacacgaaatacatttgttcttagactaaattatttttttaatcattttattaagtactggtaattactaattaacggatagtgtaaatgaggttaaaaactggagattaaacgatcccggaatgctgacgtcagcatcataaatctcagatctcgatacgaaacgaatttctcactgcagcagctattactttccctttttcaccttttttttttcctttctttttctttcttttttccatttcttaattttttcttcccattgaagattactctacgatctgacgaacaaggcaaccaaaaaaagggcaaagaacagagagagagagcaaaaagcagaataagatgaatttagacgagaattgtaaaatagtttatcacgattcgccatgaaagctcttcaatccagattcttcttcttcttctacatcttcttctcagtttccgttagtagtg

SEQ ID NO: 54384 - DNA, 598 bp, Arabidopsis thaliana landsberg
  unsure (1)..(598): unsure at all n locations
agaacacaatcaatcaacgtgtataaaaaccatgntttcaaatttttttcagccgccggcgnnngacagacaaccaaaaaggggggggggatattttcaaaaacgcggctcgcaccccccccctacacattttcctttttcctgtccgctacacaatcaacgaacatgttgtttgagcaaagtcaccttatcaaaactgcaattggaaaacaaagcaaacatgttaccgttgcattaaaaaaaaaatgttctattgaaataaattaagtgctgcacaaaaaaaaaagtttcatttgcaactcagcccagcccaggcccaataagaaagccaactacaggcccacctatcatcaaacagttttaccttgtcattcaaacaaccacagacctcaacgaagacaatgacaacttcttctttttttgacagcgacgacttcttcctcttcttcgtcatttttttcgattaaaaattgaaggataatatgtgcaaaaatgcttttgatttatcttctgattatgactctcgcaggacccgcttaatagaaccngtagtcccgtacaaaattttacaattggccctgtttagtactaatttttt

SEQ ID NO: 54385 - DNA, 533 bp, Arabidopsis thaliana landsberg
gaatggtaagccacaagaaaacgttttagagctaacggtgaacgtaacccttgtgtttccagctgagtttacgttccaaatctggttcccattccagagtaagctaatgaggatacatagacccaaaaaaaaaaaaaatctaatcacaaatcatgtgtatttgtagcattatgtatcatagtttattgatcactggattgatcaggttttgcttttaatgttgaatcaaattaattcttttttttgttagcactaagatttgatctgtaagttaaacccaattatgtatgcatgaagatgagccctcatacgtacacacacatatgaacaagctctattctgagatttagattctacacctaactagaaagaatcatcaactactttgtaatgtaatgagcctctctatacagaaatctaattaatagtagaaacattgatataaatagaagtgcaccatatcataagtgtgttatacaaaatatgtaacacacgaatatagaaggaccaaaacaaagcttagaactgacatg

SEQ ID NO: 54386 - DNA, 1441 bp, Arabidopsis thaliana landsberg
tttagtactgtctggaaaccggttcacagggagaatacctgaggtctacgggttaaccggattgttgatattggatgtgagcaggaatttcttatctggggcgttgcctttaagcgttggaggattgtattctctgctgaaacttgatcttagtaacaattacttggaaggaaagttacctagagagctagagtccttgaagaatctcactctattggacttgagaaacaacagattatcaggtgggttgagtaaagagatccaagagatgacttctttggtagaactggttctgtccaataatcgcctagccggggacttgacaggaataaagtggagaaatctgaagaatttagtggttcttgatctctccaacacaggcttaaaaggggagattcctggttcaatcttggagctccagaatcttaggtttttgggtttgagcaacaacaatctcggaggcaaacttattcctcaaatggaaaccgaaatgcctagtctcagcgcgctttacgtgaatggaaataacatcaacggagagttggaattctctaggtacttttatgagagaatgggaaggagacttggtgtttgggggaaccctaatctgtgttacaacggagatgagaccaagaaccttagcgatcatgttcctttcggagtgaaccaatgtaagagaattaaggcagataaatattagaaccctcgttctgaatcaaagggtttgtgataacaaaaacttggaatgatacaaagctgtggtcttttcaattttgttattgcatcttatttctatagcattattttgttttaaattatttagcgtatttacaaaatatagttttgatatctcgaagttcattagaaaaacttccaagtattttttttttagatcatacaatcataaaattaaataacagacttacctagtttaaatttactgtgtatcaatgattcaatgtatgatacggtcggttcttacctagttaaaatttgtttttttttagtatatgtaaagatctacctgtttccatcaaattagaagaattgtatgattttatgcgacatgtctaatcgtaggaggtatgttggaactttatttcattttggcatttcataaaggaaatataaaaaattctatttaggtaaaaataataatccgtgactaagcccgatatagatgcagaaatcaggtggatatccaaatcatatttggcttaatttaaagaaaaatgtgattcatggaaagccacttgtcaagttgtaaaattgtgtataactgtgtcaacccttcaagctactttttgctctctctttaatttcttaaaataccttctcacgcaaaagaatgagttggtatacattgtttttacgtggtttatgcatgccattttcagtatatttcatgtggttattccgttaactaaaatattatttattt

SEQ ID NO: 54387 - DNA, 140 bp, Arabidopsis thaliana landsberg
aaagccaatcagaaatttgctcttataagaaattaaaatcccgtctgcgcaattagaatggggaagaatttagagataccaactcgagtggcgaacccaggggcactaaacaaggcaccactgatcgaggccactcccaa

SEQ ID NO: 54388 - DNA, 510 bp, Arabidopsis thaliana landsberg
acggcccggcctcgccgcgatcgtcgcggccgacgccacgcaaaccgcccttgatggcgttttcctgaacgacgttccagacggtccggaggtcgtctttgcggtcgtcgtggcggcggggaacgagcaactgttccgctttgatcggggttttggtctcgccctcgttgtccccgaaccggagaacatgcgccgcatcggcaaggatttccctctcctcatgcttcagccgcaggccggaccagtcctgcggggccgcaagggtgcgttcggcttcgccaagaacgcgataggtgccttcgatgaccttgtgctgcacatcaccggaatgccggaccttgatggcgtcgatggtgccggtctgtgtcactaaggaattgaggcagcggacgcggaaaagcccggccatcagctcgtaggcgctggttccgtcattggcgttcttgaggagaatttcgcagacggtgtcaccaacatgatagaccttgccgtcatcgatccggcgcatgc

SEQ ID NO: 54389 - DNA, 618 bp, Arabidopsis thaliana landsberg
  unsure (1)..(618): unsure at all n locations
tcctttcttccccgtgacctgccatcatcgcgtcgccgtgggtgggtgtgatttggggcggatgtgccattgccgccgacctcgccaccggctaaacacgcgaccaccgtcatagagctgtccagatcgttcttggcacttcgcctctgcacactgccggtatccgcggtctcgccgtgggggaatcgtcatctgcgccgcctagattgcaagccggaacattggtggcggccgcagccgaactctccgtggccagggcgcgactcgacataaacttaggtataaaagcttcccccatgctcgcgttgtccttctgcacccgttgcatgcttcggcagggagagtgggggttgttatcgggttggattgctcaccggcgtggtctccgccgtgagcggaggggagcaccgccgtgggtggccatcggtggagcagatgcgcctgtggctgttgatctactgacggnnnnnnnnnnnnnnnnnttggaaataccccttcgcgagacacatctcgaccgtaggattgtaatcgggcgactggatggaatcgggatttgagggggattgtagacatcggatttgaatccgatgaacctaattgtgtaccggttcggtgaat

SEQ ID NO: 54390 - DNA, 726 bp, Arabidopsis thaliana landsberg
tatccatccattggaaggttaagaactggaatggcctaatgttggttttctttaaatctggaaaagccttgagtatttattcaagactagtttatctcgtttaattcgtcgttaagaacttaatatcaacactcacatcttattttggatatgtttattataaggactggccaagatccttttctcattgtgctgaaattataatattctttgctgtccaaataggtgattaccctggctatactccttgtacatactttcttcccgatatcctatgaaggttcccgaatcttttggactagtcgcctgaatctagtgaaggtatttccttactagccacttcacagttttgtgtttcttctttttgttgaaaatcgatcagaaagtaagaaattcctttttcttcgtgcaacaatttgtcttcatattgattccaggttgcttgcgtggtaattttgtttgttgatgtgctggttgactttctgtatctgtctccactggctttcgactttctcccttttagaatcgccccatacgtgagagttatcatattcatcctcagcataaggtatccgtagatttctgcttcttttctatcaactatatgggttatatgtctttatttctatagacaaagatgcgcagatcatgtcatgtatgataaatgtagacgtgtgaatatttacctactattcctctattaatctctaatacagcacattcccc

SEQ ID NO: 54391 - DNA, 429 bp, Arabidopsis thaliana landsberg
gctctaaacaaattagttttgccaaaaattcatcaaaagcaatggcgaccatccgttttaaagcactggaagacctttaccacagggctccaaaattcggaaacccaccttctgacaaggtgagtgattattatggcgagagcgtttttagcgaattcgctatgcgtcagcaccttacccccgaagtgtattcccgtatcaaggagtgtatcaacgaaggggtaaaactcgaccgcgatacggccgaactgatcgcccaggggatgaaggaatgggccatggccaaaggctgtacgcattatacgcactggtttcagccacttaccgatgctactgccgaaaagcacgatgctttttttgaacccatcgaaggcggacgttccatcgaaaaattctcgggcagcatgcttgtgcaacaggaacctgatg

SEQ ID NO: 54392 - DNA, 875 bp, Arabidopsis thaliana landsberg
  unsure (1)..(875): unsure at all n locations
ttacaacactaaactaatctaccaaaagtccaatctaaaatttcgtaaaggcaggagttttataagtcatcaagaacaagtatgaacataccagtcatttccaagtcaatccaaacaagtggttgcttgtaatctccatcctcaagtgacccatttacactttcttcttgtttccctataaagttcacaagaatcattctcaaaccaacaaatcttgtagccacaagagacagtgccatgagtaaaaaacctaaagtttaaaggtcaatactttaattgactcttgacctctaaatcactgattaatttagtcaatatattatcaaattcagtctcaaaaatctaaacatggttttgtgttgtaatcaaatgggaagagggaaacaggggataccagtggaagaagaagaagccattggagcatcttcatcggcgaaagccaggacagagaaagcgttggagagtttgttcatttttttctttcagtaagactaatcggaggaaggtaacctagaagagaaaaaatcggtctctttgacccagaaacaaagccaaacaaataaaaaataaaacccggcgaaataaacttaattaacatgttttacttaaaaaatataattataactattttagtcagtaaaaagaacatataccatattggtcaaaaaataattagatagatttaattttgtatagaaattgactaatgtcgcaattcgcanagtaatctcataattgtgaccacatttncgactaacacttgagattacaactgatttgctaccttacaatcccataactgtgaccacatttgcgactaacacttgagattacaactgatttgatatcgtatattagaaaactttttatatatc

SEQ ID NO: 54393 - DNA, 360 bp, Arabidopsis thaliana landsberg
acgagaacagatacacaattggtaaacaaatatgtgacaattattgcagaaacaaagaagattgaatgaaacagacgaaagttaagtaaccatgacttatagtagatttaatcaatttcgtaagcaaaagtattataaaaatcactttcctaggatgcagaggacgagagtcctaccaattcatcgtcgctctcactaacggcgcagatcgccaaaatacctatccaaaaaaaaaaagtatcagatcttgacgaattccaaagatgcaaggatgaactcccagccatatgtagagctttgtgtgatccgagaatcaccacgaactcgtccttgcatgggcgtcaatgtgcttcacgagga

SEQ ID NO: 54394 - DNA, 842 bp, Arabidopsis thaliana landsberg
gtaaaagtttaattctctttcaacattttgttcatgtgttcttaacttgttcggctcgttatgcacattttcccacattaagtattatataaaactagccgaacaaacaaccaaaataacttgaatcaaccacaaagttgacaatgtggtcctccattagtctttcaagctatgagagcttttgggttcaattgtattttaacagagaaataaaaatcaaaagaataacttaaccgatcctgaagtttctatctcatatgactaataaagtaccaatcctggctttgtaagctctatagttctcaccagtacgaaccctaaaaatttcttctagatatggaaaactccaggatccaacaaattctatatatccttcagacaccagaaattgcagtgtctaaagcaatttttttgcagcattattgttaagttagaagcgcccttgttgattttcaagagccatgaaaaatgtttgtgacttcaccaccatccctttagaatcattgagcatcgatcatctcggtgtctgaatgttctttctccaggggtttggactcgctgtctaaatgttctttctccagcggtttgttggactcggtgtctgaatgttctttctccagaggtttggactcggtgtctgaacgttcgttctcctgaggtatgaactctgtagcagcagatggagatggaggagtaatgtccatacaagaagaatcaacagccagattttcaaccgttggatcttctttcccatttgctgcttcttcttgatgatctggtccagaatcatgttccatgtcaatagaacggtttgattcagaatctactgtttcaacctttgc

SEQ ID NO: 54395 - DNA, 302 bp, Arabidopsis thaliana landsberg
  unsure (1)..(302): unsure at all n locations
ccccccccnccccncccccccngcgcccccccccccccccccccccccccggcccaccnnnatgcccccgtccccccccagnccccngcccccttatatatagggggggcccccccccccgcccccccccccccccccnggggggggggggnnnattatttcttcccccggggggggcgcccccccccccccccaccccccncnnnnccnnnnncnnnccccccctcttttttttttttttttttcctcccctcccccccccccccccccccccccccnccccccccccccccccccccccc

SEQ ID NO: 54396 - DNA, 430 bp, Arabidopsis thaliana landsberg
caattgagagagtatatgtaagtctgactactggggttccttctccaccacaagggcgtattgtgataccgattggtcgtgagtcgagtaatcggatacgtaaggctgctattccttgcggattaagtagtcgaagagcccactatgctgctagcagctgatgagaccaatcctcagccattgcaccaagcactagaacactagcccggaatcggcacaatgacggtaatctctccgttagagttgttaactgacactgatatatgctacaagaatactcatctatgctgtcatagagtataaggtaatcgagacattcgctagcggaggctctgcactagttgagtgagagactggaaaccggccgtactcatcaggtactgccacattgttcagtgtgaaaatctggcccgatgtacgaatactccct

SEQ ID NO: 54397 - DNA, 974 bp, Arabidopsis thaliana landsberg
agaattcgataagatgatgttcttgtgaaggctgcgaaactatgaggggcgatgtgaaattttgtatgaatcaactaattgacgtttcttgacaaaaattgcaaataacgataagatgatgatcttggtccttggatggtaaattttgtgctggtgaggagagttgtgagttgtcatatcttacttacttttgtgaaattcgttgagagatgtttagggttctggtgttgttatagttctacttctggtttgtgaaagaactccgaattgtgaaatttattgtagcatttcagtttggcaaaaatgacaagtataattgatcttagggagcctaagatttagaggtttaagcattttcacttctatatgtttgtgtttgattcaatttatttgagatacttacagtgttttctcttttgtatttgagcaggcttgttatggggttctacagagttgggtgtctaagaagtttatgactggattgtaaataactcgtagcaccctttttattttcatactcatgatttgaaatctttgtatcattggggtctaattgggtgttgtgtggtagtgtcgtactctttcctgtagctgttacattcctcatcacttggtggtttatccagttcgttgatggtttcttcagtccgatatacgagaaccttggtgttgacatatttggtatgaattgaaattcttctgacttgtatcgtaatgttatgtactaagtaaaacttgatgtagaaacttcgtctatgaagtctaagatatcttaatagattaggattctagggtttgttcttactgctagagttagtggaatgttgtacaagtttgttggacttctaaagttttactagatttccttgcttaattcttgagtccaactcttacttgtgacaatgtatctggtaaaatgaaacatttagtttcatctctatctgaaagttttctagatttcaaagagatataaa

SEQ ID NO: 54398 - DNA, 436 bp, Arabidopsis thaliana landsberg
caaccctctctccatctctctctctctctctggaaaaaaaaaccttattaattccgacgaggagaacgacgacgacgaaggcttctttcttatacggtgtcctcttaaaaatcaaaccggtccggtacggtagtggaatgaacaatttagtaaaccgatagcagtgtttacattggaaaccgaattgaatgaagtgaagctgtttctttctagatcccccaaagcgagttcatcatcttcttcgcctggattcgatcaagactagcactttcatcagatttgattacaatctctcttatcttccaagttataatcataatatccgagtaatttgggatctgggtctttcctctacattcaatttcttaataaagctggcctctttcttccgagatggttcttgagcgatgatgagtgactctcagcgtttactttt

SEQ ID NO: 54399 - DNA, 828 bp, Arabidopsis thaliana landsberg
ccggtttttgtcgcggtgacgctttttgtgttgctgactccgggactgctgattcaagttcctgggataggtcgagtggttgagtttggaacgtttcagacaagtggtctctcggttattgttcatactcttatttacttcactcttgtttgtattctcttgcttgctctccaaattcacatgtacatcggctaatatgaaacaaatattaaatctctcctcttatttttcttttgtattaatgtaaattagatttttaagtcagtttttatttcacttgaattgtgtgtaattcactgttttgtttggtttaagaaacaaagaggttttcttacgtagacatatcgtaaacaacagtattgtctgtttagtcctcttgatggtattgaattagttagttgcaaacttgaaattattaacactaagaagttcacatgaaaagtgtaacgcattggaagaataagaatatgtaaaatttgattgacttgagggccctattataaacttaagtaagaagtaacttagaaattagaaagctaatttgatttattaattttgtggagtaccaccagcgaacagagctaatttattctgctagaagggtacgatattaattttaaaaatgataattttgtaagcaaatgtatgttgtcaaaagttgtaagaagaaagaacacaaaactttccttgaatctgtcctttacgtaaaaagatgatcatacttaattaacataactttctttctttctttttgggtcaaagtgacttgattacgatttagttatgactgtgtacaagataattttcaatttggatttaagttctata

SEQ ID NO: 54400 - DNA, 677 bp, Arabidopsis thaliana landsberg
gattaaaacgtccatgttatacatattttagctttttttttttttttgttgttgttgttaaagtttacatgttttggttcggatgggggaattaacggttaaagcaagggtttcatgaaaattgctgaaactgtagaatagagagaaatgaaactgtctgaagtggaaacacaactttttgtttggctggttttcagaacatttttctctgcaatgatgtttttccattgtgaaacaatcatatcaaacaattcatgcttcatgtcacaataatactttcacaatacactattccagtacttgctcacatcattcacatccctaaatcgtttgaactcgagtttcattgtcattagatgctatataagtatatagtttggtgatatagttagaaggtagttaaatcgtaagatggcaactgaatatggatgattgtatggttgaagataacaacaacaaaaggaaatgtgaccacacagcttgtgagtaccattggtttaagaaacaagcctcgtgcccttccaatcttttcctttttcttctttataccattgtctttcctttttctatcttatattagtattatcaatttatattgaatttgcaaaagtaaagcccacgaaacctttccaactttaatctattgagcaattcgactataacccatcatcaccctt

SEQ ID NO: 54401 - DNA, 534 bp, Arabidopsis thaliana landsberg
caccatgagtcgccctccttggtagtgctcctctcggaaggagctagttaaggacaacctgtgtttttgtaacggttaaggacgaccatcttcggtacttcttcgattttatgaacatctgtgttggtaggcgtcaaaccaaacataggttggggttagggcggacgaacaggggaaaagttggtcatggccccctcaatttttaagttcttgggtgggccaaaacagtcttgtctaggtcttattgtcggatcggttaagttcttctgactcccgtcctctgtctcgatttagtcctcacatctacctatatggctctattctttttgacgtcgtctgggctttcgccataataccccattcccgacgtcgcctcttcctgatgcgcgacgtcatctaaccccgtctccttcctagcgtccggccccgctcatcatcatcacaacgccagctcgcctcgatcagcaaaaacttaacaataccagtggatgtcgcgcgccttacgggtgcggtatcaagttcaattgcagattt

SEQ ID NO: 54402 - DNA, 163 bp, Arabidopsis thaliana landsberg
ctgctctcactgcgcggcttggtgcgtgtgaaggcgcagcttgtggctcgttaccggatcaaggcggtggcgttcctcgatcagggcgatttcgcgctttagcctctcctacggtatggattgtgagattggggtaggtcgtgatcgcgttcgtttggccgga

SEQ ID NO: 54403 - DNA, 179 bp, Arabidopsis thaliana landsberg
  unsure (1)..(179): unsure at all n locations
cccccccctccccccccccccccccccccccccccataccccccgcgccccccgcccccaaatntttttttttcctcccccccnccnccccccccccccccccccccccccccccccccccccccccccccccccccccgccccccacccccccccccccccccaccccgccccccccc

SEQ ID NO: 54404 - DNA, 944 bp, Arabidopsis thaliana landsberg
tgaaatatacaaataattaattggaatctaaagactccttatcatctaccaagctctcctttctttgtttccacaacagacattaacagtctgagacatgagaaataacgagaggccatttatatcatttggaaagcgtggctcttgaaaggatccaagtaccttgtaaatggaagcattaaatagtttgcaagaggcatgctcatcgagatgaggcacaggaagagacagctcgtgtatgttctgatcatggtaatgcaagagcagcagagcaaacacatgaaacaagagaaatgaagacttaaattaaaattatactaagagaatattgctcatagctagaaaagaaataagaaacttacaaaccgtaaactttactcctaacaatattaattacttgttataaacgaacaattaaggatctcagaaaataatttccatgtagaaatagtgttgaaattcattaagcatcctgcaattctatatgcaagcggaatggaaagatgatgaagcatcatcaaccataatacatgaatggataattacggcttactaattacttacagtcaaaagagcgacttacaatctttcctatctgaaatattccaaatatactgaagcatatgttcccatcacgatcaccagtgcaaagaatgttaaacttccggaatgaggtattggatagctctgccaaagagtcttcaccgtcatccatgaaactggagtcaccagctaccagtccaggcatctttggaggtcttggagcaggaggaaaaaaacgggaggtccggtcctcataaactgagaaattaccactttcatcctgtaaaccaaactctaagaaaaagtaagcacaagctcaaataactataagagttgggtgtgaaaaaaaaaactaagagaatagatgcttcaactgggattggtaaaagaaacattctcag

SEQ ID NO: 54405 - DNA, 661 bp, Arabidopsis thaliana landsberg
  unsure (1)..(661): unsure at all n locations
tcgggttactaaatactannnnnnnnnnnnnnnnnnnnnnnnnnnnnnnnnnnnnnnnnnnnnnnnnnnnnnnnnnnnnnnnnnnnnnnnnnnnnnnnnnnnnnnnnnnnnnnnnnnnnnnnnnnnnnnnnnnnnnnnnnnnnnnnnnnnnnnnnnnnnnnnnnnnnnnnnnnnnnnnnnnnnnnnnnnnnnnnnnnnnnnnnnnnnnnnnnnnnnnnnnnnnnnnnnnnnnnnnnnnnnnnnnnnnnnnnnnnnnnnnnnnnnnnnnnnnnnnnnnnnnnnnnnnnnnnnnnnnnnnnnnnnnnnnnnnnnnnnnnnnnnnnnnnnnnnnnnnnnnnnnnnnnnnnnnnnnnnnnnnnnnnnnnnnnnnnnnnacagagatatattgaaagtggacttgcatctgagatgagttagtnnnnnnnnnnnnnnnnnnnnnnnnnnnnnnnnnnnnnnnnnnnnnnnnnnnnnnnnnnnnnnnnnnnnnnnnnnnnnnnnnnnnnnnnnnnnnnnnnnnnnnnnnnnnnnnnnnnnnnnnnnnnnnnnnnnnnnnnnnnnnnnnnnnnnnnnnnnnnnnnnnnnnnnnnnnnnnnnnnnnnnnnnnntgtgcagccccccttatatcatctttctataaaagcatgatgggccgctagatgga

SEQ ID NO: 54406 - DNA, 1107 bp, Arabidopsis thaliana landsberg
tcatgatgatatcatacttggaagccaagtgtccgaattttttgagatgtagaagacgtttacttctataaatattgggttaacaaattaatctgaaactttaatcatatgatatggaaaagtccttgtcgtgtttttgtagtggtgcctggtcgtgagtggtgagtctggtgacatcccacctcccagatttgtttaaacatatgtataatgaaaaaacaattatataacattgttgttttgtgactagggtttatctgtgacaccatcttgggtaaaagtctactttcaaggtagggtttgtgtcgtgtattacacatatacatgcgcgtttacttgggagtgaagtaaattatttatatggaaaatggtacgtactagatctaaatattaacatattcaactacggattcagccgaattctcaaatgaacaataatataataattatagcataattttgaaaaattataattatgaaatatcaaactttgacaattttggtcgtctgttgagagctatatatgaccagtgagcctctctatttggtgaagaagggtccatgagtgtcgagggcgaaaaaatctgttgacgttagggatatatagataattgcaaaaggacaaaaatgtgggggtccgatcagaatatacaaaaaatgatagagaagctgtgatgtagttctgtgatctgtccttgtttagcttcttctctccttgaagaaaatgaggttgaaacaaaagtatacgtacgtaacgtgaactctacaactctcaaaggacatgatatcgatgcactattaatacatgagagaactagttaatttaggaagaaaagatatacacatgacacatgcaagtaggtacatatatgatcttcttcaatttgtctcgttaaggattaatggaggaaatgagagctcgaaagaagtgttctatcacaagggatggttaggccattgttttgaaagaacccaaactcttcctcgagactgttgcagcaactatctgtatcactgactataatagatatatatatgtatacacataagtagatgcaataaatgagaccacaagatctatgtttatgaaatacctggaagatgggg

SEQ ID NO: 54407 - DNA, 1052 bp, Arabidopsis thaliana landsberg
aatgcataaatttatcatggtcattaagcatacaaagaagaaatttattacactttggtacctttgtcctatatattgattttgggaaacatatgtaggctgtcatatggttccttgcaagatggtctttcacatatctattgctcgttgaagagtgcaatttgggtagcaacaagcttcagtctctaccttcaagagcatgtttatttacgtatttcaacgaacacaatcaggggaagtttgtccttgatataattgtccggatctccttgacatcgctcacatcttaccctggtgaaaaggacttgcaggtagtaatcttttgtccttctaaaaacgttatgagttttgataacccttgagtttatacaatggtattttactgtgtacaaatactatttttggtctgttggatggaaatatcattcagttagttgtttgactttacaaattttgataactaaaggactttaggccatggaatccatttagctacagcgagatttcttttagggtttaatgtgaattttcttagaagcggtaggttacttaactcccatttcttcaagaatggtattcccctaatctttttatctttttcgctctctgcaggagttaacatgttttcagttactgcatgcacttgttcgacgaagaaatatttgttttcaccttctatcactggtgagttcagaaactcaccatagttgggtgtaaatggggccgatttctgtatcttgctttgtttccaatacaaatgaaatttttaacttcgtcttctactcctctattaatttttaccacttgtttttttggaatccacaatcatctctctgtgggtaaaatggctgcttcgacgaagaaaagctgttttactgggaatcactcggcttatattttttttatccactgggaaaaaaaatcgttttctttagaattcttgtagatgcacatattctgtttctttagtactctaacgttctatccaaaacattcaggactcctggcgtaacctggcaaatgcttttgcaaatgacaaaacattgttttta

SEQ ID NO: 54408 - DNA, 982 bp, Arabidopsis thaliana landsberg
ttcttctcacttaaaaaccaaggctacaagattagggcttttttaacttaacttttttccaagatagggtttggggtttttgttttggcttaatatgaaaatgctacaagagggttttaaactttttgaaacaagtttattaaacgaaccgctgtcgttttagttaattaaacaaaaaacacagtcgttttgaaacaagtaaaacgatcatttgattaggggactgtggtcaccggcggcgagaaccaaggcttcttcgtaaccaaatatctttcgatatcaaaagacaatctctccaaaatacaaattgactaatataataagtcgagagattctggtgcagaggacaaaaaatttcaattttgatttcattgaatgggtaaatggagagcagtagctgctcttcttcttcgtaatcaattactcaattcttcaaaaagactaaacctttcttcttctccatgtgtttcgaaacacccaacgattggtttagcttctcgctttctcaatttccgacacttttcagcgttcccttctccgatttcgatttacaacaatgactctgattctgggtcgaatgatgcatatcaaaactatgaatttggaacagaggcagaggaagcactaggcaaaatccctatcaaagcctattttctcagtactaggtatgtacatctttggtattgggactcactagtgaaagttttgaatttggaatctttacagtttgaaagttgaagtctgttatgtgtttttcatttataatttggtttctcagaactatggttttggcagtattgatttgaaggcaatgcaagctgagaacttatgcaatgttgttcctcctacttcacgttctactaattatattgccctcaaattttcggattttaccccttctggaatctatgtaagttatattcagaaacagtttagctatgtttacttatctgttgattattgagtaaagcaaaggcatctg

SEQ ID NO: 54409 - DNA, 168 bp, Arabidopsis thaliana landsberg
  unsure (1)..(168): unsure at all n locations
aacaganntataaggcaaagacacgaaaaaagaaaaaagaaaaaaagtcgtaactgagccaaggaaggtttcagttaaaaccagactgaaatggtcgaagcaaacgtgccgaaccgtcaacatgacgacaaaaaagaacggagccaagggagacaggatgaaacgggg

SEQ ID NO: 54410 - DNA, 1269 bp, Arabidopsis thaliana landsberg
tccgaatgaaaatggttgtccaggtgatggtggtcttttatgtcccattcttattaggttttaaaccgaatttttattgatggaccgtcctctattttaatgatagatataactcatttcctgattagtcgaattactccatgtgatatacatatggctcgcacaaatttatgtacatgtacatttatgtgtgtatatatatttagtcttactaaattgagtggagggaatttttgttgtagcttttttgttttctttttaacgtcaatatgcagatgtatttaaaacatgttcatgcagccaaatttgctttatggtaaaatcatatatatactctctctttctttttttgttaaagtatttatcttattttattatcaccgatgtagaagattttttttatttcctttgtttcatataaactatatttttttaattgatatgtgaatttcctcttcttttctatagttcccctcttcattttcatttataagttaacatataatatcatggatgatgtagtacttaattataatgaaatgataaatttgttggagctgaaaaaaaaaaaatttgggaaattatgtcatagactgagtttaatgagattgaaattgaatttgatgtcgtgatgtactactgatcgattttaaatacataaagaggagaaatctgaatatatttttcttggttacaaagtagctccaactctgtagtccacttactgataatttacttcacttttctttttcatttttttaacaactgagaatttacttcacatgttaggaacatgtcaacttcattagcagtatgaagttgaataacatatctaatgaaatgttaatcatgcaatcattagatataaaatccatagttattaaatacttacatcacacaatcgctcaattgtgtttatgtgagaggattcaaatcagtagtcatagtctgaataccttagaaagataaagcagcccccagttaggtgttgatgtcctcttgccaaactaggaagctgatgagtgtactttatctgcccccatctttcttcataagtcgaaccaattattggttcattttttctcatttttttatttttattttcaaatagtttggggcaaaatattaagtggttacacaataaaatgtggtgcattgccgtgtgtttcaaccgtacgatccgaagtggttttttcaccattctcaaaattttgtggtatttgtataggtggtgctgcgttgcaggacggtgatattttctttttatat

SEQ ID NO: 54411 - DNA, 1207 bp, Arabidopsis thaliana landsberg
cctaatcacataatcgtttcgataatccaaagatgattatacacaaaaatttaagatacggaccttatgtgttctaacaatgtggggatgtttcaacattttcagagtccggatctctctttttatctgcacagattcataagaattggatctgtcaaattacaaatttagtaaaagaagagaaaagaaaaaaattagaaatgatgatagagagatgggaacctgtaaggagaagttgagatcggcgataccagacttgtcgatgattttaacggcgaaggaatgaccggagacgggatctttagcgaatttaactttaccgaaattaccctcgccgagcgtcctccctagctcgtatttccccagacgcattcccttctccgccttcttctcctactcttgccttctcaccatccaatcaatctcctatttcaatttatttcccaacaaattaacaacagacaaccaaatcgatttctcgcttgaatcttccgattagattactaataattccgttattgaaagaggggaagtagattattgtagctgtgcaggtatgtgtgtgaaggaaggagatgaatatatatatatatataggtgtaggtaaagagacgaggaagattgggaagaagaagaagaagaagagaagaaagtgccggttgaaattgaagagaggacgctacttctctttgcttcctcttctcttcttattatattcacttctttttatatatatatattcctcgttaactattttgttttgttttgtttttggtttttgttagccagatttttattggataactagaaacatattaatcttcacaaaagaaaaagattaatctaacaaaccatataagatttgatattatcgaaataagatttttttagtagggtacttatcgagatttattattattggtcaaataaaactcctatcaaatgaaattatgtctatgttcattataaggagaaatttaaaaaggatcttatttctgtcaacaatcaaaatatggcaaatatacgcaaagagtatattgatttatcagaataattctatatatgatgtatattgcgaatatgtgtgtattgtatgtgtgtacttgtatgcatgaatacgcccacgccatttggcgcattggatttatgttgaaattaaatattattagatgaaagaatatattcataagaacttttgttttaaagt

SEQ ID NO: 54412 - DNA, 1216 bp, Arabidopsis thaliana landsberg
gaacacatgttgccgctcttcaggagttccggttttcttttaagatttcttccggttgataccaaactggattgagcaagttatcggttcggttactatatttggaaaactggagataaccaacttgtccgagtatagaattacgccggattcaagagctagattagtggggaattccatctccatacctttacatttaagataatattgaaaagtcattattgaatgatatgtgtgaaactatcaatattatgtttgacaataaccaggtgtaccactaacattaaattgttattatcatatatagtatattttgaacatgtgcaaagcatcgatttggacagatctcacgatactatatgataaaactaaacctgttcatagtatcttaagatcctggccacaagtttaagcgttaacaattatataaacatatactcatataaatatcataattgttttgatttctagaaatctatattaatataaaaaccttaacataattggttgcaattggtaaaagtcaataaccaagcctacgttacttatacctgccaattccaaaggccagagtgtgcccaatattgaggaatagtgacgtcgccaatctcaaggttaacatctgcgtttccagcgattccataatgcaaaactcctttcagcctaaagaggctcaccagtaattgtgttgttactcctgcattcacctgtttttatgcattattattatattaataaaccctaaattaaagtacacatatatgagaaaaaactttgtatttgatgataagacataatactctttccacatatagaaaacgtaccattcctaatcccgacatcacgattatcactggttggtttgataattttccaaatcgaaattttcgacctacatgatgtaaagaggggaataaaagcaaatcgctttatataggtttcaaatgaataaatttatataggtttcacatgaatatctttcttgagagagtgggagaaaaaaaaaatgaagcttgagatatcgtgttatcttgaagtattgaggaaagaaattatcagacttaagctatagaacaaccatgattataaatagctttaagaaatgaccgttttgtaatctcctggaccatgtcaataatctatttatacgccacaaaaatctcatatatctcatatacaggaatttgatgattgtgtgatttcatccgatcaaaat

SEQ ID NO: 54413 - DNA, 1144 bp, Arabidopsis thaliana landsberg
gagggacagagtggagacggtggttaaagagctaatggacggagaaaagggaaagaggttaagagaaatggtgatggagtggcggcgcttggcggaagaagcttcggcgccaccgttgggatcatcgtccgttaattttgaaacggtggttaataaagtccttacaggtcacacgattagatcgacttaactgggctttacgtatccaaataggcccattataaacggcccatttgtttccaccatcatttgggctggctttaatcacaattttaaaagatgtactttacaagttgcaataatctatagttttcttctcacttggatcttataaattatgagtacatatccatattgaaactcccaagaaaaaaagtggatataaaggagaaaaaaatatttatgaaaaagcatgaatacaaatcatgtagcaaaaatttgaaattttaataaaataaatgagtaaaaaaaaatatgaataactcaaatttttaatatatattccgtcagaaaaggagcaaaatatgacaggaggtttctcttgagccgtcatttttaagtttgacagtgttgagtctgtcttcttggggctcaagtcattgctctggttgagaaataaatgaattagctgttttctttttttcagagagagagagaggtaaaaatgtgaagattgtacaaattgggaaatgagagagagatcaagaagaaataggttctttggtgttgcttgttgtgatttcaggagaactcgttgttgcttcgccttctgcagctggtacttgttgtggtactgcttcagattctggaggaaacaaaacaaaaaacatataaaatcagacaatatatagagtattcctactaatgttgcaaattattctgatttaagtagatgaataatttatgcaatgatcaatatgttagatttagacacacacaaagtgtccaaaacgaatatgcaaatatagacacataaatatatcgttttgggtagaagttgtcagtgtatggtggcttcactggcatgacgattggcgaccaaattgacagatgatagaagagacacatataccaatgtaattgaaacagacagctcattccacatgctatcctttattcactgttctctccaatcggtctctcc

SEQ ID NO: 54414 - DNA, 627 bp, Arabidopsis thaliana landsberg
gatgaccgaaaacgaaaccagagattgtacttactgtgtgcaagagagtgatgggttaatctggtctccacatgtcgtctaagctgcgtcgatctctcgcgttttacttatctcttctattttgttttcttccttatcttgtcttttcttttctttacttcacccgacaacaactcatcgtttactcatcagcgatatcatttaatttactctcatctaatctaattttaaaccgctagtttgtaaaacaaactcttccaaaaagaaactttacgatcacaaattcgaagaaacactactatttttgattaaaaagagataaattattagttaatatactttaattaaagtctctaccggagacatggtttctttaggttgagtcacgtgttttggttccttctcgaccttttcctcgtttcttatattatttttataatcaaatcatttccgaccgtacgatgcgacggatacaaataaacgtatcatttcacttttctcgtctttgcggcggttaaactcttgttgggtgggactaatctatcatattgaatgattgtcgattcttcttcctcaggctgtaagtaaacacagatttcataagggaacagaaaaaaagaaaacacc

SEQ ID NO: 54415 - DNA, 1211 bp, Arabidopsis thaliana landsberg
tggactaagatatgtgttttttcaatacacagggcgagttacactgtttgcaaagggatgtagaggatcattgtcagaggtcagaagaagcattttgattataacatgcacaagaccctgcatctactgctggtagtaacgaatttctcactttaatttatgcagagaataatcaaaaagtataaattaagagaagaggttaatgcacaacatcaaacatatgctttgggaatcaaggaggtaaataattttatcctcgttatagttattacttgaatccatgtttgaatttacaaaaactttggtatgatagtagtgatttctttcttttttttctgtgattttcaaatcgaataacatctctacagaaaaagtgatcacacattatcataagggttgagaattttctctcggtataactactactcataggtccttttaattgctgatacttcgagctctcaacaggtctgggagatagatgaaagcaaacataaccctggagaagttattcacacattgggttggcccttggatcccaagacatatggaggttctttcttgtaccacatgaacgatagacaggtaactaactttgtcccttggaagatacttttttacggttgagaaaatattatagtacctccttccagtggtgtcaatcacgctcacttggagttttctttttaaccaaacaggttgcacttggcttggttgttgccttgaactaccacaaccctttcttgaatccgtatgaggaatttcaggtatgtcaatttctcataacgatagacttttcagcggttactacaaatacatttctaaaacccatcatttttatcctccaaatagaaactcaaacaccatcctgctattaaaggcatcttggaaggtggtaccgtgcttcagtatggagctcgtactttaaatgaaggtggttttctggtgagttgaaattcaccacgccggtagatctaactggtgggctgattctttgaaagcagaactatttccatgtttggtatagccattttttaaagatctgtatatatagattttgtttggttgattgagaaataagatttgatctagttaaccctttatgacagaaataagatttgcttgacatgttatgacatatttgaacttgatgctagtaaaatttcagtccattccctatccagtttttcctggaggagcaataattggat

SEQ ID NO: 54416 - DNA, 909 bp, Arabidopsis thaliana landsberg
ccatatggagataaagtatataacatcaatagttataaaacagaaaaaaactgtattttgaaacatttatatatatgcagcgcggaaagagaagaattggtgatgaaaaaactagaatcaatagaagtatgtttaatcaattcatgtcacaatagttctgtataatgtgttaagcgttaagaccatagaactttacggaatcaggaaattctgaaaataataattattgggatccgtttgttagggatagctatggtatgtattaagacatagaaaaagctaaacttgatactatggcaatctatattgtacaaagaggatttgacacaaatttgtatagcataggtgagttgataataatatattaaattcaatatgctatttaaacttttttggtcaactagtttttataaagtaaaatttctacaacgattatgggtgatataataaaacaattataaatgtaaatacatacctaacacaagaacggtgaagataatcaaaatgacgaacgagggttgaaagtatttcttcatcgtcgataatagaaatgaattggtagtgctttaaaaatgtaaaatagataattaaacctactgtaggcatgtagcagctatatacataataacgtagatgtatctcctatttaagcgtatctaatatagtaatattaagctatgtaccaccacaaattccgaagtagaaggatttcattttaactacaaattccagtttttatgtttgttttatttttttgcttatgtgacatgtgtaagccatagactcgcacatttttctgctttaccataagattaccatgacttcccaatttaaatataaatgatgaaaattcaagaaagacctaattacattgatccttatttttcttgtcaattcatttgggaaatc

SEQ ID NO: 54417 - DNA, 473 bp, Arabidopsis thaliana landsberg
aggcgccgcgaaacttgcttgctcatgatatttagctttacaagattctctttcatgtagagccacacttcaatccctatacttatctagatatctagattatagatgttatacattgccgatgatgaaaggaaaacataatatattatacattggtcttcacattgatcaactataagttctaatattgatgtcaaaaggactccatgcattgctcggtatccaaatttgcacaaaaccaattgagttatctcgattttagacaatagagtgcaaccgctgttaacatgagcttattgctcaatatggggttcaaacgacgtaacatgtagctgaccatatattacaaaaaagctctccatctcagagtgttggatctcagcccgtaaaacatatttacagtgctaatgcatgttattgccttgagccatcgacttagacattgccattgtagattgtacaacatattacat

SEQ ID NO: 54418 - DNA, 604 bp, Arabidopsis thaliana landsberg
gttgtagataaacagttccggttaagtctaatttaaagtttctcggtttaaatttcattatcattggtctggtttaggaattacaattatggtcaaaccggggaggctttgaaagtggatctactgagtcatccagagtatctcgagaacaatgctacgttagcgtttcaagcggcgatttggcggtggatgacgccaccgaagaagcatttaccgtcggcgcacgatgttttcgtcggaaaatggaagccaacaaagaatgacactgctgcaaaacgaactccggggtttggagccaccataaacgttctttacggcgatcaaatctgcaacagcggattcgataacgatgagatgaacaacattgtttctcattatttgtattatcttgatctgataggtgttggacgagaagaagctggtcctcacgagaagctgtcatgcgcagatcaagaacctttttcttcttcctcctctgctcctccgagttctggttcctcttcttgagtgaaagttttataacctctggttcggtgacttttgaaaaagaaagttgactttggtgtatatgtgttttgcatgggcttggttttaatattttgta

SEQ ID NO: 54419 - DNA, 643 bp, Arabidopsis thaliana landsberg
aaccaacattacgtattagctccactcaacacattccgtacgttcttcgagactgcatgaagggtgttagtcatctggctaatttgcagcactgaatatgaaatctatgaagctattttggaggtcttaacaaaattaaatattagtacaaatcgtgtgatttgaagagtttcaaaatcctaacattaataatagactaggagtcttatgtataaatgctagggagaagatgttgatgttgtaatctccatcatatgataatttaaccaaaaatatgaaaaaccttgtaattttatttaactacgttatcgaaactatattgccttcattattgcataattatgaagtatttaaactagacaaaccttttttagaaaaaacaaaactagacgaacttttgaatattgactttttcatcggcactcctctctcatcggcgcaaataccaagtctcaactcctaactcccctctcatgtcctttacaaaccaaaaacatttcttttagaaaatttgtcatgtataaccaagaattgataacaaacattctataatgattagaaatagaacttaaaaatcatatccactcaatattcaaaatccccgagtcttcaatataaacatcactcaaatcctttacaatta

SEQ ID NO: 54420 - DNA, 155 bp, Arabidopsis thaliana landsberg
  unsure (1)..(155): unsure at all n locations
taatatagaaaagaatatagaacaatatataagatatacaaatatagagaacatatacataaagatagataaatagataaacacatatatagacagcagaatatagnaaagaacaacataatataaacacaacaagacaacacaagataatatag

SEQ ID NO: 54421 - DNA, 165 bp, Arabidopsis thaliana landsberg
tgcaagggcatcaaatgtggaggtacttggtagtaaccaaaaaatttatgagggggagcaacgaaatgtggagaaaggtcctgatctaacctcataatgttgctggatattcagtatgtcgccgacattcagctagatcctcagcaaagcacaaacactggctct

SEQ ID NO: 54422 - DNA, 1144 bp, Arabidopsis thaliana landsberg
ttgtgacttggatcaataccaaaactctactacttacttcccccaattccacttcagcttcatattctgcttctcttcttcatcatcaatgaacccttctactatgtatcatcatcataaataatattcaaagctgcacttttccaaaaagagatttcaccatcaaagcaatcatcaccaaaaaaactttatgcattcacgcctttataaactcctctgaaacattaagggaaataatacatcacctcgtactcttgtgacttttctaataatccctgaaccttgtgcacaaggacctgaaggtacatgctctctagaccaaaaccaacttttatcacttcaaagagggactaggaccaataaacaagaacatatataggcaagagattcgcactgagagatatacttttaacacttttgattacttacccttcaattggaagcacgttgtatatagccaaagaagatactcaacactttgaacttaccttttagttgcaagcatgttgtggagatccaaagacttaactgcctgttgtcgagaaactctattcgatagcttccacttttcaaatattgagaaattgcctcagaaagatcattcttcagctgtgtcgttgagaagcttgcaccacttcccaccaagtttgactgttccaagttggctgcaacttagtaattttatgacaaataagtttggaaacaaagttctaatttgaaatagtcattgtaaaaacttttgaaacttgtcatagaaaatccaaaaacacaagtgagagagctctgctgcattttaaaattccaagttttgatcatttcagaaccaattgcattcagattagtatatgtgtgctaaagaaatttcattgacagttaggggtacataatctggctgttcaaccgcagtcaattacctgcaagaggaataattgaacaaacataaaatcaggatagtacataaagccaggttaatcaagataacttggtacaaaaatacactgcaggcagaaaaacacatgaaatcgtaaaacagagaagtcaataaaaactatttaggaaaaactagagttcgataagcaaagacccacatggagcgtaggtgcgctttttagttttacaaatgaaagtctaatggggatattca

SEQ ID NO: 54423 - DNA, 555 bp, Arabidopsis thaliana landsberg
tctctcatcattctaagaaagaatgataaatatatttataagttatgaatacaatatatgttaataaaaacacaccaaaaagtgaaacgatcatctacaaattgaccgacatgaagcttagtattaccatattcgtcaaacttttcacctttaaatttgaatccttcctttttctctacagtattatatgcttttttttccacgatcgccaacaaccggacaagtataatggaaacaacaacacgttatctcgaatatgcataatgtcaaaaaattacctccacgtaaaacgaaacctgttgcacaccaagccgtgacttaaaaataaagaccactattcgataatgcaagatacggctaaaaacactcaatcatgagccacattatcaaataatcatttaaccgcttcccaaagcctaacagataaaagatgtcagtcgataaaacacataaatgtcagaatctaacatctccatgtgatacttgtgtgtgttgtccattcacttcttcactcatcataacaacatcggcccacgacgccggttataagatgcg

SEQ ID NO: 54424 - DNA, 1257 bp, Arabidopsis thaliana landsberg
tgaggaatccctataggcacatcgaaaggggtaggcagtggcggtggtatataagcatcaggagatgatgtctctaagtttgtgtctactactacaacaccagtagagattgcagaggaagtcctgttatgagcggaagataaaggcacgcgctcttctgttgcccttgggtactgcaaaatacaagtcataaaacaagttatattcccatatgaatctcgaagcccgttggggcttttaactcatttagtgtcctgaagcacatcaagattgatttatttgcagcctatcaaagcaaggacacccaaaaaaaacgaggaagtgggagaagtatcagactaacgtagtagtacgcaggtccattatctacatcagctcttcgtgaagaagaacaacaacagcaacctcccatctcttcttctctttttttttttctgttttacaaaaactacaaaacccgaagactcttcatctatgctaacctacaagatatgtgaagaaacaaattacattctgagatcagtaggagaatatttatcatctatatgcaagaaactcaaacaagctttatcgttttcgatatcagtttgagctgtctactaaagtctgatcagactcatcatgctagtagcaacaataaaacaattcagctactaacagttcaaattcactctcaataatcaaagatacaataaacatcaaccattaaaatcgagacaacagtgttgcgactacaagcctatgtgaatctcctacaattctcattctctttagcaccatctacacacaattgcaataaattcaaatcagttttacactaaaccccaaaaacttaaaacaattctactcagaatttaactccaacacaaacaatgaatccacaaaaagaaccaaagctccattaagagcaagctaatccgtaaaacccaaaaccgaaacttataaaagcaacaataaacatcagaattctcagaatctagcataaacacataggagaaatacggatcaaaacagtaaaaaaaaaaaccacagaatttcacacaaaaatcaagctcaaaacctaaagaaaagcgatcactagcaagaacaaacaccaaagaagaaccgatcatcttctcgagattgaatcagagaagaggaattgaaaatctcaaaatcatagagagaattttactttttgttcttgggggaagctttttttgttttgtcttcgactttctctgcttctgtgctttttgcggtgctgtgtttatcgtg

SEQ ID NO: 54425 - DNA, 490 bp, Arabidopsis thaliana landsberg
cactcctgccatcgcgtagactgtaaccactacaacaggcacaatactaccgtatagtcacaagatcagacagctaagaagcaacttttcacaatacatttagaggttctataatgtaacctttggttatactatatgtattcatggatgcattattgatccctgcaaatactatgcacattgcatttataattcctctaggttttaaccacttcttccatgtctgcaaagtacagacgaagaaatgtaatgcgtgtaactacctctgtacgtaattagctgggtgccctaggtctcttgaaagtatttatgttctgtatataaactgggcaattgccattttccttttagacggctcccttgctgtgttttattgttacaaataaacacccccatcatttaagctttataggcgaggaaataaccgagctaaaagtcacggcaggtagcagtccttggtttagctttgtaatggggactatctgtattt

SEQ ID NO: 54426 - DNA, 562 bp, Arabidopsis thaliana landsberg
tctcgcccgaatcggtatgaaatccgagccgcccaacgagcgatcgacgacccagattttatttaatgagatctaatctactcctttgaactccatatggatggcctagatctcaacttcaatgcaacaaccagagatctaatctccaccatccaaccaagcgatcaacgacactcatctcgccctcatcctcccgacgcacagggcacaagcgcggcggcccgcgagtgtcaatggcgacacagccactggcgcaggcgaacccgggaccctgcaccccaaacacacaaacaaccgattctacaccacgctagagacacagcaaaacagattagggtgcccttatcgtgattctcgtcgaggcaatccacgacacccgcacggtgtggaccacagtgccccgcaatcaccatcgaaggccccgagcacccagctcgaacctcgtgctcgttcgagtcctgaacgcctgaagtgcacacgagtggcgaacgatcacccaaagtcgacgccatactccgaccgtggtgggtcctcaattactctctacgtgcaacggggtacg

SEQ ID NO: 54427 - DNA, 817 bp, Arabidopsis thaliana landsberg
ctctgtaacttaattgatctgatttcattatgaagtacgaccagattgactaatattccattgagtggtgtcatcactatcacgatcaaaaaggatgttattgattaggtcactaataatatttattaacattaatataaatttgcaaaaggcgatagagtgcggagaaagaaagtaattaaggtgttagtttcattaaaccataaagtaatctccaattagaaaacaaaacaaaaaaaggtggtcctagcttacaatttaatgacaaatatttgtgctttaaatcatataaaacagaatatcttaaatatgttatcttgattagagagtgaaacccaaccatatgtagcctatatgtatgactgatgatgcttcaaacaaaaactttgattactagttgaaagtgttaggcaatacaaacttctaaggcttctttttgccacattttatcatggttttatttttcttcataattaagcatacgtctacgacgtacttatataaagtttatctataatcaaatatgtatgtttcattgtgattcgagaagacctaagtttgttaaacaaagtgaacaaaatgtgaattgcctaacttttttcgagtgagtctctttgtgcaaaaggcctacccacatgatctatcaatattgtcgctctcgttcacaaggattggggtacaactaaatcaaacagtatcttcaatcaacataaatttaactttatgaaaatggattaaaaagatgatatcttcctttttctataattgtttcataaaatggaaattggtacttaactggtaaaaataaaggtttcgt

SEQ ID NO: 54428 - DNA, 1058 bp, Arabidopsis thaliana landsberg
caacatgcgtgcatcgatgatatctgcctttgagcggatcacagagaagtgaagttccttggttacaactgatcctgaaatgtgctcagtggattcaacggaaacagaatggagccaacctcaaagactgatgttacattgatcatagcagtttgatgctgcgaaaatcatatcttcttcgagtcagagggttagaatgtaccaatgcattagctcgattttcaattttgtagctaccaccttcaagtgtatctgttttgatttggttaaatgttaccagaagttcttacaagacctcgagctaaggatatatcaaaataataaaacattttggagaagagaaacagcaaaaatggagaaaaataaaatcatttcattgtcctttaatctcttatccacgacgaaatcctcaaatatttctttcatataaagcaaatgaattcataacataacagagatacagtaggaaaccaatacagagacaaactttacaaattacaaatagactaacgctagtgtctcatccaaaaccagaatttggtgaaaaaattataattatgaaacaagcacaagttcatcaagcgaggaaaaaggattataaaagggaacgatagtaaccgaggctagaaggagttccagttatctgaccttttcgtagggctttcatccgaagagactttaaagggacctgtggaaccaaacgggtctgcatcatcaaacgagtatccatggctaccactgaaatcctttgtactattcatagagtcgaatcttgatagcgagggaccaccaaagtctttgctactgttgatggaattaaaccttttaaatttctcagctccagtgacggctctggaactgttaattgaatcgaacctagagaaggcagctccaccaaagtctttggagctgttgatggaatcaaaccgagacagtctcttgggctgcgaaaaaaacccggcgcctggttcactggtggtgaaggagtcgaacctggagaagctattaaaggtattatctctagctgatgccatcgttgaaccggggggggaagttcc

SEQ ID NO: 54429 - DNA, 831 bp, Arabidopsis thaliana landsberg
caacttgttgaagtggcccaaacctgcatttctccccaatccaacaaacacattgattctttctcttttggttcaatgacataaacatggaagccaatttcgtgcagaaagaggtagattagttaccagtcgatgactcgacgaattttagtttcacattcctctatctaaaaaagaaaaggatcaatggacgaagaagcggaactcaactggacaaagtagattcgataaaagagaaaaagcgagtacctccgccggagttagagagattcgagctgtctgagcaagacgggccacatccggcggctgaagaacggaggaatccgagtcagacgagtaacttcgagctattctgtggttttttctactctgtctttggtaataatgacttgaagaagaacaagttaaagattggattttgatcctgctcggagagatgtagcagcgattcggagacgcatatataacggcgagcaaagctctggtcgccatggctaatttctctctcgactcctgtgaatgaatagatagaattgaccagcttcataacaaacatttctaaaacgacacagcctgtgtcgttttctccaaggactaactaaaccggttttaaccggtccacttacaataatcgaattttgtttttcagttttcagtcagaacacctctcttttcttctttacttttgcaatcagcttacaaactagtgaaagatggaaactggagtgctatcagtctattttgatatggaaaaatacagactaaatgtagtacgaaacccatacacacaaatagatatcgagctatggatttattagcctcaacccgcgc

SEQ ID NO: 54430 - DNA, 1412 bp, Arabidopsis thaliana landsberg
atatatcgatcttatatttcacgtttgaaaggggaggagtagtggttcatatttataaaagacaaatgtttgtgttttattgataaaaacagaagaatatgaggagcttaaagtaatatttaaaatatacatgtaataatatttgtttatgccttattggatttaataatatttttttcaacgctttttggggcaaatccaagtcagactgacgtggcaaggggtattttagtcaatttaaattttgatctgcatcacaagaatatataaataataaatattatagttgtcgtcggttttgtaacgtaacttcatttcatgggtccatttaatattcccatttgcattttacaaaggaaaggagagatccgagaggaacataatatatagttttgtaattgtaagtgaagttagattagagaaatgtactaaacttctgatttttggataagaatctatccaaattcaagttgcatattttggtgggtcctttatttttgcatatattagtacacttgtgcaaaaccttttatcaagagattatctagtgagagagaaacataacacttgcaaaccaagtggatgttggtggtttgactttgagaatatcagtagttcaactctatttgaaagaatgatttacgttttatcaaagtacgtctctattacaccattagtagaattttgtagacttttctatgttaaagtggtttagaaaaatctcaaactgtataatttcgtgtgacattttgtcttattttaggaagaattattatgtaggttaggttatgaatcaatttctaaatcattcttattttgacctggtgtcatgtttaaggtttattaaaaatccgatgaatggactattcaacggctacactcagagttggtcctaaaacccaaaatattttttgcctataaatatttaaaatatagcaaaatgatgcattggagacttaaacctataacatgagtaacaaaaaaacccggaaaaatcactgtcctacaagaaatttatagttttggtgctttcaaaatgaaatatatattttgaggcttaaaacccttaattgttcagctttagattaggacagacagtggatacatttactttgaaaaagtttgtcgatggtaaaactggaacacccctgattatcagatttttttttttgttgtcttactttcaaaagagtaggtttatctgttcaagaaactatttctacatttttttgtggattttttcgtgtcgtgtatgggttatttattcgttggtttgtttttctttttccgtataatgctgaaagatttggaaaatagaacattgccaaaaaaaaaagatatgcatgcagctaggccggtgggatcaattagtgggcctaatgaaacgtgttggctcattcatttgggatata

SEQ ID NO: 54431 - DNA, 853 bp, Arabidopsis thaliana landsberg
gtactcatagctccttacttgagagtgccaattcgttatcctttgtgcctagggggttccaaaacatacattcgagactatgcgccttaggttgagccttcaccatcagacatgtctccgattaccacgctttcccaaaatattaactttgtagagtttcctctgtttctggatggtcaagatacaacacgagctgcctatgctgtcttcttactaaacaaggttagttagagattttttttggttttgctcttctccctgatacttgaaacagtagcttgcctctcctctcatctaatcatagtcatcgtatcacagaacatcgagcaactcttgaactttgtgggggaaaatagtctaggaccacgtcaggttctagcaaacctgaaggagctaattcgaatcatccaatctccagattatatcgattatttatgacgatgatgatgatgacgacgaaaataatgacgatgatgaagatatcaatccattccttctcacacatcttccagagttccagtgtctcttcttgtttattgaatcatctcaagtcagacactttgtggaggtaaaaaagtacaaataattgattttgttagagaaattttagacatggaaattctctttaggatgagactcctcctctctagatgtgatgtttttggtttggagagaccgacgataaacgaaagcttagtctattatacagttctttcttaagttctaacagctgtattagtttttttgtttccctttatctttatgtgctagttgtaccatttgaaatatatatgaatttgtaacaatgagcctgttgttgagtcagttcaatcttcatcgtaatgtggaatat

SEQ ID NO: 54432 - DNA, 341 bp, Arabidopsis thaliana landsberg
ctccgttttctcgatctgttgcggcactgagtgaagaaaaacaagaacgagcggaagccgttgagtacagaaaagacccaaaacgattcacaaaacgtggagcccgtgatccagcaggtgtccattttgaatgaactcagtggacagatacgaccttgcgagataaagcagtcaccaaagaagcacgtgatcgatacctaagtatctcaggatcaaacttcgtagacaagcgtaacggagcagcgagcaacgcgtgatcactctcgatgtgattatcccgcaggagcagcacgaagaaccacctgaaacgattgcaatgatgccggctaacgtcggcgatg

SEQ ID NO: 54433 - DNA, 730 bp, Arabidopsis thaliana landsberg
tttcagattgggtatcatttgcccgaagaaacattgcatttcccaagagaaaaagatgtgtatgtaaacaatctatacatacatatatttatgcaagcagctaataacttagcccccatcgtcaacggagagagagattgagatttttctccatcacttattttctttggctaaaattaataaattcaaatctactcctttggaaaatgaatattttatattataatatgatattattgtagatgaccatatttggaaaatgaataaaatgtttaattgatttcagtattttatatagattataatattgtagatgaccatatttttttgtgcattatatgtagatgaccatatatggagaaatgttttaagtagataataataaaacaaaaaaaacaaatttagtaaatggaaataaaacaaaatgaacatttcatagttctaattttatcatttattaaacttttataggaatagtataattttatatttatttaagttttagtagaataatgaaaaaatttcataacatgttatttttttgagaaattcctcaacctactatactttcaagctttagtttttattcagaatttatattcttaattttgcccgttcaggtaactattttagatttacgatagagttattataggagataggatttgaggtttgagatttatggtttagttttgaaagtggaaagttaagtttaagtctggtggttttt

SEQ ID NO: 54434 - DNA, 972 bp, Arabidopsis thaliana landsberg
tgaacaacttgttatttagatttctgtagaatatcttataaatatttgattactatattttagtcgatataataatgtaacgaattttaaatttttgtagctataatatttttgacaccgatacatagaacttcagaaactataatcgataagttaacattacatggtagttaaatttaagttactttttaaaaaatgattgtccaatattactacctaagaagatattcaacgaaaagtagattgttacaaatctaaagtttaattctgaaaattttcttctcaatatatacacataaaagatacttattcaacaaaaactcatttctcccctatctcaaaaaggaaataaaaataaaaggataacgacacaaacatgaatctctatccgaatctatctgtcccgtttataaataccccacagagctcagagccattggtttttctttttcattttctttcatctcatgttttttccttggtgaaaatatagggttaagagaaaaacccgaaacattagcgttattgataacttaacaacagagaaaatctggggttctctttctctctgggcttttgcgtacataaactttttgaggtatattatagtatcttgtttttttttctctgcctgaaaaaaatgatgagttttccagtaatctttcgaagcctataatatctggaatttgaattctttgaagattgtgacatttattgtttaaagctggtaaacaaaagtgctcttcgttgtttgcattttggttttccccattttgctgccggagataacgagggaaatcataactcactaggatacatatatttttttcggttgtattgaattctcccatttgctttcttggggtgtatcttattttatagaatctttttttcctcttgaatctgttgtggcataataaaaaaaaaaaaagccctttttttttgtttgaaggcgtctttattacccttcac

SEQ ID NO: 54435 - DNA, 607 bp, Arabidopsis thaliana landsberg
tgaaactaataaacttgcaccaaaaaaatcaacattacatgattcattttcaattgcttggggaatttaactctcttaagaatttgttcactaaataaacaaatctttgaaaaagaaaaaaatgagatttattagaaagaccaatttaatttcgacaggaaagataaaacattgaaattcgattcctataaacgaaagtaaggccaaacaaaaggcaaaccaacagagtaagaagtaagccaaaaaagcgaaaacagaaagagttatttgactggcagagataaaacaaggtcataaaatgacaagttggctcgttcgtatcaacatttgcttgcagtttttggaacaaaaaaatataatttttttttgcaaatttaaaagagaagttcaaaaagaatgtgagcatttcaaatagttttttaaactatatcatgcatccttacacttatttgtatattttgttcgggaaagggcaataaatgcactagaaagaaagcattgcttttgacagacagagcacaatgtgtcattgataaaacagagatttgcagagctttggtcttgctttctcaaccttttttgaccccctgcttctctgcattcatat

SEQ ID NO: 54436 - DNA, 581 bp, Arabidopsis thaliana landsberg
ggctacctatatccacgcgataatgtaggcttactgggagagcacggattgcagaagagagcatatgactcttttgtggcctttgtgaacccaattgaatctgaaaccaggatctcagtcatctaggcgttcaacgcgtcgtcaacttcagcccaacgcctgggccaacaagccacggaacccaactctgagacatcagcacgtgctcggggctttcgggcgccggggcaaagtacgctagaccagattcgatgccgagatgcccgagaccttcaaactcatccgtctcggacatgagatcatccaagctcgctgtctcggtccaagagaaatctcgatactagtaataatttgagcttcaacggggttctggagatcggctcttcccaacctctaaagccgcaaacatcatgtcacccacgccgccagcttcttaaggtcttgacaagaacgcctgttccctttgcgctcgccgcaaggtcaaatgcgacaaaaaagacccctgctccaactgtttcaaggcgcatacgcagtgctcatacgagacccctgctccacctcgttctcggaagagagcttgc

SEQ ID NO: 54437 - DNA, 119 bp, Arabidopsis thaliana landsberg
ctccatatttgcaaacatcacaaacaaattaagacactctgttgagctctaagccgcacatcattataggactttgaaggccacaccacacgcttggaaaccaacatactgggaggagt

SEQ ID NO: 54438 - DNA, 653 bp, Arabidopsis thaliana landsberg
tccttatagtcttgttctataaagaattctgttacaaaatgcataaaattactctttattgatagagaaataacctcattgtcataattcagaaaaagatgaaaacaccttcctaaatagtttgtcatctacttgttttcacccttttactttacttaggaactttataacttagtagtctctacacatctgtctcatgaatagactataacatatttggcagtccaaaaataagttagaaaccaaagtaaccgcagccgatggaaccacgatctcaagaaagcagtggagccatctcttgcttgttttcttcttcaagacgtgatcggattgttagaggagatgccaacttgtttatgctgcatattaaagttgcttacatgagcgatccataaaaccaagaaaaagtgagttgagtatatgtgagatattagactcaccatactagaacatctccacttgatgattttttctcagacatccattcagggacaatttcttgcagtaagattagttgttcttcaacttcctctgaaaaatgtaagtgaggcaagaacagttaggatggttttcaaacaatgtaaagaaaagtaataatgagatacttagtggttagagggcttacttctggcagtaatctcaggatgtccggc

SEQ ID NO: 54439 - DNA, 1216 bp, Arabidopsis thaliana landsberg
atttagttaaatcttgatagcgtgaatgatacaagaggtttatatttatttggtaagtatatatatggctgagaattgacagaataatagaggtttctattatttttttggtaaattatatatggttgagaattgacagtatatatgaactatgaactgacggaaataatgacattatatttgccggtgggactagattcggattactaataacatactgtaaattgtaaaaatccatggtcatatctgtatacaccacacacacaaggaagccataatgactagttattcgcaatactaaacttgtaagtgaagaaatttggagctaggttacatacttacattacgagaaaataaatagtactcgagtgtgcacataataagattcaaaattatcaacgaaatatattcttttcaacctacatcttcaagataacatccaagacgcatatatcaagttcaaagctaagctatccatgaactgaactttaccaaatattatagacttcaatattgcaacacctattatatcagtaactgcggcgcaccaccattttacaacgacgcttcccatctccactaaacaccacaaatagatcgtttactaagccatgtgacgaggccatatacacctatgtgactctcatattaaatccctaacacgtacatgaaaagttgtgagccttgacctttatataagtatataaccaataacataactccctaaagatctagatgtctacaaaaactccataagtatttctgcaaaaataggtacttcctttttttccccttcaagtcacattatgttgtgcgttgagctgtgtcaattcaattccaataatcttttagtctttcaatcgtcattatcttcattttgagtttaaacctcagccacaattaccctatgaaaagtaatcttgcttttaattgctaaatattccattgagcaacatcaatcatttttcctagtggctaattgaatgcaattgtggagttagttaaaacttaaaacttctttctgaaccatatatatccactgtaatgtcaaatctaagaaaagaaggttggtctaaaatagaatataggaaattgaaaaatatattgatacagtgacacatacatagaaataggtgatcaatgccgagattcggtaaggaattttgattaaacatcatggtatgactagtaaacattgtcataagcagaaagggaa

SEQ ID NO: 54440 - DNA, 708 bp, Arabidopsis thaliana landsberg
gacataacctgatgaaattatttaatagactctagttttcccagtctcaaattttaatctgttcgtactaaataactgatttgttcattaaatatatagttccttacaaagcaaaagacaaatggttcattaatattttagtttcttactaaaaatgtacataaactgatgaattatgacatcattaattaaagtatatactgtaaaaggtaggatgacttttgaccccaaaaaaaaaggtaagaggagtgagggagagtcgaagaaggggaaggtactagcaggaccatcaccggagtgacgtgtcagttcgcaggtttctgtttactctgcacccgacaactaataagagaatcagaacagacctatttcatatcttactatttatgacgtcaattgatcctaactatataacttacgtatttatttgtaacattattatacattcctttgtagtattataacagtatgattttattctttgatatacaaagacaaagcctgtcgaatgttgtattcctcttaatggcccgtcacaccaatctttatttgagaatatttcgtactgaatcgagactattaatgaatagttgtataattgaatacattcatctttccatgataaaccatactataagtgttagacaattacttgaacctatctataaagcataaacttaagtatccatgtaccaattgatatcgagt

SEQ ID NO: 54441 - DNA, 557 bp, Arabidopsis thaliana landsberg
gaagcgatatcggccacgatgggccatccgatcgacgctgggcggccaggattaaatcgtcacccacttgaaccggtaccgaacgcagatccttggatctagatccaacggccaaggttttaaatagcgcggaacctcggccaccacccgatctcagatcaacgctcccgatcggtttaacgcgaaacgttactcggatttaatctaaaccgttcactcagagatcaacggctctggtactctcttcctcccatcgccgcacaaccacggcgaaccgaatcacggcacggcagctcgccacgccggagattcaattctccgtctccccgacctaatccactgcgcaaactagtgcaaaacaaaatgagtgcgattggaagctgcaccgagggctttgctcgctgacatacaacgcggggactcccgaccacggataggggcaattcacggcggaacgcccaccggcgagcaattctggaggctacgcgagacaaattcgggcgcgaggtgatcatctactgaccaagggaggtgacgcagctagggggaaagggaat

SEQ ID NO: 54442 - DNA, 775 bp, Arabidopsis thaliana landsberg
gttttcgaaatttctaaattattataggctataatctactttttagcagtttcaaatgtatgcactacatttcgtaaggaatcactgtccatctactagactgctctctaattcttctctttagtcattgctatcatcgttttgcgatgaagatgactttgaagactcgagcgaggagtggtttgttgtctttgccaagagagctgtgaccgctattgagtcttccgtacatacaacaacatttattgaatctttcattcataactagatgagtaaaaatacttagttatataattgtatcatgctattgttatttacaacaatcgtcatttcgactaaattttttgattatcccaatatttgatattatacgtttctaccacctaaatatatattaggtatttggcacattgtctctagggaaaagtctaattcgatatacctactttgctaattaattatctgataatttaataaaccattagactttccataacatgataatttcaacgtataatttgatatataaatattattcagatttagatctcgttgtcgtaactaaaaaaatgaaagaaagatttgacgttaacgatgataatgattaaagtaggtgaggatgctcaaaatatcgatcttctaattggctcaaccatccatcataaactttaagacttcaagtacatgcaattagtagtattccttcattttctactttttgcgcaaatataatactactaatttttcaatctacctttgtgtcggcgtttaataa

SEQ ID NO: 54443 - DNA, 577 bp, Arabidopsis thaliana landsberg
cctgacctacaattgtcgtcgctggccgacctgctggcgtttcgtttcagaagcacctgggctggtgcgctgactacggtgatcatgctgatcggcgtgttgcccctgctggccctgcagatccaggcggtggccgactcgatcagcattctcaccggtgagccggtcaaggcccgggtggcattcgccttctgcattctgatcatcctgttcaccatcttcttcggctcgcggcacatcgccacccgggagaaacacgaaggtctggtgttcgccatcgccttcgagtcggtgatcaagctgctggccctgggcggcatcggtctgtacgcgctgtacggtgtgttcggcggcccgcaccagttggaagtgtggctgctgcagaaccagaccgtcctttccgcgctgcacacaccgctgcaggaaggcccttggcgcaccctgctgctggtgttcttcgcttcggccatcgtcatgccgcacatgtaccacatggccttcaccgagaaccttaacccgtgttcgctggtcagcgccaggtggggtctgccgctgtttctgctgctgatgagcctgg

SEQ ID NO: 54444 - DNA, 891 bp, Arabidopsis thaliana landsberg
catactcaatttccgtttataatttgccttaccaaaccaagtggtgcattactaattatttatcgtttatttactgttcggatgtctatatataaattaaagccaaggatagttgataaagtaaaagggttgttgctgacaaaggaacttgatcatagaattccgcgtctctctggatgctgcgtttttaaactcccaaaatataaaaaattctcatatttttaggagcttctttttcttttacagtcatcttgtacgaatctgtgtgtcagtgtgtctgtgtgaatgcatgatcctctataaattttccttaattatgtaatgcaaacatgtttatgtttacacgtagacattattaaatcaagaataaaactttctgcatggattgaagcatacttacgtatcttttcttaagactatttaagcaaacagtatacttgctaagcagatctatgaatgtttatatacacagtatacaaaacaagccaaaaccaacctattttatagattatattgtcgcaactatatattttattatttgcattgcacagtttggtttacttctgattactaattttctgcagtgagtatgacgagtatctattggttttaatccctcagtgagtagagtagagtaatgtacactgacactttggcgttgattgattatgtgcaatttacaaattatatggaagaaacgtagctttagtgtgttggagtttgcaataaacaataattttccaatgatatacataatacgttaggaaaaggtggaataatataatgagaaacgttaaagaaaagattgacacggaaacacccaggcatagcctgtatatccttgccccagaactttgtgtaagtcccacttttacggtagggttaaatcat

SEQ ID NO: 54445 - DNA, 636 bp, Arabidopsis thaliana landsberg
ctaacacaattttgcaaacaaaaaatgtcgcagattagtttctcatgtgtcgcatatcctgctttagtaacgatatattgcgggcaggctgcgtacctaactaaacatacttacaatgtgtcaaatactttctacgactcaatccctggttagtttaactcaagtactatcatttcaaaataaaaatgaaaaaaatgacgtgcaataatgtgatataacacataatgctttttaacagatccgttatactggccaacatttgtggtagcggtggcagcatcaatcatcgcgagccaagctatgatatcgggcgccttttcagtcatctcgcaatctctacgtatgggttgtttccctcgagtgaaggtggttcacacctcggctaagtacgagggacaagtctatatcccggagatcaactacttgctcatgcttgcatgcatcgctgttacccttgcctttagaactactgagaagattggtcacgcttatgggatcgccgttgtaaccgtcatggtcatcacaaccttaatggtgactctcataatgttggttatctggaagaccaatatagtgtggattgctatcttcttggtcgtctttggctccatagagatgttatacctatcttcggtc

SEQ ID NO: 54446 - DNA, 891 bp, Arabidopsis thaliana landsberg
actgggaacataattatagatgacaggctctttataatggtcgacttttttagcataaacttccgtacatttatagtcttcaataacgtaaactctatgaaccccttcttttttatcacaaaatacaacgactttgttctcttcgtcctgaatgaagaaattaggcaggttgaaccgaatatcaaagttttcagcatcaaatctcatgagtttgctccaagacactttttgtccatctatcacagatcccgtcatccaaatttccacagaatatggatgacgcgtttgatgtaatatcgaaattctatcatttttaacgaacatagaaagatgatcttcacaaggatatgccaaaaaaggcaaagaaagacgtccaaacatctcagctgaaaaatcaaatgtcacaatgacaccttcatgtgtattttcatctgcaccaatccaataagaattcccattcaaggatacccaacgagtaggaaattcaagaagaaaatcaatttcaacgttaagaactctccaagagttagacgtaaagtcatatatttcaacctctaaatatttcaaacagaatttacaggaatgccagctggctgctggaaacaacaagatcttgtatcgacgatcaccgcattttttatcgcacccaaaagcatatccaggagtattagtagtacgtactttatgtatgtgtcgttcaatccactttgtttgctttgaacatgggttccagactataatttcaaaacatcttgtgaggccgaagagtaaaccgtcgcaatgaagaacttcaaacacttcacatttttttttacaaatacattctgttagattaagtttacaactagtaacgttgtaacaatcccgcttttggagttcacaactaatcgt

SEQ ID NO: 54447 - DNA, 529 bp, Arabidopsis thaliana landsberg
tctaaagggatgtatctgaacttggtcgtcatctgataaaagtgtttagagattcactttaggatttttttttttgcgattcatcttataacagatttttctgttatcgatcaagaaaagctgcagatgaaaatgtatccttagttttctgaagatgttcttgtgctttaccatattatctgatcatgttttcatataaacagtggaagtaaattggatagtagataatgtagtagctgggatggtttagatggtggcatctcgccaatggtatctccattgaattaatgttattgcatcctctgtttagatataatcagcacttagtagaatagtgtgtgtagctcatatagttaggtgttgatgacatagttttgtgtgtcttgagttggattgccttctgatgtgtgcttgtttcaagatgctgctatgagatctatgcgagagtgatgagaatggaagctcatgctgcatgaggaagctaatgagttttttatcttccttttagcattttcgatattcatcttgt

SEQ ID NO: 54448 - DNA, 956 bp, Arabidopsis thaliana landsberg
cttaaatttttcgaaaaatcccaacggtaattccaatttgggatgaattccaataaaagggttttttcatatacgtgaaatgaaaaaatagtaaccccatattcatatattagttgatactttgtagttgtataaacgtggaaatattaactataataacatatctttgacgatacaatgagtaattgcttaagcataaatgtgtctgaaagtggccgacgcataatatatagatttccattatcttacccatgaatgttaaaagggacaaaacaatcctcggtcttttcttttgataatgctttacaatttttaaggtagaattcaatgactattacgtgtatatgtgttcaagttattgaaattaattttcaaatcaatacgtgtcgatgactgacatatacacaacttcaaagtagaaatgtagccaatctattaatgtgttgttaagaaaaaggcaaccctagtagaatgtgtttgttgtgtataactattgttttctcacggacaagaagtactagttcaaggaataagttcaaagacagaaatacataaaaagcatgaaaataatgaaataaaagagaagacataataattaaagacgcgcatatatattatttgatacacacatttagtaccctttgtcgggaataaaaatactgcagacggtgaaatctagattccggttaccggagaacaggaatccgacgagaaaaaccctaagtaaaaagcaagattttgtaagagaagatcttgtgtggggctatatatctttcgatatacttttgtcacaacatcaatagaaatccactcaataccaaaacaaaagataagtataaaaaggtaataaataaaaattcacgtgggacttgggtccatctgttttttcacctgggatcatatgattcatatctattggatttggattttttttttctgcccttagcaagaatgcc

SEQ ID NO: 54449 - DNA, 885 bp, Arabidopsis thaliana landsberg
tacaggctcaagaagatcaacctaagataaaaaagaatacaaaactggttatcaaaaacagagaagaacagaaactaaaacatgtaaatttcatcgaaatatacacttcacctcgttaaagtatcgaatcagaagatttttagtgattcttccaataccagatccacaatctacaaataattagagtgatttgtaagaacacacatatggcaaaaaaccaatgaacaccaatgagagaagagacttaccaagagctactaaatgctgattagctccaacattgttaactaatctttcttgcaaaagagtcttaagaaaaacctcacttcctataatatcagcatcattcacatgcccatatcctcctaatactccatcaacagaagcttcaacaccctttataacaacacaaacacacacaaattcaaaactaaggaactttaaagagaactaaaacatagaaaaggtaaagtttttaagatcagatgattcaaatacttacttcccaataagaaacaccatctctataccattgggtttttctagtttcgtctccttctccaatttcttctctccacatctcttgtacgctattaaactctttcccttcggaatcaacgccacaaatatccatggaattagaagaaagagttaacacgcttcttatctcgtttcctctgttgatagcgatacggtggtgaagcaagtgtcgtcgtcgtcgacggcggcggcgagatatggttttggttgttgtggtggcaatggaagtgaccaatggaaacgaatgggctgtgaagagaagacgacatttgttgttattgggcttttcgggtttagtggctttgttattattggtctcggactatccaaattgtataggttttg

SEQ ID NO: 54450 - DNA, 523 bp, Arabidopsis thaliana landsberg
atgatcgtcaacgacctgcggtggtgatacaggagatttattacgtggtaaactcgccttatctttaatctcacgtaatcaatagatcataaacaatactaacttggtattttcaatgtaagaatccatgatcttgttgtttgcaatgtttttcatcagtcctttaattgttgcagagataatccctaacactcgctccatactgataacaattggacaaggttagaattactgtttcgacttgtattaaactttctaactttgttatgtaactaaattgttattgtatttttcagttgtagggttccatgtatttataattgtggtgatgattatagcattcttgttctggaggagaaaaaaagtaaatgatctgagaaagcagaacctcgaggcgcttggaacctcgagacgatatagttatagacaaatcaagaaaattacaaaatcatttacagaagtagttggacgaggaggatttggaactgtatataagggaatttacgcgatggtcgtaaagtag

SEQ ID NO: 54451 - DNA, 586 bp, Arabidopsis thaliana landsberg
gcaaccttgtgtcctgccatttcttctcaacctagcacacattttaatcatagattcattactaacataattgatactttcacaatgctcacgattcctaaagctgaaaactttattgacaaccaataaaacatctatacacacacactaatctacctgatctcttaatttctactggtttgcacttggagtctatatatacacataaacatgtacaatttcgatccattttctgtctaacctcttaactacgtctctattcaaaggaagatatcaaaggctttgaatttattcccaaaatgatacaagaaccctaatccacaggatccagatactgaaaataaaattggcatttctcccgaagaaaaggattaacgtttcaaagcatcacaaccctaagagcatcaaatctaaatcaacggaagatttaaacgagaaattccgatcttaagcacaccgatctacacggaaaaaaaaacgagaaatggattccaatcttgtaaaaattaatcgtaacttcacaattcggcacctatttataacggaaatcaccacaaaatcattaaggaaacaacaattattatta

SEQ ID NO: 54452 - DNA, 557 bp, Arabidopsis thaliana landsberg
agaggatctttcaagacaactcagtttatttcattgatggtgatgatccaagtttagtaggatcagggcctcagaatctgagcgtttttgaatgggagagtaagcaaatcatgaaaatttaccagccaagatcttggaattgtcagatgttttgggtcacaccaacagacgttcctcagtgatgaataactgatgcattgtagaatttgtagtttgcatagtataggttttgtatttcaaatttcaattctttgatacattacaattgtcatcatacattttggttcttcatctgtaacatatatattaagttatgattatttcagcatctatctttctctcactactttcattaatcaaattgaaaggtaacttttttgagaatcaactttcacattctcaatcttgaaacattggccacaaaaaaaaaaaaaaaaccgatagatttgagattgacagaatgagagcaaaacatacacaagtttccagtgtatacaaaaaacatatagaggcaccaaacacactgataccaacattttttatcaagcgtctaggac

SEQ ID NO: 54453 - DNA, 901 bp, Arabidopsis thaliana landsberg
  unsure (1)..(901): unsure at all n locations
caaatgaaggcccatgactaatgaacccatcaaacatatgtgttcaacccacacattattggaaatgacacgtgtatgtgcacttcccgatcactatccaatatcatatcaccgccaaaatctttggcggcacaacccatccaaaaaaaaacaacggacggtacatacgtgttagtcacgcgcttcataaacgcgagtggttgagtaattcatccattcattcttccgaacttctggtgtatctgtcaccgtgtctctcctctgattggccaatccaaatttaaaatatttattttaaatagcaaccccatgattctcggtctatcaaccaaaaacttaaacaagatctgtaccgttgatttggtataccagataaaaaatcgaacggtccaaattcattgtctttgactcttttaattcgccgtcactggacagagagagagagagatatcatcgacagagatcaacgaggacaagaagcttctcagagagatccgtggaggagaattctctcaggcggatctgtttgtcggagcttttgtgaatcatcatcatcaatgggtttgttggaagcttttcnnnnnnnnnnnnnnnnnnnnnnnnnnnnnnttaagatttcttcttcttcttcaattgaaatcgtgttgcaaccaaattacatcaccgttatcagctcaatagtatttgaatcgtggtctagttttgacaaggttctacaaataaaggcagattctgtatcttttagtttttaaaagagcaaactttaagcatttggtgtgaccttgttttctttttagattgccaattttagctatgtgtaagaatgatagcatctttaatgtggtttatgaagaaactttcggtgtaacatcattctagttgaaaagatgcggtttttcag

SEQ ID NO: 54454 - DNA, 1260 bp, Arabidopsis thaliana landsberg
ctaaaaaaataactatattctgaataccaaatatttattattgaagaaaaaaaaacgcttatagaggggaagagggtgcgctaccaggtcgtagtcgtgctctcgttttgcaattcacgtttcctctctgagtttcttcgtcttcttcctctcgtctctctttctctgattctctcgtacgttattcctcttcacgagtttctctcatacttcgttattaacatcgcccgttttatactccaaaccatcttttaacgccttcctctgtttctctcgtcttctcacaattctcaggtgcacaaatctctctctctctctttctccatgtgttgtttctaatctgatcatgatcatcatattcatattcatcatcatcatcaccaatcttctacataggtttttaactctgtttttactgattaggaccattttgtgatttttcctatttttataaaattgaatcgaaatcggaatcggaatttggatcaaaatgttttcttgaaactgatcggcgtttagtcaattttgatgactattgttacattttcaagactctttctgccacttttttgttttactctgttctgttctttttcctatgcaactttttttgactaaagtgttttgttataatcttttcattatttttctataacatatgtataatttatcacttgaatgtaaaaactaactccctatattctcacttttagtttcataaaattcaacttttgtttctgtctgattaaggtcccacttgcaacatatattattatctctctgtttttctccatgcatataaagatgtatgcagaatttggtagctttgaccttttatatttctgttagcaataattttatttttttggtaaattcttcctttgttttgcagcaatctccagcaacatgatcttcattgttgctagatactgaatttttttttgtgggattttctatgttgctttggtctcaagtctatgtttcaattctaagaccagaacaaatttgaggtttttttcaatgctaaattcgtctggagtaagaactcaacgaagaagcccaagacctttgtctctaggaggtagatagattattactccaacaaaatttgcttatgatcatataccataatcatgataaatttttggattttgtagaaatggattgcttagaaccacaaacaaagaacaatctcactggaaagcttcacttagtaaattcactcctaattttagccattattgtgatcagtcaatcttc

SEQ ID NO: 54455 - DNA, 529 bp, Arabidopsis thaliana landsberg
tccggatcttccggatggtggtacttgccttcgaactcgtcgaacagttccagcggcggcttgccgagcgtgttgaccagcatgttcagacggccgcggtgggccatgccgatgacgatctcgccgatgttggcatcggcgccgacgcggatcagcgtgtcgatcatcgggatcagcgcgtcgccgccttccagcgagaagcgcttctggccgacgtatttggtgtgcaggtagcgctccaggccgttggcggcggtcaggcgctcgagcacgcgcaatttttcgtcgcggtccaggtgcgcgttgccggcggccagctccaggcgcgagtacacccagcggcgctgctcgtggtcggagatgtgcatgaactcggcgccgacagtggccgtgtaggtcgccttgaggttggtccacaggtcggccagcttcatgcgcgcgtgtccaccgccgcaatacgtgccggtgttgaatttggtgccgagatccgattcgtccaggttgtggaaggccaggcccagatccggag

SEQ ID NO: 54456 - DNA, 555 bp, Arabidopsis thaliana landsberg
atccccaacccatcagtagagcactagtgcatttcagaaaatttcctaagactacgacgacaatgcatcgatcttatcatgcacataaaagcatcaccagcgtgtttacggaacctatcagttaacttgatcgacacactacccatgttctttgcctttccaattttatcgcaacacaagaatcatccccacttgccaatgacaccaacgatacctactgacctattgtttaccacccgagcacagttacacgccgcacactagtttctaacatgattctcgcataactcgtaattcaactactcactaacaataaatcacgcacgacaactaccacatcaactgatttatttatttggaacaccgcctgcctaacgtaccactagtaccccacattttgactcatgctcaagaatacatcctttattcgattatacaacagcgacctaagcgtcatgtcacccagtgcatacatctttcttagtcgcgagtataaccatattacggcatatacctgcacacctcaaacaaatatctcacgccaccactactttg

SEQ ID NO: 54457 - DNA, 903 bp, Arabidopsis thaliana landsberg
atgattttgaggaaaatttcttatgagattctgaatcctttgactgcaatattttccaggaaaaatatgttttaagtcgtagtcttcgcagagaaaaatgatatataacaagagaagtaggtactctgagagcgctagcatgaagggtaagggtgcttgcaatccgcttattctgctccaagtcagaaccgaggcgctcgcttagttcctcggaaagctgattcagccaatgctgaacctagaaatataagagaacacaacacttattctaaaaactagttctatgatatgattgaagataaaaaggggatacttttgctactatttttccaaaacgtttcacctctataagcactttcagttatgacctatcaactagagcaactgatagcaaagggaaaagaagtgcattgttgagattctactcttacagttgagagtgacttcaaagcacgaggtccgggaaatgtctttccagaaccatgacttttggggagaaggcgaccttgcacttcttctccactgatccctcttgctatattccataaccaagtactacaagtcgaggaaaaaatcagaaaaacgtattaatagacaaacaagcacgagttgcatgtctttaaatttctattatcaagcaaataagcaactattgggaatttagtatgctagaaggtactaatcaaataatgaacaatctacaatagcctacgagtccaggacaacaaaaattctatcttttccaaagctattacccagtatttactccgtaatgttcttgtagcttcgtttcagaaaattgcagcaagtcccctactgtgtcaactcccaagtcagtttgcaagctagtgcccagcttttctcccagttgtttcctgcacgttatgtctaattagagctcaa

SEQ ID NO: 54458 - DNA, 725 bp, Arabidopsis thaliana landsberg
gtcgacgagagcataaattaaaaatggtccaaccaaattataggatttttgagaaaaaaaggatatatgctagtgtaaaaataattttatcgaattattacacagattgctgcttcgaaaacagatcattttacgatgctttcatcgtcttaaattattaacatgatctacaaaaatctatttaccctaatagattggggggtatacatgagttatatatgcgtgtaggaatattctatacatttcgcatttaggtatatttaataaataaaagaaaattttagtttgttacgagaatctagatatgggtttaatgggatatataattttatcgttaatatacttgcatgaaaaatcttcaaattcataattttaattgcactcaaaagtaaattggtgattacttgatttccagagcgacttgatgtacttctggtttggttcggttttgatttttggtttgagtccggttcaatgctagctagttaaaaaaactaacgtaggaatacataccactaacatgttggttttgtggttccggtccagtctcactgtctcatacctggttttttttcaagggaaacatgtcattaaaattcccaatttatagaaacattaatttaaattctcaatttcaaagaagcaaaacaaatattatttttaaattgacttttcaaataaatactaaaattttgttgacatggtcatagagaacgtaatttaaa

SEQ ID NO: 54459 - DNA, 387 bp, Arabidopsis thaliana landsberg
  unsure (1)..(387): unsure at all n locations
acgacgacatcccnnnnnnnnnnnnnnnnnnnnnnnnnnnnnnnnnnnnnnnnnnnnnnnnnnnnnnnnnnnnnnnnnnnnnnnnnnnnnnnnnnnnnnnnnnnnnnnnnnnnnnnnnnnnnnnnnnnnnnnnnnnnnnnnnnnnnnnnnnnnnnnnnnnnnnnnnnnnnnnnnnnnnnnnnnnnnnnnnnnnnnnnnnnnnnnnnnnnnnnnnnnnnnnnnnnnnnnnnnnnnnnnnnnnnnnnnnnnnnnnnnnnnnnnnnnnnnnnnnnnnnnnnaaggggtcgacgcctaattctgaccggtaagcactttaacgggcatcggcgtgattcgggccatactacgggcccataattgcttgctcaagcattgatagcgagtgta

SEQ ID NO: 54460 - DNA, 462 bp, Arabidopsis thaliana landsberg
agaggatgttcgtctagcatctgacgaagagccgcgacgatttcatttttatcccgcgcaaattgtcgttggcgcgcgacgtcgcccaataccgcaatctgagcgaaggcccgatcaacacgacggggaacaccttcgacctcgcgatccgcggtgaaggctatttcgtcatcgagaagcaggacgggacgcagaactatacgcgcaacggcagcttcacgatggacgcgaccggccagctcgtaacgcaaagcggcgatccggtcatgtcggccggcggtgcgcccattttcttcagtccgcaggacaaggatatcaccatctcggccgacggtacgatctcgaccaacaacggtccgatcggccggctccgcgtcgtcaaattcgaagacgaacagaacctcaagatggaacaagccggcctgttgagcaccgaccaggcgccgcatgacgttcaacgac

SEQ ID NO: 54461 - DNA, 598 bp, Arabidopsis thaliana landsberg
ctgaatcctacagagcttgttagcccgaatccaaacacctgtgacaagttattctaccagtcaggattcagggatagggactttccttcagaacgtgtcttttttgtacatctaccctgttctcattggttggggtagacaactatggccttgcctaacactcatgacttcacttgccagcatggattcgcatgcttctctctgtcaagcaagatgttgttcccagggaggtcttgggaacttaaatgttattcaacccctattcaaaatggaagctgtgttccagatggcttcttatattggtgcagtgtctttcttaggttgaggtctgtcccaggggcagcttgtaaaggcaaagaccataaaagctcatatccaggtgcaggaagtgctgctgggtggatggttcaagttcaagcttactgtggctaattacacactgacttttattgtgattggtttccaagaacaccaaagaatagcacagggcagaatatgcaaacaactcgtgcaggcatgaaaagaactccttataacattagtcatggcacaaaatgctggctagacaggcaacaattatctgggccctaacaataat

SEQ ID NO: 54462 - DNA, 1349 bp, Arabidopsis thaliana landsberg
  unsure (1)..(1349): unsure at all n locations
gtttagtattatcgccaaaagacatggactggcctaatacagttctgatgcgaatctgcaaagccaaagagattgaaataacatagctgagtcaatgataagaggtagagtatacaaggtaactaaaagggtaataaaatttgtaccttaacatcgaggcaagcgtcattgaccatgttttttaactggggaatgatacccgcattccgtaatttcacatgccgatcaaatgcaccggggcttgaaggactaatgaggtttatgattgtccagactgctgctgaccgtaactggctctcgtcgctctgcaaaaacttaagcatgaaattctctgatccagctttagcttgaggaaacagttgctccataaccgcttctttatgtaactcagtcccactcgctaaattcgtgagcacatacattccctgnggaaagaaaaacattttatatcagagatttttgttaatctattgataaggtatacttttttcaattttgtcacctgtattgccatttgtgcctgtggagctgtcctcaattgcctcccaacagtatctaagataagaccatcttcatcaaatacaaactcgatagagctgatacatccatcaacaagattacggaggagggccaaagcttgctcttgcactgggggctcaggatctgagtgcaatgagtttgtttgttagttaacaaaaaaaatcatacagatgtatcatatgattttggtttgaagactcgtagaatgatttaccactaatgagacaagcaagtccttgagccttaacgtctgaataaaagagttctttacgtttaatgtcggcaaggaacatgaggttccttaaagcccgcaaagcgctacaccgagtatttggatccattgattttgacaactcagtaagctgttttatccctccatactcgataaatgatgacttcggtgatgaaaaatccattactatattgttcagagcaccaagaactggaacctggtccacaatatataggtacatatacattcaaattgactgtgccatttgcttttaaagaaaaaaaatcacatgggagactaagtcaaagaaatgcggcatcttatgtgacacagtacctggacagaggaagatggatcatgcaatagctgaaccaaaggaagcattacatgatcgctgttgaatcgtcctgcactcaaactttaaatgacatgtctcagggaacttaccacttaatacaaaaccctgttgaaatactaattacatgcgaaaatgttaatggtaactaaccttgactgatcgagcagcgtttttaagaaaatgcatgccgaacttttacattaacatcttttggtttaa

SEQ ID NO: 54463 - DNA, 965 bp, Arabidopsis thaliana landsberg
  unsure (1)..(965): unsure at all n locations
ttttgaacgaacattattaaacatttttttgtttgtcttttgacggttacatcatagattatttaactatttccttattaactttttcattatgtacatttttcaaatatatatgtatatatatatttttgcatttttttactagtatctgatttcacaatgtcactagtatgaatatgatggtcaaggaaagcactttataaagatgaggatagaaaatagaggaaacaaacttttacttctgcatgtataatactaaagttgccaaattcataaaaatattaaccaaaacatcagaaagcatttttttatgattaaacaaaaaagaaattggaaaagagcaagtcgacttaaaaaaagctgtctaagaaaattataaatttgataattaatctaccaataatattatattttcaatcatccttttcagttttgcttttaaaaagtggattgatgatgattcacgtatagactagtagccaaatattgatagcaacataccaaaacacatagggtaggtcatgtcagtatgtcgccactcactatcaagcatcaaagtgtttgcaccaaaccggtataggtgaaccaaaatgtctaaccaattcgtaaaccaatcaatggaaactttcaagtgggctaacaaacacacaacagaaatacaactctcactcagttaagacacaactctcgtagttgggattgtaactaaattattatgagttccgtttcagagcaatcaaaagaagatattcagatcagaactggaattgcatctccggagagtatcccagagcttcaaggtttgcagccatggccttgttcattggcggtggtccgcatcttaggatctgcaatttaaacatgaaccatacttagatcgacacaccatcttaaaccatatgctcctcaccaaaaatgaanttgttatcaatgttacattctcttgcagtgttcttgattttgct

SEQ ID NO: 54464 - DNA, 462 bp, Arabidopsis thaliana landsberg
gaccgtatactgtttacgctcgataaagacaaggtgtggaagaccgtgattattccatcgaaggcgcctgtaatgattttcttgcccaccctattgctggtaacagctttgtgggaacatacgatggcttttacccgcacagcatcatcgttgaagtaccgatggctactggtatcatccgctctgtgttcttttttccctttgtatcgatagtgtttgtacgctcgttcaaactgatgaaccgcggtaaacacatgatgtttttcgtatcgatctttatagccttttttgtcatattcatcacatccggaagccttttttttagccatgaattttggatctggttgatgttcatgagtaaacttagtaaccgctgatggatacagcacctgttgtactatttgtatacaatcggcccacgcatcttaagcagtgttttgaggcactctgtctctgtaagga

SEQ ID NO: 54465 - DNA, 741 bp, Arabidopsis thaliana landsberg
gtgacaatactggtgggataactttcaaggctgatggcgaggatctcaagggaaatgattgtgtccgtgcccaacctgacaacggaatggacgaggaacaaaggtatgatcaatgcatctccttatgaaaagatattaggaaagtaacttaagcaagcaaaatatagattaaaaaacaccaatttgcattattgcttcatgttggtgcttgagcattaaaaacaacaaagaattcctcgaaatagtaacatcagcgtaagggtagtttatgttagtgagtaggtgtgttcttgtgaacttcaattgatttggtctttatagagtacacattattttgtattttggctcttacccggttaagttggataacggagagccatagaaagcttttgggcatatgcatcaattgaatgtacccaaatgtgccttacctacccgtgcatgagcttgcaccaatactgttaaagtttacaagaaaatatgagaacttactttcagtagaagttgctattcaattgtataatctgaaactcaatagacttctcccttgctctgttttttgttactgcagacaaaagcgtagacgcatagaagttgctttgatagagtatcgtgaaactcttgaggaacaggggatgaaaaaccccaagaagattctgagaaaggtagaaatagacagagtgaggcttgaagtagataatggcattattcaggacctaacgagggtcaactgaaattgta

SEQ ID NO: 54466 - DNA, 1044 bp, Arabidopsis thaliana landsberg
taaattagttttatcaaaaaaataaaattctaaaaatagttttctcgacgtaccagaatttgtttgttacaagagaatacaagagtgaatttatgaatgacaagcacaattgcacaaatcaccttatcaacaacattgtgacacgtctcatattttataacactaatggtcttattaataatattgcaactcatgtaaataaacaaatgtttttttctgtgtgtcaaatcaggccaaacagtttgctccatccgatgtggctatctatatgatttaaatcaagtattttgatacatcttaatttaattattttttatatattagtcttttcttctctttttgccaacatattaaatattagtcataacaaggaattagtggaaaaatacaacaattttttaaaattaattcaataaaatccatagaataacggttgacagtaataaatttggaggaatatacattaaaagttactggttcaaaaattaagtatgcattgtataactacagtttcttaccgttgcatgcaattattaaatacgaccaacgaactaaacgactgcaagcactggaaacaaaaaaacacactgaatttttgttttctttctaaaagcaaacttctgatgtcggcaaacgatcactaaaatgctattatatataatcactgaatatcatttgcctgattggctaatttgatgtcagttaaaatcactaaatcaactctaattaaaaaaaaaaatcccaccgtcgaatagttgtcgttccaaagatatgtgtttgcgtggtgagctatcgcacccgaaaccgcgttcacgttcatgagacacacagtttctggagtgggatttattaatattagttcctttttattattatttaacttaagcgaacacaaatacctaactattatttgcttgaattacattcttaacactacctgtaggcaaaaagggcagtgttttgtaccacacggaatttgtgcagtactagtagatgtcactaataacaataatttataataatagcaacattaacgttaagata

SEQ ID NO: 54467 - DNA, 1597 bp, Arabidopsis thaliana landsberg
tttacatgttattgttttcgtttttgtcttggtttatagtttttaaaggaaaagaaactacattgggttattggtatgtgactagtgtgggtctctgacacttatagctggatcgtagtcgtaggtccataaagactagcgttacaaattatattaaagttggtacacgacattaattgcaaacctcctttttctttttgtttattccaatttgaccatgtttgaccttctgaaactactacattttccggattttgggttatatatatgcgataatgagataactggtagaagaaatatcgtggaacgttttccaaatttgtacatactaatacactattataatatgaaataattagtggacccgatgcttattgagaaattgttaggttagaaagtgatattcttttgaattgattaaaggtcccactgaacaatttgacgacttttcatataattgttaactatcaaaattattcagtggtttatcaaaatctgtctcgagtctaataagagtggctttgaattgtcttcgagattcgttctttgatcgaaagttaatgtttaagttcacacccccaataaggatgactaggaagtatagaagaaaaagtataattggcaaatgtgataacaaatctaacattgtctctattactatgatacgcgattttttaaaacattatgaaataaattcagatttgaaaaataactacgggactagaaaacaatcagcatgacttcataagaatcagtaggataaagtccaccagcgacgatacggcgaggacaatattctgtacaagagttaaatattagtatttggaagagttatataaacgaaacccgattagaaatttcctctcttacaaattctagaagaagtagacaaaccaaaaggaaattgaaaaaagaaacgaaattcgaatagacaaacttttcacgtttccaaaacaacttgtattaacatatatttgctcgtacgttttagaacagttgacgcaaataactacataaactgtgtttagattttctgagtctccttctcatctttctatttaacatacacaatatttttgtataaaaatttgttgccccgttcgcttgagttgagtgtaaaaaaacctttaaacaacaaccacattaatatcccttaaaaacaacgtcaacattcttctgtaaactaaaagttaaaactctacccgttaattagtattagctcatcattcaagttgatatcttatcattatttgtttccctatactttttaggattgaaataatcaaaagaaaattcctatatccacgtcaaattacggggtcttacattaatacatgtaatcaaggtatcaaacaaactttactacttttttctacgtacgtacgtacctacttacctaaagccagaaacacactaatcacgaccacgtacttttatttgtttgctaaaagaattcttaaaagttattaatgtgcgggaaagaaaaattagggtccagcctggaacttgctgcgttaattataattttcctacggtcgatgactctattgatctagtatcgatgacgttatacgattgacttgcaataaatttacga

SEQ ID NO: 54468 - DNA, 1114 bp, Arabidopsis thaliana landsberg
cgatctttctccattattcaatcacttccgtatctccagaacaacagctcaaatctccggtgaccatggcgacgaccgagagcaagaatcttgtagaagcttccaaggaggagacaaacaagaaggagacagaagataagaaggaggtgggagtttcggttcctccaccgccagagaaaccagagcctggcgattgttgcggtagcggttgcgtccgatgcgtttgggatgtttattacgatgagctcgaagattacaacaagcagctttctggagaaactaaatcaatttgactgatttttcctcgcattgttaatggagaaattaaacatttgtctttgtcgatttgatgatacagtgcttttgttgaacaacattttggatctctctatgaacttgagctgatttacttgtgaatagaagaaagtagtgattattatatcgaccataaattgatttcaatcaaatttgctcagagaggaaaccgtcaagtaacaaatgtaaaagagctaacgagtcaatcaaaatatttctactttcttttctgtattctgtgttcttgcttctatcagaaatagaagaagtagctgtatacaacaaatcattgattctttcggatttgtaagatggaacgagaaagcaatttgattcaattcacagatggattgtaactgcagagaaccttacacttcacctttgaggagctttcacaaggacagagatatggagatagaattctgggttcatcaagttatttaccacccacgaaaacggtatctctagcttcatttctatcccttgtatccttaccaatttgatttcacccatctccctcgacccatctgcttcttctgtatcatctatgcttctttcttcaccactcctttgcgctctgtctcccataaactcagggaggagacttttaatggcgtcacgtaacgtaaagcatttccctgttagatgatggaagaaatcagttatctcacacaaagagagactcaacaacagttggattcactctacataacacctttgggttcttttcaatgaacaaggtaataacaacaatgtggatcattaagatgaaattcttaccttcttctttgaggaactc

SEQ ID NO: 54469 - DNA, 626 bp, Arabidopsis thaliana landsberg
caggtttcctcttacacgtctgtgtcaatatcatttttgttttagactaaaccatcttcttctgtctttcctgtttctctttcctgttccacgttagtttccagaatttggtatttgtagtatgtgttgaaaaatggtttgttttggagaaacggccagaaatattctagaaattcacagccttgttttcttatttgatgataacacgtattataacgctataagacacatgtatgcgtgacagaaagattattaaatatgaaattgtgcgtactgatatatatcatgccccttataataaaacttataaagaattggatcgttacctagaatagttttaggttattataagtacggtcacacaccttggagtttgaaataatatttcccagtctacatttactgttttgtctttgctgcgcactctcgttgtccattcaataatatttttgttggtttgtcaacttgtccatacaataattattttatctgacttttaactccttttcttttcttttctttttcatatgtataattaagctaaaaaatataattaaaaattaggtcgggacaaaagaaaaggcacttactggttttttacaattatgtggttgtgacataataca

SEQ ID NO: 54470 - DNA, 1204 bp, Arabidopsis thaliana landsberg
caagagagatgaaatgacaaaaccgcactgcctactatttttgaatattttaaatagtcagatttcctccagttacttggaaggaaatgagataaagcaaagtacattttcaacttgacattttaacattttagagggtatacgactttttacctctcgattcaaataacagtgcaaacctgtagaggttaagtgccgccaggatctgcacaaacatcacacaaagacttttgttacacaaatgtggttaaataatcgatcttcaaacacaaccatgtttctccttattttcgttctgaccctctgattcttataaatagtgaaaattctggggtcttttgttatcgcagttttccttacgacaagttagaaaacaatgcaacatcataaaattccttaattagcgagaaaagcaagctactctcatttgcacagaaaggggcattttctctatttctcggtatgtatgtaatgtttgtccttttaagcatttaccttaacccatatcattgcattgcctaaagggcttatagtatgcacatgaaaagagaaacaaaacatacttttaaagaattgatataggaaaagaaaagatcaccgcatcactctggtccggaaggagtggaggacctccctgtggaggccttaagaccaactccactagctcaataacatgcgtatcaacagccgcacaatctgtatcttgcaaactgcttttgctcatgctgtctttaactagacccagaaggattgctgtctggttgatttagcaaaagatattagttgaaatgggatacctttctcttttggaaccaaatgtttaaaaatattatctcagtatgactactgaagacattaaactatgcagtttatgaatggtcaacgccaaaggtgaccatgatggcatttactattcataaagctcagtgggatacaaatatactaaccattgaaggagaccgggaatttgtgacaagggctcttaaaacgtcaaacctatgaggagctgggatatcagaaagaacctaatcaaacagcacaaaagtaagattgtaagacgagattattaatcatctctgtttaaactttaaccaagcccaatagataactaaatttctgaatgaagaagatatgtttttaaaaaagtatatgaaaagaaagaaaagcaaggcatatggactgagggtagtcattctgtgtcaaa

SEQ ID NO: 54471 - DNA, 529 bp, Arabidopsis thaliana landsberg
  unsure (1)..(529): unsure at all n locations
cactcagatatgagaatactcaaagtacaagtcacaactaaaaccttgtcaatgttgaagcaatgaactcccatacggtcataaagagcgacttggctacgcgggtttttattagcacctagaaagactggtgagattccacatgctgggatacaaactttaccatcaatatcgaaaccctgcacccaaattttttgatttcatcaaaattttgtttaaaaaacaaagcagagacatgagaagagtaccagagactcggtaacttggcgacagtattcttggtcaagttcttcatcttcctcagatgtccatccatcgacttcttctttggttttaaataaatgaaaagcatcgacatgttgacccaatccaaacaaaatcgagtggcaggtttcgtcagataattttccactatctaacagctgccgtagaacatcagccatctccgagatccaaagcttcaagatttttagggcttcttaactgtncttcttttttttttctttattatttggactaagttattatt

SEQ ID NO: 54472 - DNA, 399 bp, Arabidopsis thaliana landsberg
  unsure (1)..(399): unsure at all n locations
nnnnnnnnnnnnnnnnnnnnnnnnnnnnnnnnnnnnnnnnnnnnnnnnnnnnnnnnnnnnnnnnnnnnnnnnnnnnnnnnnnnnnnnnnnnnnnnnnnnnnnnnnnnnnnnnnnnnnnnnnnnnnnnnnnnnnnnnnnnnnnnnnnnnnnnnnnnnnnnnnnnnnnnnnnnnnnnnnnnnnnnnnnnnnnnnnnnnnnnnnnnnnnnnnnnnnnnnnnnnnnnnntcagttaggtttaccacctccgacagaagtgacgatgactacagtcctgactggagtgcagtcgtgacacagaactcgtcctgtctggtgctcctggattgaagccctcccgcggagatctcgtgcttcttcagtagcctggtagagcacatgcgtcttccacaaagcaacagg

SEQ ID NO: 54473 - DNA, 390 bp, Arabidopsis thaliana landsberg
ttcacataacagtttggattcaactattgcatatataaattagcttctcataaagcattgacatttaacactttatcttaaagaagcaacattctatagaaacgttatcgatcagacataaaaataaaatattcttcgaaacacatgttttgaatagatatataaatgtagaataacttctcttttacttatactgaccatattggttaaaagccggcttttcgttaatggaagacgaagagccaccaccaacactggattcattttgacccgacgacccgttttggtagaaccgaccacctcccataaccaaggattggtccaacataccataaccataaggacccggaggaggtaggtcatgagatgggacgtgaaacccaatatcat

SEQ ID NO: 54474 - DNA, 1210 bp, Arabidopsis thaliana landsberg
gaataaatcctaaaaaagattccattttaggaatcaaccaacatatgggcagcataaaaatttacatgaacccaaaaacggaaatcacgtttatcatgttaaaagcaccaaccaaaataagaaacaagcaataagtaatcaaatccaaactaaagtaatcgaccagacaatcctcaaaagtaaaattgaagatccataacattaacagtagttcatagtgatcgaaacagagtatatgagttgaatccgaaaatgagagggattttgaatgaaattataaaatggagaaatcttagggattgaaattttgtctaacaaacctccattgagccagagaacaagaggcttagacttagcatcttcaacggcttcaaataaccagtaaaagagagctcttcccaattgctcattagtagcaacaaacccagagtagtgagcaaaactaacattaaaattctgaccaggcaatttcgagaccttgtcctgttctttctgagacaagccagcttcacacaaatgggctgtcgccaaaaaagctatagcgattagagcgttgacgagacaacaagaccctctggttttggccattgttgttacagaaactatacttcaaagtacaatgaagatcctttaagactttaaagactgaatattagaattagaatgtgcgaaatgacgtcagaagctactcaacgaacccaaaagattcggacttttttatttcacccatcgtgcgtggtcctcaactaacaacaacctcttctcgttaatttggcgttcgatgcggttggtcgaaccgtgaaacaacttaaggaggtgtttggttcgatttctgtttgatgcattgtataaaatcacgaataccttatctaaaactcgtcattggttggagtgttagtttgtttgtttgtcaatcattgactttggtaacgcaaacgcagataaacgtggccctgcgtttggagatggttgcgtgttagtggttgaaattgtatgcaaatgtgaaacagaagcaagtgcgccaggtttcacgtgttttcgagaattgagctgttaccaagcaacatcacatttctcaacgtttaattaactttacgtttggaaaagtgatgtaataaaaaactataccatgtgaaatacggggtcatatttttgtatattatacatgaagaatcttttgtgtcgttttaattcgactaattttcgccat

SEQ ID NO: 54475 - DNA, 1081 bp, Arabidopsis thaliana landsberg
ggggattcaggagtctgtttccttttgactgaagaggtaacagatattcgaagtttttctatcattctaacattccacccttggataatagtttagtggtgaactttaaattcagatgatcgaataattatttcaaatcgtctttcattcatcttgatataacaggatagaaaggtgtttacatcaatactgacattcgaacaaggttccgttgagagaaacaaaagatccaggtctattaaatcactttttaaattgtttatgtctctgtactgattgaaggggaaatagattgcatcccaattgtcttaatatgatatactctttaagggttgaactttggaatgaactagatcggttttctgtctcaatttgagtaacaatattcccaaatcaatgcttatccctctttgattggctaactaggcacaatgacacagttgacaaaatggaggaacttctatatgtagctcctgttatgcattctcaagaaaactcaggtctgctgttttcttttgctgtgttgttatttccttcgcgtagaagaactaaatatcaccagaaacaacataaaaccataacatcttcagtgtataaatctatgtatttaatggaaacaaggattttcttctaagagaatcccaagtgaaggtttttaactgacctgctatgtaaaagtgagaaacgttgatcagttacaacttcacgcaaaccggattctcagttacttctttttgcagtaaaagttattccatcagcgtctccaaggtgtcagcaccaaaaaacagactgcagatcgatacaagatgatgatcatcaactggattcggctgagtacctgcagcataacactgtcagtggccattggcagagtactaataaccacaaccactttgagcttgaggcaagtgaaattgattttctctttgtttcttgcttacaattgctgatagaagtaaagtagtgaacaaagataattgacttattatcagctactgtactatgcattttccgcaaaacaatctcaaccttttgaagtaccttttgacttagatcccttctataaaaactctcgtatcat

SEQ ID NO: 54476 - DNA, 857 bp, Arabidopsis thaliana landsberg
  unsure (1)..(857): unsure at all n locations
aagttccgagatgtaaatatcataaagaggagaatgtgtttttgagttcaacaaacctcttcttgtagcagagtcagggtcgttaggtgtccaatgaagagcttgagaaaggtcgggactacgaagaacattagcatttgatgatgtggaagatccataacagctaataccatccattaatccatggacgtcccatctcgatgaaggaggagagaaacttgtattagtcctccaataaggctcatgcaggccaaatgaaaagtccccacttgtagaatttgatctatctgacttcgcagctacacaacagagcgaacccatactttaacttctattcactcgatagaccctttcgctaaaaacacctcaagctgacaacagtatagcttctcaataccaagcttaaacacctctccaactccataaactatgagacagatctcgcaaacacataatttggttttgttccttgttctttagcttagctcacctgagtaatcaaaatagcaccaaagtttcaaactttcaatcatcaaacaaacattacacattgtacaaaaagcttactagataaacaccacacagaaccaattcacaaaatcaaatctggaaactcatagaattaatctacctacccagcaatctctcactcatcaaacgacaagcaaagatctgaactttagtttccaaaatactttttttcttcacgaagaagattatcaaggaaaaagaacaacccacattgtcgaaattctgtaccagagattttcgttgcaatgcattatgaaattttcagtgaccacancaatgagtaaagtaaagagcttacttgctcgaaactcggagagacaaatgag

SEQ ID NO: 54477 - DNA, 1430 bp, Arabidopsis thaliana landsberg
ccaaatgtgaaatgtgtattattatagcttttggtgttttgtttatatattattgtctgaaactggatgggtcttgtttctttaaatggaccaccatttatgaatattcctatacatatatgtgtgtgtgtattatgagagcatcttttcagatgatggtttaacaatgtatgtggggaactttctctagattatgtgatatgtctccggccctattgtcaatttgctttctttttataatatgatttttatatattaatatttgaaccctcgtgcatgggaaatgagtcaattacacatatatttatatcatttttttgtcaaccatgatatcttaagtaatacttatatcattttgttgctctcacataacacattcatatactactaaggattttttaacaatatattttgataattatagaaacctaaaaccagttttataatattgtcctacagtggttacgtcggtagctatacaagttgagtttggaaagctcttgagagagaacctgaccagatcttgagttcgaatcctacaggagatggttaatttacatatcatgatctctacccaaaaaaaaaagtaaagactaaaaacttggaactcttatttgtaaacaccaattgttggtgattgcataaaacacatctcctgtaggattccaaacacatctcctgtaggatttcaaacacatccaaaaaagtatagactaaaaacttggaactcttattactactaggctttttggatgggtcgaaaaatcttaaattggccttttgtgacggcccatgtgtttgaacctttcgttgtttatccacaaagctatgattattgatctgagagagattgtacaactactacaatcaatttggttaatcgtatgtaagtaactagagctggttttctggtatcatcaataagcgaaggaaaaaatcgtacaactagaaataaccaattactttcatcggaattgaaaaaagacatcaataaatttcatatgcaatataatttggcaatttgcaaaatctacattttttatactagagtagtaacatggtttaacttcagtagtttatagaacggggacaaaatcggatcttgggggtctcggaggaacaatcttcacctttaggggtttattcgagactttctttaactgttggggcttttgtgaaataaccttcaatttccgtggcttcgttggaatatctttcgatatcggcggaggttttctgagcctcaacaccatccccgtcctctctccaccggcgacggaagaacccttcttctcatctccggtcaaaaacggatgcaacagcaactccgaagctgatcactctcctcaggtttcttgagaacacttctcaaaaacaccttgcatacacggcagagctctggaactctggtgcttttgatcaaagagagc

SEQ ID NO: 54478 - DNA, 700 bp, Arabidopsis thaliana landsberg
ccataatttttctaaaaaacttgacgccttgtttcttgtggttttaggtctctcaccttctgtcaccttttacaggatgttgttttggctagagtactagatgatgctattgttgcaaacttgaattctgtaatccatgcgaacaatgccatagtaagttttccatataaatcctatcacatacataacatcgaaagcctgcattccatattctttctttaactgaagtgtcttctccaggtagtttcattgctgaaggacgatagcacttttattcaagagttatttgcaaggttgaggtcgccttctacttctatggaatccaagaaaaatttggtatttcccggctcaagaggcatttgttatttattttaagcctcaatggttttgtattcgtgaatgacatttataaaaattattttgagagtaagagatttctttgggataaactttctctagccccaatgttgagatgatctacatgtgacaacagatggaaacaataggtctccttagtatgatatggctgttcaattgagctagtcaggctgatgtgttttcattctctttaaataggtatatttcttgcacgaattttgtagtttaagcaagagcctccaggtggtgcagcagctgcgactttttaggtatgtatttacaagaacctaattacgactggtgtttatcagttactgacttc

SEQ ID NO: 54479 - DNA, 1002 bp, Arabidopsis thaliana landsberg
  unsure (1)..(1002): unsure at all n locations
taatgttgtaattcgccgggtttgatatatatataaagtgttattgtccttatgattcttttcaatcaatacgaataattaatagactgattaaaaaaaacgaattgatctttgctgattagatattggcgatgaggtgaaatcatttaaggagccggaataaaacgttctaatggaaataaagctaatgtgtgcagttataaaccggcttagattttataattaaggtgtgtagaattggataccaaactgcgttgtcttattaataacacgaacatagacttatatacatgacattctctagggtttacacaaccgactatatataacgtgatacacacgacacaagcccatatttacacatatgatttagtaaactattctcactggacctaattcgggttagaatgtcttcnnnnnnnnnnnnnnnnnnnttccttccactccctgagggcttgacaggatgaacaacagtctccccacatagaaactttgtacgccgcaacaactcccgccaagaagatggaccccaattcccccaagaagcttgaaccaagagcgttagagaagagggataggatcggagaatcccaaatctctcttgaagaggagaaacttcaaaagtcccgctacatgcaagtagaagaatagtatggtaattgccagtgcaagatccgatacttttcccaccttggattcaagccacatgaggcctttcaacatggacatttctaggatactacgagaaaggatggccatatgaggatatttcttagaaaaggaaaagggtttagatagagttttgggtttcactttgtagaagatgaaaccaactaacccgatgtagataaaagagtgagtgagaagcacaccctccatgatggaatggtgtgggactatttcccacactttagagaagtgcaagctaaagagagcagcaacgatgcatgttatcgtgtgtattggaaatattaggttcgtctttggttggaataactgaaa

SEQ ID NO: 54480 - DNA, 797 bp, Arabidopsis thaliana landsberg
cgagcagattcatccataagaatatttacaagaagagtaacacagagacaaacatgtgaacacatacagatcaaaggaacaatagagtgatgtcaagaatttacgaacaaacaaaaacataagtagtgtttttggttacattttacaagaatccaaagagaagaaactcatctggtaacttctcttgtgttttcttcattgtctgcacctgagactctcttatacctgaaattttacacacaacaacatcagtaagacgaaattgctctgtttatatctgtatagaagaaactgttctctctgctccgtgcagcgtaatggaaaggaggaagatttatctcacctgaaagaagtagtagggctgggatcgattctctcacgaggagcaaactcattgtagaactgaacagagaccatacggttattagctgaattatttggtgcaggtgaattgtcagaattcaaactcgcattgcttgtgaagaaccctgcaaaagagaaagacaattcagggagctttatgaaacaacaggagctttgatcatttaacaagcgcgagcaaacacatagaacctaaaagaaagacctaatagaacatctgaccaaagatcttcaaagctttgaacatttaacaagcgcgagcaaacacatagaaactaaaagaaagacctaatagaacatttgaccaaagatcttgattccaatggtgattaccttgaaagaataagaagacgaagaatataaccgtcactatcatggcgaaaatgctacagcagggagacgaggactttgcggct

SEQ ID NO: 54481 - DNA, 611 bp, Arabidopsis thaliana landsberg
tctaacgacgtggccaatctagagtcaaacccaaccgcacagacaaagagaacccgaaattgcaaatcctatcttcatcaccaaaccattcttctcttcttcgatttgcagtaaaattcggaaaaaagtctcaatctttctttctgggtttctactttatcaaacgaaatcaactcaagcaatgtttcactaatatatctgcttccgtgaattctgaataaaaagatcatgaagctcacaagcttgagcaagaatgctaattccacagcaacagcagtaactgtatcttcaatacagaaactcccgtttctgtctctgtctgaaactttgccttgtccgaagagttcgagaaaacccacgtttcttccttgtaagttactcttcctacgacttgaaagtccacgactttgctatggattgtgtagaaatgagcttagctaaagatttcttattacttgttcatatggaaatgatttttttagagttcgatttaaagatttctagtactaactagtttgtagtaagatgtagacggagaccaaagttggatttgctctggggaaaatttagagttcgtgcatcagatgctggtgttggaactgggagttata

SEQ ID NO: 54482 - DNA, 607 bp, Arabidopsis thaliana landsberg
  unsure (1)..(607): unsure at all n locations
acgaatacgtagaggggaactgtaccggtgataatggcaagcagacgtggggtcgcggaggtgtgctgacgcgaggtgctatccggctctgacgagcaattcccggtcgtccgccgtgcgatnnnnnnnnnnnnnnnnnnnnnnacccgcccgaccaggtgaagctcccgcaccccaacccgaggcctaatcgccggggaatcgaccggtcgacgacggcggcccgaatttcttctcttgcggtgcgcggcggcgttctggtggtggcgagaggttggggataaagatgggagagggggaaaggagcgcgtgccgtacctacttgtatcccgttcgggaggccggggagtgggcgcgacgggtcaagcctccggganagtcgcggcggtagttgcgcgtggattcggtggagctagagctgacaaacgagccccacacgtcagagggcgtgcgcggaagcaagcgactgatgcgtgggccatcgtggcagggaaccacgcggggtgagtcgacaaacagccggccccaggtgtcggcgccgtgctaggaggtgggctgcacactggtaacgggagatgggccgaatgagtctccgggccaagtcagg

SEQ ID NO: 54483 - DNA, 950 bp, Arabidopsis thaliana landsberg
tatgtggcaatcaagaaaataacttgcaaaaaaccctggcgaacctaatcttcactaaaacagactccagaaaaagagtgttccaagcaaaatcttgatgatataagagactccagaaaacaatcgtctctctagtgagcttcacatatcaacagtgtataagtttttgactagcaaaaaacaaatatcgttcacatttgactgatacatcatacaccaaactgaaaagacagcattccccaaatcacgtatagaatcttaaatcatataaaatacattttgttctttgctttgaaatatcaaatgttagtgtgatttgtcgtcatgcaacgcatgcatataatattaatttattatttgatttggtaataagtctctttatacatgcattgaatccaccgaccaagtctactatatgctttgaaagtttgaattatataataatagaaaagattgttgtgaagagcaagctgaatcgatttggagaattggattccgatctggttttataattgttcgactacaataatgtcaaatgggatagcaagaaaataatgtataaaggttgaaattgcgcaacacctaacaaaagggagagaaagaaaacaccccaaaaacaaaaaggtagaggaagaaacacataaaagaggagtgaaagagaaagaagcataaaaagaaaggaatagaaatagagcaccaatcaatgacttcaaattcaattatttcgaaacaaatttttaaatttatagattactaaaaatcaacaaacttttatagaataaatttgtaaatctatgattcattagctaaacaactaatttttacacactaaaacaattcagagatgtgtacaaataaagacatgtgttaaataataataattatttgtaaaaaaatgagatataaaaaagtagatgcacccaattaaaaaaaaacctttaaatgcctaa

SEQ ID NO: 54484 - DNA, 943 bp, Arabidopsis thaliana landsberg
tgggtggtttttgccctgggaatagggcttaacgcaaacgcgcaacatcttctcaactcgtatactgtctgtcctttagaatcctctccacaattcctttcacgttcgtcatgttcgaaatagcgtttttcactcctactccgatcaattcatcgatatttcttactttttgactctccgagttttcgctgatagatgcaatgcagaacttgtagtaatgtggttccgacatttttaaagctttcttgcaagaatctcgaatcagggaatttgcaactctgttggctgtgaagccatttaaaaggagaaagaacacaacaaggtaaaacaagagcttcatttgtttgtttgggaagaacactagagagaatagattaaagaactatagagagttaacttgtgatccaatttataagcaaccaaaattttccaacatgaaagttattgaaacacatgctattcttagatggctcatgtcacgggtcgccactccccttaaacataaggctacaattaacgaaaattgcggtggaccgaaagccaacctcaaaaacatcacaacaacaacagttcaagttgaaacgttgtaatgatatcccaaattaaaaccaagtttgatcaatattgtaatttgtaatttccacgaaatattaaggctatatgtattaagattgccattcaaaccagtaattagcataatattaaaataactaggcatgcattataggcgtaactttttgtggtttaactgtaaaataactggaataaatagaatatacagctaaaatcttaccatttacaataaaattcatggaatacaatttttattcatccctctacaaaaaaaaaaaaaaactaatttcaaagcaaattaaaggattgaatcactagtatattcatattgcaggggaacataatgaaatgacaataatcctctctaatt

SEQ ID NO: 54485 - DNA, 455 bp, Arabidopsis thaliana landsberg
aaatgctcttgtccctctttttccctaatttcaatgctaccctcgctcctcctctagcttctaaattaaacagaaattctaattgcttaaaaacagtaataatttaactatttagattggtgtttagtccttgaattataattgcattatttccgtatttcacaccacgtttgtcgtctgcgtctcgtccttgcctccttccgtcccggttgctccttccgtatctcgtcctctctgtcctcgccccgttcgtgtcgtgcttcgctcctggctttcggggctcccagtttgtcattcctcgttgcttttctttctcgcttgcgtcctttcctttctcgtttctgcttctgtccgtgctctctgcgttctctcttgccctcttgtgtgtcgctggtcgctcttgttctgttttgtcgcttgtcgttcaccggtgtgtggtagtctgttttcccttt

SEQ ID NO: 54486 - DNA, 639 bp, Arabidopsis thaliana landsberg
tgtttgtgtgtgtctctcagtttctggatttttgattcagttttcattggatgattataaggcaaaaaatgattactttgagttctgtgactgaaattattataaacttatctcttggattgaggttaaaaaggactacttttgatttttaattagtatgaatcttcttgctgtagctgagagactctgcagtcagttcaaatgcgaaaccagaggtaccagttacagttcctgcaccggtttcttcttcgggtaagccggtttcttcttcgggattgaactatgtaactctcggaacattcagctgggatcaagacaatgacaaagtcaaggtaaaccattcagagttttcctcaatcaatactcaattatgttaataaccatatgcttgcgtgtggttatgtaatggtgttttcttattgatgcattatttttttgtttatcagatgtacatatccttggaaggtgttgatgaggacaaggttcaagctgagttcaagccaatgtctttagacatcaagatccatgatgtacaaggaaaaaattacccctgccccatcccgaagttgtgtaaggagataatgaatgagcaatgtaaagtgcttgtaaagcctaagaggacagttgtcacgatggtca

SEQ ID NO: 54487 - DNA, 312 bp, Arabidopsis thaliana landsberg
atgggactatcttgtttgacgagttgggaaaatatgacatcaacacatatttgagcgagccgcatgccgcatccaccagtcctataaccgtgatctacttctccttattttgggttaagactcaagagttctatattctttgccctatacacttggagcggaactgcctatgtgagcttttattacacattcgtaggagaccatatttgtgtctgctatactaacttgatactttatgggcatcaacactaatcttaggtgctactgctgaaatggcctttatgactaacagggttggatatccgattaaga

SEQ ID NO: 54488 - DNA, 1100 bp, Arabidopsis thaliana landsberg
gggattgaccatgaaaattgtgttcatggtaggtttaattagcgtatagctatgaacgatacatgtagttgcggactgaaatcgaatattgtccccttacctccattatatgattaaaaaaaaaacaatttgaggcatagaataagcccatttaactcctactagcctgactcacttccccaaatttcttaatcaccactggatactatgggctatctaatttattttaaaataataaataataactacttaattttttataacatttttgggggcaacaacttaatttttaatggaccttataattaatggaaaactgaaataattaaaataattattactagatgactaacttttttatacaaattaccaaaagtgaatatggaagatttttttgtttttttgtttttttttgcaacataccctcaatagtttaaaactatgcacttttattttttacatttaatgttatttctaatgatactgtattacattttaaaaaaaaaattattttaaatatagcacattattttaacatattcattatgcactttagttatgattttgtcacatatttttgttatctatctaattagctcaataattaattactcttatatttgcttaggatgtaaaatggaaacttatcataaaataacatgtaaatattattaaaaataatttattttcttatttgtcaaagataatgtacttattataaacactaaaacaaaaataagtaatcaccattaaacttatttttatgtaaatgatatctaatgattaaatggtatatattggtggataatgatgtagatatattcaaagattaaatactatttttatgtctgtacatatatggttattttaaaaattttatttatgtctatatgtctccttatatatgaatgattccaccaaaactctttttttttctcaacacattccttatgaactttgtatactttggctatatatatcaaattaaacacaaagaacaagaatgtacaataaaccattcttctgccatggatacaaaaggtacttttccttgacctatctttccttcaattaatatttaccacaggccccttaatttt

SEQ ID NO: 54489 - DNA, 558 bp, Arabidopsis thaliana landsberg
cactgtattgtattgatgatgcgcgcgcggcggcgttcttaccacctggcatacacgctgacccccgcaccagccgggaaggcgtgcgccaccgtctacgccctaccgacgctgacgattttgctggtcaggccttcccctcgcgggaagggcgggtctcacgggcaccgcggagcaattcggtgtccagagcgtccagacgctgccgccagaagcgccggtagcggtccagccactcgtcaaccgcgcgcagcggttcggcgtcgagcgaatacagccgccgcgtgccgtggacccggacggtcgcgaacccgttttcgcgcagcactttcaggtgctgggagaccgcgggctggctgatcccgaactcggcgcggacggccgcggtcagctgcccggcgggcgccggcccgtgggcgagcagttccagaagacggcgccgtacgggatctccaagacgtcgaacgcgtgcatttgatcattaaatcatttgtaacttatttaagtcaattcttatagaagaacaccggcatgcaagctgtcacgtggcgacaggcg

SEQ ID NO: 54490 - DNA, 578 bp, Arabidopsis thaliana landsberg
caagaatctttgcctaagcactcgtgtgttctacttgaagttggacttgccagaaccataacaaccccaatatatggctgagttataactgttatttggtttaggactttcagttgcatctgcgaagaacgagatgatggatattcataacacgatgtcatcaatatggctttaggtatatccaagataccaaaggtacaccacctacaccaaacttgcttgaaatgttgacatagccacttttcagttgatagagacaaaggagtttgagcaataagggttagtaagtttgctattattgttttgacccaataataagctttatcacctatcatgttgaagcatgtacagtttggtagaactggatttactggccatggacgagagcaaactggaaacggccaaaggtacactacctatttgaacccaatggggtgtttgatggttccttatctttttcctcattccaagtgaatttgaactttaatgttgcatttgagggaaaggattctgattgatcttgttgcttttccagtgtaggcatgtgaaagatgaattttacgaggttgaatcagtag

SEQ ID NO: 54491 - DNA, 813 bp, Arabidopsis thaliana landsberg
gaatcagacaattatttgctttaaatttgataaattttgcagtcctagtcctggtaaattcagtatttctttcatattcaataccatcaatttctagtgccatttttatgattgcaaaatccaacaaaaacaaacaaaaccatgttgtggtctaatgtttgttgccccaaaacagaaagaggattcacacagtcgacatttgcataagacgcaggaagtataactggcttattaagaagatttaagggacgcatttagagatatggttattgcatgaaccatgatgtagccatttaaaagtttatggttaacttaactatttgcaacgatcgatattttatcaaacgatgctactgtataagtttctcatcatatgtcctaattcctccttattatctacaccagttagacctgtcctccaattttacgctttgtacatacagcattcggcgaaagcacatgaaccgaccatttacacatcctgagacagtgtcggtcaaaataaagtaaagaactcagcacaatacacccactaccacttcctcctcctcaaacattaacacaccattattttatgttttctttattacagacgtcgtcaaaccgccgtaataactttttaataaaataaaaatccactcgcatttttattttcaacattgtgcgtacggtgcaattcaatgaacagtgtttactttcagtgtgtacacttctgcggactattacaaagtccacgtcttatcctacgtgttataatctcatatgttactgtctgaaatggaccccactacgttaaaataaaaataagaatca

SEQ ID NO: 54492 - DNA, 600 bp, Arabidopsis thaliana landsberg
actaatatagctctatacaccaacgatcgaactatcgaagaaaattcttgaataaaccggtcaaagacgtccacaaggcacaaatattatatacggtgttgaagaaagcaatagagagaggtcaacgctttcctccaatttgttaaacaatgtataaactttacgtcaaaaaagtcaaaaccattcccttgttgcttattggtcattttccgacctatacgataatcttattgtttctctacgatatctttctgttgcattaactattaagccacacgcaaagtcgttttacattaacgttagtttaattagataacgttagtttaattagtattatttctacagagtaattgctttcgaaacttttgaaaacaatgtgccatacaggttgttcaaacatggttagatagatgcataaaattacaaaaattatatagagagaatattaaatcacttaaccattgtatcatgaggagatagcttgaaagccctgacaaagaaagagggttcataagttacctaaaaaagaaagaaagagagctcataatattttcatcaaagtaaaaactcaatgtggataaccgtcacatcaagacgagg

SEQ ID NO: 54493 - DNA, 1079 bp, Arabidopsis thaliana landsberg
ctattatataaaattaaattattaacaatgtttttatcacatgcttgaattattaaaagatttttttcgtgtacggattaataaaataaaaagatttgcgtcataatttacataaggataatttcttttgttattaatgaattagtgtaatgccaaaactactgcatatgcggtgaggtgtaatatttggaagaacatgactaatgcttaaccactccatttatttatcacgcagacatatatataagaaataaaacattttctaattactctcagtgttgtatttgtattggaatcaatgcacaataagaattggatattggataacaacaaaacaggcaaaccaaccctaatggcggccctaggtttttggcttctaatattaattcactttcaaaactaaataattgaccatatatcatttgatttttaaaatatgtcgttggagtaaatcaatattttaatactaagttataattcatatggtatactcgaaattgtcaaagggtaatatggatattattattttattttattttttgttagaagggtaatatgggcattaaaatccgtcttttttgacattatataaattacatagtatacaaaacagcgtgaataatgtaattgtagtgaatgcgggaggaagaaatggaatcttcgtcagaaggtgagacaaacaagatttcccgatgcaaagccactggttcagacaatcctgatgaggactacgtcgagatcacactcgaagtgcgagacgaaaccatcaacacaatgaaggccaaggcgacacttcgttcggttctttccgggaggctgaaaacgatggttaagtcgctatcgtttgcttcacgccggctcgaccgtactaagtcattcggcgctatgtttgctcttcgagggttgaggttcattgccaaaaacaaccccgattgtagaagctgggatgacgttgctctatgatctgctaactagtcacgttgaacgactgctggccgatttcttaagctgtacatggcctgagagaggaggactccttgatcatttgttccttggttccaacaatacattttttggtg

SEQ ID NO: 54494 - DNA, 608 bp, Arabidopsis thaliana landsberg
ctataacgtcccattttatattatggagatgaagcacaaaaacagaaatatgtgcccaaactggccagtggcgaatggaatgcctgttactgtctgaccgagcccggaagcggaagcgatgccaacagcggtaaaacaaaagcggtactgagtgccgatggaaaacattatatcctgaacggacaaaaaatgtggatcaccaatggaggttttgccgatatttttaccgtgttcgctaaaatagacaacgatgaaaacctgagcgcctttatcgtggaaaaatcttttggcggcatttcattgaatcccgaagaaaagaaaatgggaattaaaggaagttcaacccgtcaggtattcttcaatgattgcaaagttcctgtcgaaaatcttttgggcggaagaggaaatggtttcaagatcgcactgaatatcctgaacatgggccgcattaaactggctgccgctgcactgggcgctgccaaggttaccgctacccgttcggtagaatatgccaacgagcgcaaccagttcggacgtcccattctcaatatggcgccatccgctacaagcttgcagagcaggccatccggatttatgctttcgagtcg

SEQ ID NO: 54495 - DNA, 809 bp, Arabidopsis thaliana landsberg
aatttcagactgtcttcttcatctttggtttcgaggtcttcctgctcatcacaatcttattcgattttccggtgcatagcttgagtcaccttctgctttttgccagttctgcctcttgttttatcaggttcaccattcagctttttcaaggatttaagatttttccctgtagtgctttctggttcattgcttacagccttcagtgcacctttggttctttttgtttgcttaatggagtctgttacagagtctttcttcttcattgtttgcatagaggatctacatccataattgtgaactaattcactcacggatcaaactttcaaacaactaaaactagaattcttatatactttcatacctgacttctggagaactactcggttccacattcttagacacaattttcctcttcttggatttctccctttgtatactgcacataacagcaaaaaactcaagactaaagctaaattaaaattataaattgtgggttatcatagaactatggaagtttcacttacaaggcagataaaggagtagactcaagcagatcatcttccttatcctgcttagattttattagggaaaccagatacattgaaattttggtaaatataaagaatggtgaatgatagaatgtaagaaattttcacctcactggctgaagatttatcctcgattatcttaaaacgttcttttttcagattaagctcttcaacatcgccatcagaatatgttacctgcgagaccatcagtgggaaaattctatataaaccagttatgcaataaatagagaatttaaaata

SEQ ID NO: 54496 - DNA, 832 bp, Arabidopsis thaliana landsberg
accgagtaaatagatggaacattagagttgtaagttactgacttactagtgtgaaagaagaatgacttcctttgttcaagaagatcattggagataaactaagataaccatatctgtatacaaactttcatgagccactacttctaaaatcgcctaaaaatggatatttaaaaagagttgtaacaaaatgaaaaactccaaatcacatcatggaagccaacagaaaacggttttccaattgtagaagtgattgagaataaacaaacagtttagacagacataagagatactgagttactgatgatgaattcaaagatatttcatgtcatcctactaaatttgtttaggggtttctcacttttgtttctttgtttttaccttatgttccaaacttcaatcttacagaagctgcaacaaggattgaagtccaagaagtatgctttatgttactttgataaggaataagaatttaagagcttcaagcgtggatagtttagtgttgttgttacttcttctcatactatctatgaattcaaaacatgaaacaaatttactgcaatgttggaagcgatcgtttgtttgtcatatcaaccatgatgtatcttataaaacagataatgtgtgcgaggaaaaaaaaaaaaaaaaaaaacacagataatgtgtgcaacttaaagtagaagttattgcggacattgcgtaattatatttgatacaaaaaggctagagagaaaaatcaaagggtcttaacgagaaagaagagatagctcggtcccaacaggaacaaaacaaacattgtctagagagtaatggtttataattttagttttaagtt

SEQ ID NO: 54497 - DNA, 424 bp, Arabidopsis thaliana landsberg
gcggagttgtcgacacgccacccgggaacggcctgcgaggttttttgcagactgccttgccggatcgactgccgaggatctatgatgagtgatggtcgacgcgtttgcttgtcccttggtcaacccttcgacctgtgcgagttgttgacggcgggcactccagaagcggtgactattgacaaaccagaagcacgcaggtggctaccctgcctgctgcgatacgacctgaagttgattcctgacagtgaagaaatttaacgacaaaacacaagctgtgcatggttaatgctacatgaacacatcaaatcacattcattaatcactgaacttaccaattgaaaagaaccggttgctgctccgcgccccaaatacacggaaatgggtcgaacagctcgtcaaagcacgatgccaccaagctgttctc

SEQ ID NO: 54498 - DNA, 1221 bp, Arabidopsis thaliana landsberg
  unsure (1)..(1221): unsure at all n locations
gtctacggcgagccacctctgaaaaaggccaattaaagtaaagcatcatagttcaaaagtcaaaactgttacaagatatctgatttttcacctttattatatttttgatagtccttcaaatcattacagtttattagtctctgtttgtattcttaccttaaagctctgcaactaaactgctaccagtggatggacaataatgcgaaaaatctatgttttgtgttcagttttaatgcacaagagagcaaaaaaacggagtatccctctgcataaggcaaacatgagttaatgaaggttcaatgtacatccacaagctataaaatagttttcaagtctatatataacaataaaatcaacggttttctcgcagatttgctactgtacgttaaaatgaacgtaagtacaagtgaatcactactaatctactagtctcaagaattgtgctttgtatctatgctgcatctggctagcttaaagagattcagtgaaccatcattcttttcttcgtagaagccttcattttctatgttgatcactaattatatagctactcgttaagtaccacattagggattaaaacaacaaatgtaaaattagattaaaaattcgaaattcgatgaacatttaatcgtatcatgattgagattcagggtattgagatatagaaagatatataattaagctaattagtgatcttccttgcttgattacaccatagtttttggagagacttcttggtcagttatccacattctcgctccgccatcgcgtaccatatgatcctaagattccggcggacgttgttttaaactgtgttcatagaatcacagttagtgatatgtgatcaaagtagagcgaagaagagtgttagttgtttctttcttaaccgaaaataaacggtcttgttttttatcttcctttgtggaattatatcaacaaccaaaaaagccaatttacagctaagcagatatgactattattttctcatgatgaagtttaattttattatatcgttatttaaaattataatactcatatttaaaatcaaaatattattaagtttccagagaagacataactctcactttttgttttgacccttacattactagtgagatctttatatacacaaactgtcatgtgaaactgtaatttaaatggataaagacaaatgtatattgtgaagtaggaactacagnatatattttcttctcttttttc

SEQ ID NO: 54499 - DNA, 1363 bp, Arabidopsis thaliana landsberg
gcaaacaggtaaatggttatgcaaagaaacgggtacctaagtagcctggggaaaaaagtcttcggtccgtaaatccttttggcttatatgttttgtttttgccttgtattattaatatacgctcatatgctctatattattatagtcagatatctgaagcctacccatatttaaaattggtggtggtgtttaatggtgatattgatatgatttacaagttcttttgctttatttggtttttatttttttcacggtctgaattcatgatttgtgtgcaagttttggtatcattggcttatgggcttgtccaatctggaatttgttttggatttctaagtttcgttaaaactgattcgacttgaattttatgttctcaaaatatctctgagttgaagaattttataaagattatatttcctaggtttagccgacatgattttgttgtccctatgatttgtttttgagtagatagaaatggttgggcagcattggctaatgaacacgaacatgttaaaaaaaaaattggacagtagaatatcatattacattttggtgtcttagatgggttcttcgtgacctttgaacacatgtcatgaccatatgcgactgtgatgaatgagactcttagctatgtggacccacaagcccaaaaatctttttcgaagcgacacgaaacgctctatgtgtttctggtttgacctcaaacagacaaagaaactctcctagtttggctacgtcctctcgaggttttcgttttggctttaatttcaaatacaaaaactgaaagagataggaagtagaattatattatatattaagtggaagataaagtatcacgaaatgtgagatgccgtgaactttatacctgcttactagatttttatgatctagttggcccttctaaatcaatctcttaaattttccctaaatattggcttttgtcacgcctcaaatttcttcttttcaaaactactgaaacatgccataaaaggaaacaaaaaataaaaatatctacctaacatttttcaactctgttaagcacatatctcatctaatccttaactatgaaagatttcaatttcatttcttagtcttctcatctaatatttattcggaatatggactgacatgaatcaatagagtaaccgtctcgtatattttaaactacattagatatttttcccttaattttctgtcaacaacaaaatttagatattttgttttgaggcaatcttataattttggttttccaactattatctttgacccgcctcacatattttagtgtagatatagtacggacaaaataaaaatggtaacggttgcatcatacctgcaaaactcagaatggcagtctcgtaat

SEQ ID NO: 54500 - DNA, 991 bp, Arabidopsis thaliana landsberg
ataatcagaaaaaaaaaaaaagacagcctaccaatcggtccataaagcacatccaacaactatctgagttatacaattatcagttggtaataaaaaaaggtgagcatttagagagatatgcaaatagagaaattcctatatatagcaaagtcttttctcatgtttatacgtacatttcctacattgacaaaacacaagaagacgacttcaatggcttctaatcttctcctcatcgtcctcctcgtactcgtgtccctctctttagcttctggatattctttttccacgagagatgctgtctcaaagtaagaacacctcaaaaccctactttttcacttgtgttacgttcttaaagctgcaactaagtataaacatattgttctgctttctctctgttttagacaagacgatgaatcctatattatgactacgagtgatcaagaatcttcaatggtcgttcttgaagatgtagtaaaaggtcgtcgtcttctaaccagagtcgttcgctcgggagcggttgtgaataaatcaagttcaaagagctctccaagcaaaagtaaaaaaaaaggttttctaaactataaagaaagatcgcttaatttattatgttacgaccagttattattaagccttttcagtacattagttttgatacagtatacaaacttaaattgcagattcgaagaagaaagaaaaggataagaaaataggatcactggctggagagctaattcatgttattatgtttggaccatgtactcttgtaggtacattaattttgatataataaacaaacttggacaaaattgcaggtgcgaaaaagaaacttaagagctttaaaataggagcattgactgttggacttggagccttgatcgggatcatcatcgcaacagatgtgggtatcattgtgatcgtcgttgttatatgccttttattagtttgctgtcttaagcacaaagcaaaaaaggctaaaagttactgaacaagg

SEQ ID NO: 54501 - DNA, 666 bp, Arabidopsis thaliana landsberg
caacgcagcgagttagggtttcggagagagctagggtttacgaggagagagtgacggtaaacgattcaccatgaatctaaagagcgaaagataatcggagagagtgatcggagctgagctaactctttgattttccgcaggaagcaaaatcatgaaaagaaagaacagctagctacacgaaacagatcgttgtgtagagtaccaatcacctacgggcaagtgcatggtacaactatatttgggccttaatgggctcaacatgggctataaactgagtttgagaaactttataggcctcaacttttgaatgtcaagcttttatgttttctttttctgtcttttctttcttttctttgatcgatcattttaccttagccattaagaacttctaaatcttttaacacacataaaacataaaggatcaagccttcgattgtaatttacctttatttcatttgtggaaagaaatcagcaagaataaagagtttttgtaaaagcaagtaacctgaagcaaaggatacttcaaattcgaaatgaacttttaaaagggtatggtttgcttaatgatggggataatgttaacttgactttcaaaaaaggttataatgaaagtgcttaagccttgaaggagacagaaagggttgggggaaaaagcattaataggct

SEQ ID NO: 54502 - DNA, 940 bp, Arabidopsis thaliana landsberg
cataaatacatacatatatgttcacagtttgagattgtgatgtagcaaacaatggaagtgacgcattggtttctccacaagagcatatcttcctttgtcataggcttgagattcgagacccctctgaacactctcacacaacataacatcttccatctgattcaccaaaacttacacaaacttatgtctctttaagcggcactagttttggtataatgagattcattcatttatcgtacctgaactctatcgctttcttccaaacttctcttgatgaaagcttcatcatcctaaagccaaaagaagatttcaaagactccatgctataaatacagggcgggacaaatataggttaatgttgttggtttgttttacctttaaagaaggatcaagaaaataatcgaagacaactttacatttccttggtcctaaaggtagcactagattggtgtccatccaaggtccatacctattaaacataaaccatgcagagtgagtcgagtcaagttattggaagttgagttgagcaatggacttgatgtatgttacctatttatcatgaaatttgggtagacaaacgcgtatagagcttcagatccaagcctatcaaaaccgtcttcgccaacctttgaaccacctccacattcttggatactaaccttttcgaatatctgatatcttaaaccataaagttcatcacaagaagcaactaactaaagattagaatcatgtgctgaaagtcagattttggccctagttcagattcaccaaaagaaatataccgttgtagaataggtttcgagatcaagtcccgacatcaaacctttatgtgcataaggtacatgatagccaccatctaagtagttatcacagaacacctgcaaaagttttcagtgatccattcatcaccagtccttcttattctgtttttaagagggta

SEQ ID NO: 54503 - DNA, 1324 bp, Arabidopsis thaliana landsberg
taagaaacaaggagattgcacgattatgattcaatgaataatttatatcttccgccgagaaagcataaatacattgatcgatccattcatagtgcccgacaatcttgtagtcactacagacaaattaaaataaacgagtaaagcataaaaagcacatggtcggctctataatagcaattctcaaactttttcttttacatatgcatatcgaagagaaacatacctttttctttccaaaagtgtatttttccaaatgtaagtttccccgattctaaatacagaataatcacgacaatggttagattttttgaaacttgaaagtatattcttagataagtgacatttattgaaaaggttaagagatgatgatatgagtcgtatggatcttatttggactcacaattataaaattacttttgtcaagagtaatcgttattgaagttaccaatgtaagaatcgaatttctagaagaggagtcatttttaggtacacgtccgggtcagtcaacgcttacttagtttgacttttgactctctagactataacatttacaaagtccatttgtgtttcctcttttagccatctcataataataacttgggaaatattgggaaaataagacgaacgaatagtaataatcctaacaacttttcttatctcaaaaagaaaagaatcgaaatgaagccaaaatcagctaattgtttcataaacaaagtcacaaacatatatctacgcagtctctctgtctgtctttgagttggctcatagactgtgtaatgaaacttttaccttcaaaagtttctgatgttcgatggatgcactctgcaacggtttagcctgttaaaggaaaggagtatccacgaaggtacttggagtccactcccgattcacgagccaatgccacacgaccggttcttgcaacctgtgattgattgttcataataagcgtcaacacgatgcataatctgaaagtagtcatggcttgtcaagcttattcttgttctacacacaaccagaagaagattcatgtaactaggtccagctttggctattgattttaccacacagatagaattgactactctgtttctaagtggtatagactacaactaaattttgggactttatccgaacaattggagtatcattatcagaaattaagaattcacggggttatgcattcactaagagatgaaagtagattgcgaaacaaacctgacatataccatagggctccaataacctttgcagtgcaaccatcttgactagatccccagttagctatacccacagccaacaaatttcagcactaaatccaaaacac

SEQ ID NO: 54504 - DNA, 1257 bp, Arabidopsis thaliana landsberg
taatgtctcggccgcaatgcagccacacagagttttcatatatatggaatcttaccatgtctttaaagccagagattaaaagatgacccgagttatactaacccattagaagactctgaagtcgtctccttatatagttagtctaaatttgtatttttctgggagaaagtgacaacgtgaccctgtttgttatatgaatcactcctacctctttatgatctttctctttatcttgcagtaagcttctggattgggtttttatcatttctttcctaattacggtttcactgttgtagcccaactatacccagaccagagagcaagttgaggcggggtttaagcggatatagctaaaacttatagataaattagtgattcattgattgtaggaataccagaaattttagttcatcgcaagtttattagtttactgttgctgtatattcattctctagccaaaaaacaattacgcttgaaacaactttttttacatgtacatcatactttatatttttattttatttttttccttataaattcattgatatcaaaacaagattacaaagtcagtatacagtaatttttggaaacaatttcttacataaacagatatatacgccatataatgagaaatatacaccaaaagaagtaaatttgacgatgtttcaaataagtcttactcgctataagatttttaaatcctatattttctttctctttatccgatttcgctctaacgcaaattgtttgcgtggatagcttttcttggcttgatttccaaagtgcacactgcatggttaaacctattgattccaacataagttctgaggctatgactatcggatattcggataccaacacttccgtaaccgagtctctctatggggatttgactttgactttatgatctttgaaatcaacctttgaaattgtttccgcttgttaactatggtttcctccttcatcccaaaatgccccatcttccgcagttgttgcctgatatatttttccttgatcggaaatagaaaaatacaaacccatttctccatcctaagaaacggttttgggtttgcaaattcaaacagtttctatcaatttatcagttatggactcaaaagttgttatgtagcattggttattgtaagtgattgctatttctatagagaatttggtaacttagctttttagtttttagcatgtaattgttgtgtagagtgattcggttactatgatatgaacccatttacagtgctaact

SEQ ID NO: 54505 - DNA, 660 bp, Arabidopsis thaliana landsberg
ccatatgcatttttcctaaagaaaataaaaaagcagaataaatatccacgattatatacaaccgtgcaaagaagattcttttgtttcatcggcaaacttgttttactcgcaatacatattactctttgtcacctctaaagaagcttcgaaactagcacttgttgtttcaattttcgtacatcaattctcatcaaaagccgactcaaacataaaccgagagtttataaaaagcagatgtcagaaagactagaagatgactttgcaatcgatgaagagagatcctcctactatggcggagcctccataccattcatatgggagtcaaggccaggaacacccaaaaaccacctctgctccgattcttctcttcctctgcctctcacaccgccgccctcatactactcctccgggattttgtcgacaccaaagacgcaaagcaaggtgagatcaaaactaagtaagtttctgtccttctccatgttcagtgatctcaggaggagcaatcacggtagcaagaagacggcaagctcatcgttttcttggtcttctacgtcatcttcatcttccttttcctcctcgccaccacattctttgaaaaaacgtatgagtcacgacaaaaaatcgccacttctgtacgctacccccccccaggatgagctt

SEQ ID NO: 54506 - DNA, 1069 bp, Arabidopsis thaliana landsberg
  unsure (1)..(1069): unsure at all n locations
ctacaactactaaggtgacttttgttggagaagaaacgtagacgaaaagatcacgtttgtttcttttttttgtatatacatgaatgaggtgaaatgaatgtatatatgtcgtataccttatcagaacgacgccgttcgtgaatctccggcaaaaactgacggagcttactaacgaggtcgatcatctggtcatcggagatcctcgaagcattcgaagtttgtcttgatcttctgttagacattttcattgtttttactttgtgagtaggtgtaacactacaatgccgcaagaaattaacctttatgttgtatgctttctctcttttctagattagataatagagaagagattgagagagaagggtttgttattaagaagagagttttaaaaaaaaaaaagtgagagaagttatgtagaaggtttgtgtttattctacaggttttatatttgtgttgaagaggtgtgaaagaaagaaaaagaagagcaacgaaaagagaagagaagagaaaattgtgagaaagtgtttcgggtaatagagacacttcgagatataaagaaaatgagaaagtgataagagagatttaaagaggtcaaggaccacaagggagagagggaagagatcaataaaccttgacaatgatgtaatgggagagaaagagatttgaatctttgataaaacctcaaacaaaatttgtttaaataaaattatatttttctttatctcatctacatagagtaacatagattagaaatgaatatttataataaaaagtactcactaatttaaaggaaaacttatatagctttatcatatattattaacttttaaaaactatttgtatggatataaatcaaaatttattttgtaaaactagtaaaagattaataattgaaagaattgtatataatatagttatgctgaataatggacgaggattttggacattttaatggagaaatagatgaaaaagctgaatgttcccaaagctggtgttgaagttgaagtgggattaagaaaagtgttccatgtngagctaacaatgtggcccttatgtgcatgtcactaaa

SEQ ID NO: 54507 - DNA, 219 bp, Arabidopsis thaliana landsberg
gcatacgtatccgaccaggtcatatgcgactccaacacaatcaggatgcatgctgcctgcgcctcgcaaagcattcgatagtgtagcggtagtgcaaattagtcattggctaagtgtcatctaacacggatacaattctaacgcgtagaagatccggttagggtagacgttgtgtctacacattctatctgatgactaaacgacgcaatggagtgctga

SEQ ID NO: 54508 - DNA, 604 bp, Arabidopsis thaliana landsberg
atgatatgagatggagggccatgattacatcagaatgacatcgaaccggtatgcacgccaagccattggatttaagatctagggtccatgttttaaataaccgtgatcagatcaccaccgcacatcagccatcccatggtcgatgatgcacctcgaatcggtacgcaccctgcactaatctcaaccgtccctaatagaatcaatgactccaatccatctccttcatcccgcaggcaggccacggtggcgcgccctgaccgtggcggcgctttcgccggagatggcaccacgacccataataccggttgtccgtgtgcgtaatatgaagagtaggttgaggcaaaacagggaagtacacccttaccggtggttagggtgatggcaggggtactcctggggaggtgcgaatccgaggggaaggcctatactccgatgagcaattcgtcgagcaccagcgcacgaccacacccgcgcagacctcgaaagcaatcccgaaggtgcagtggagctccggaccgccggtgactccaatcgacggcgcaggacacgacacgacgatgtcgaaattcccgcgacacgagatctacggctttgaaagatgctg

SEQ ID NO: 54509 - DNA, 571 bp, Arabidopsis thaliana landsberg
  unsure (1)..(571): unsure at all n locations
ctctaacggccactaaacagtgttttaatctagtccaattgtaatctctattgtaatcaaattgccattatttaatgtacatttggtaactaattgtaatctgaattaggctatttagtacatcttttacgtacaattaatctaaagttatccagaatgagaaaacgatcatcaaacaaagtatagttaatattacatgtacagatgataaatgtctcctttcgttctttgtttttatttggcgataatgtgccctataattttaaaagcgcatgctttcttcttatcactcacacgttctcttcgcactgtcactcacattttcgaggagattattgctaaaatgtttggaaacaaacacaataatatatgttgcagaaaaatctctttaataatcgaccacacatgtctccacgatttttttgtatgattttaactttttcttcaaagattcataaccttgctgtccttccccacaacccttttaagacattctatatttatatccccatgttttatcttgatatcaccattttggacctttatgacatatatngattttttttttttt

SEQ ID NO: 54510 - DNA, 657 bp, Arabidopsis thaliana landsberg
tgatcttatttaattactataaatcgattagataaaggcccataatgatttggcccctctaccgtccgtcaaatgacaagtaacaagaaacagcagtgaaccaaccggtccaactgttaatctagattttaccggtctatttagttcggtttaaaactataccttttagttttctttttcactcttctctacagatttattttcctccaaaatatgaatcttcagttgactctaatctccttactcttcttcacttccgccatagctgaaaccttcaaaaacctcgattctcatccacagttcccttgtaaacctcctcattttagctcttatcccttctgcaatgtctctttatccataaaacaacgagcaatttctctcgtctccctcctcacgctcccagagaagataggtcagctctcaaacacagctgcttcagtaccccgtctcggtattcctccgtacgagtggtggtcggagtctttacacggactcgccgataacggtcccggagtttccttcaacggttcgatctccgccgctactagttttcctcaggtaatcgtatctgctgcatctttcaatagaacgctatggtacgagattggatctgctgttgcggtggaaggtcgggctatgtcacggtggtcaagctgg

SEQ ID NO: 54511 - DNA, 555 bp, Arabidopsis thaliana landsberg
aggatgaacaatatgatgtaaggtccattcaaatgctgtctttgaaatctccctagatgctttgacagcaacaggaaccttctcagtcccattagaacctgatctcttcccctgtttctctctgctcatttaagaggacttttgcaagaacaattctctagattcctcttgatttctaaatgatccttggagataaagtagcttctcgtagagatagattctgtagatatgattgcattattatggcaagttggaaatcaagacaaaatcagaccaaacacacaatactttgtttgcagatgcatacaaaactcaatagacatgacaagacctctcactcactgaatcacataaacttcaaaacagaaaatacaaaaccctgaagtaaaaaatcctacttttgagattcccaaccagctattgggggcaaactcaatccaaaaatcccaaagatccaaagagatgcttatctctcatatctatccctttgtattcaagttcaaatcactgagtcaatgcttttcaagacatagaaaagaggaaatgatgggcaca

SEQ ID NO: 54512 - DNA, 488 bp, Arabidopsis thaliana landsberg
ccgagcgtgcggaccggatccgggcaacaacatgaatcctttacatgtcttgagcgatctggtcatagccgggccggttggccttggggccgtcgaggccaaaaccggtgatggacaggaccaccaggcgtgggttgagttccagcatgcgcttgttgtcgaagccgatccgggcgagcacgccggagcggaagttcttgcacaacacgtccgcgcggcggatcagctcggtgagtacggtccggccgtcctcggacttcagatcgagcgcgatcgactccttgttgcgattggccgcgaggaagtacgacgactgccgctgcccgccgtctattgcttcgactaacggcggtccccaggcccgggtgtcattgccggtgccgggtgcctccaccttgatgacccgggcgccgagatccccgaaggtcatcgttgcgtggggcccggccagcgcccgcgttttatcgatcacgaggtagcccgacaac

SEQ ID NO: 54513 - DNA, 850 bp, Arabidopsis thaliana landsberg
ttagtatactgatacgtgaccaaaaaaaatatgaaaatctttggctgtttacttatttctcgatcggttttgcgtgtgtaaacacactgatattaactttatgacaaaacaaagttatattccaaattaaagtaagaattttgggaatttttatatatgtgacaaaaaaatccgagatctcaacgtacaacataatgatagaaatatgaaataataatatataatagagttacaatatcattaatctaacaaaaaaattgatcactaaatggcgtaactattgatatgctatagagtattattcaacatactaaaatcttcatcgttgaagaacatataaaaaaaaaacaacggatacatgataatagctactcattagaatcgggcgtgactcgtattcggtcggcggcgatacagtaattccagaacacaagaaagataattatggccgcgaaagaaccaaatatcacacaactatatattacacccaaaggaagcatattgtttcttatttctccaccccaccaaaactttgtttttttcgtgtctccttaacaaagttactagacaaaagttgttttttccctttcttatttgacaaaaccctagacaaacggttactttgcaaaaagttagttcgtatatctatctcataagatgagtatatatataagtcctaattgccttatctctacaacttgggaatcaaaattaacatagaatagaagaagataacaaaaacgaaaaagaaaagttaacataacacaataagatgcatatatacggttctttaatgtgctaggcaccgccaatcagctatttagcatatatactatcttactctccgagg

SEQ ID NO: 54514 - DNA, 523 bp, Arabidopsis thaliana landsberg
cctctgtcttatgcgggaaaatgtttatgtcgatgaatttattttttcatcataaggcgacgtaccggtgaaggtcttactgatattagatcttttcttcagcgtttcttccagcttattataaaagccatatgaagctgccagcttttgtttttgccacttcttttagcatctgccttgtaccattcaaaataccccgtatctgttcattctccctaggtgatgggtaactgacatttgggcttcctttgccagcacatctgcttcaaagcggatgtagatctgctctgccacatcgccacctatacctgcattcaggcaggttatacgcctgtcgggaaacctggccatatttatacagccagatgtaggaatgataatgcccaccaacttgaatgctgttacccacaaaggctattcggtcgcctgctttgaagggttccggtcgttgctgatcgctggcatggcaggtaccgcctaccattaaagtcagcagtagttttgctcggttcatggattcatt

SEQ ID NO: 54515 - DNA, 390 bp, Arabidopsis thaliana landsberg
gtctaaagaagggctgctcctttgtaggtgtgctgtgggccttgaccaactgaagtaaaataccgtccctagcagacggattcaaaaaacacgcctgcacctcgatacaccctaaggttcataggccgcaaagatcattatagagatgctgatactcatcctagctagcatcgagcggactgggcatgcaccctatcaatgtctgacagcaatgacgggggatacagattacctacctagcagggtacttaaacaagacctagtgacacgctcggtgacatgctacaaatactgaaaaagagtcatgagagtagcacattatctcatacttagatcaataaattagtcagcgtgcgagatggaccactatgtatatctatgacacactga

SEQ ID NO: 54516 - DNA, 412 bp, Arabidopsis thaliana landsberg
  unsure (1)..(412): unsure at all n locations
ttaaaagaggcaggggttataaagttgctctaatgagggcatatgtacttgccagtatcaatgcccttaaaaaaaaaataaaactatgtaaataaaattatctgtaaacattcccgtccttcgctttccatgtctcccctctccgccttaaccatttgccccgtcttgtctctgtcnccccctncctcccccttcctangtccgtccttcgcttccctgttttcctccgtccgtctggttccccgcccggcgttgagttttgctgccatgtggtgggtcttttcgcttgggcagtgacattttgctctcttaattctgtcacgcgcctgtgcccgggacggccctgctctctgtttctctctgtctgctctactcacgtgtgtctgactccgatccgatctcgttgtccctt

SEQ ID NO: 54517 - DNA, 1242 bp, Arabidopsis thaliana landsberg
agacagagagagagatagaagatggtgttaggaaagcgtcatggatcactgatcaagagaacaactagcatgaagatgatcacactcgatacacccacgatctatgacgcatctcagccgtccgatcatctaacctttcatcaacaccctcacaatccgatggtggtgatggctagtaactacgatgatttcttgaagacttgtagtctctgcaatcgaagtctctgccatcatcgtgacatttacatgtataggtacgattttatttactttttattttgtaaattttataaacgtaattaacccttcacacaatttgaaatgatatgttttgatcatggttgtatgctatatagttttaatgaatattttttttgtatatattgaatcgtttttgtagagggaacaacgcattttgtagcttagaatgcagggagaagcaaattaagctggacgagaaaaaagcgaaaaccggcttcgtatcatcgaagaaaccaattcgtatttagttgatcatctatgatctaaaatgataacgatagtttttccttatgagtaaaatgaatatgtttttgcgtttcgtgtacaagaatgatgaaaataaagagagaaaaaatgagactaaatgagtgtagtgatcatatagtaatgggacttcataagcatgatttgatttgttcgtgtgatttgtttctttgtgatgtgtaatatgtaatgtaatatcaatgttgatgtatattcaggtggtcttcttagttcttactacttgtcgtaacatataaagatatttagtaaacgtactctgattttataatatcagatggaccgtttcttaaatggacttagaaaatagaatttgtgatagtgatcagttctgagaaattctataaataattgtatcgaatcttgggtgacgaaaaccaaaagattttcctctctgttttttaagttggaatttccagttggccggctaaattcctccactattaaaaattacaaaataaataataatcttatttctatagaatgattatcatcagttcttttcatcaaataaacagaaatttatatatccattctacagttatgacaatctactaaatacgaaaagtcttagtatactaataaccgtgtattcaatattggttattggtaaattcaaaaaaaaaaaacatacactaacaatattaacaaaatgcaagttaaagagtttccggatagccgaatgctttacataaggtg

SEQ ID NO: 54518 - DNA, 726 bp, Arabidopsis thaliana landsberg
tattattcaaaacttttaattgcaaattttatattaattgacaaaatatattgcaataaaactgttcagaactataataggatttaaaaatgttaagaaatttcgtatttttttccttcattagtagtgtttataatagaaaaaaatcaatcaatatttctaaagttgaaaataaaataacagtgctacgatatattttaaatacattttattaaaatatttgatctaaacagaagaaattgtgtggggaaaatcgacgagagcttatcaattcatctcacactcttcttcactctcttctctctacacacacacacacacacacacacaaaatggattcttcgaatgttgaagaaaacctaaacccagaaacaaaatccgcagaagaacaaaacccacttgccattttccattcttctctaccaatcgcatctctttctctgaccttgttcccatcctcgactcaatttctcaaattgtttgctcatcatccaaacaaggttaagatccctacgcaggcctcttctctcactcatctctctctttcttctgtctctccttttccttcttccagaatctctttcaaatccaccatcgctgctaaccctcttcaatcccctctctccatcgtccctcgacgacccagtgatccttcctccgccgccgccctccgacgtgctgctgtcgcctggttccgcaatgacctccgtctccacgacaacgagt

SEQ ID NO: 54519 - DNA, 502 bp, Arabidopsis thaliana landsberg
gctgcacctttcgcagcggacccaaaaccattataacggcaattccaatatccggattgatgggatgtttacttcctatacgccttattacaagctcaacttcggcaactggatgattgatggaaaaaactggacctatacttccaaagtaactgagttcagcccattcggccaggagctcgagaaccaggatgcgctcgggcggtattcggccgcaacattcgggtacaggcaaacctttgccaccagtgtggccgccaatgcacgttaccgcgatatcggctttgacaattttgaagattatggatttagtccctgtgccgacaaccatttcaaatttaccgactatgcaggaaacgtttcttctgcacagtcacattcgggattgaactccatcaaggtcagcagcggaacagtggtgaaaatggccaaagcgctggaaatttgtgatccgcttggttgtaacattactgtttcaggaagccgcaatcacgtgatcagt

SEQ ID NO: 54520 - DNA, 598 bp, Arabidopsis thaliana landsberg
tcggtgtgaactatattaaccacgccagttcccgagcgattgcatgcgcgcaccgtagactcgagaggtctctaaagctccctggcccgtttgtttgaacactaccgtgcggtgatcggggaattaagttcgtcaaatccagtgctctgccgtcgctgtcgatagatgggttgtggagttctcacggatcgattgagcccatacccgagttcactgcgattcggggttcacgtgggtaccatcgccgtcgccggtgttgcgccaccatggccgagctggcactgggtcaccggagtccgagcgggcagtgtcagggccgagtgcttgtaaaagagtggtagccgaggggttttagcgaagatgtcagagacacaagcaacagtggctgggagctcggattattttaacgagagcgcaaggtcctttgggcaagatggccaaagcgggcgcgggctcctgggtttgggccagctttgcatggttgttgggttcaccacgaatttggggccaacactgttgacagccttgtcttttcttttatcaagagctttataattttgttagaaatcacagaaaattcaaaaatagttagggtacg

SEQ ID NO: 54521 - DNA, 1581 bp, Arabidopsis thaliana landsberg
atgtatgggatgcgttggatttttatatatattatcgaattttagttttaggcacctgaattgtgtgtatggagggtgagtactcggatccttttttttcctactaaatgaataaaagttttactagaactgaaaacagaaattagacaacgtcgataaagttcgagatgactctttccggacacaaaattggcaacagatcaaaataacactttccggacacaaatcctagagcatggaagttatatatataaatctcggtactcagtagaatcagaatcatactgatttaatatatagataaatagtcgaactatattgtgagtgtgtgttttcacttttaacctagttgtagaacttggtaattagtacctgtaacattttgggaccaaaatcacattttaagtgaaacattataattaatggtcccagaataacaaaaagttatgttttatcgcagctatacaaaagaaagtcgagacatgtatataagtcatatcatcattattggaatcttctctatagtttgttataacgttgttcacattattttttggttgtatacattgataatatttattgtatgtgtggcgctagtgtggatgctttaaattgatcaactactttggaaaaagtcgggaataggcacggctcgtgaacaagattgttgtattgaacaactctaagtacagcgaccgtttatgttcatgatttgacagtatatcaagccaatttggttaagtgatgatagtatttgatctactatacaaaacttcttttgatcttctatgtagaaggaaacgttgtataaagaagaaagtaaatgttaaatattttgagagaaaaaaacgtataaaagttccaatccatttaagaagaaaaagaacatttaaatgttgacaaatggttgaatttatttgtgatttcatctctgacatatgtatctgattcccaacgtatttgtaattaatgtgatcattagaaccacattaaaatacagtactacagtatgtatcatggtttagcgtttctgcaataaatacttccatactgttatctatacccaaaagaaaatattggagacaaatttgactttttctttttgtacatttgacttgttaaaatagaacaggtagtataattagtgttgcgaggatgaatttgttttttaattaagggatgagtttatcaaatacacctaaaaatcgaggttgttgtagttccaaaatacagtggactaaaaaggtgacttcacataggtagacatctctctgacgcataaactttaacgttttaatttggaaagtgttttgattctcgagcccaaactgatgctttaacacttggaacttgtaagtggtgaagagaatctttatctaataaactcagggtttactttgctataaacttataaccctatttttataaatttgttctaactaatgtagacaaatgttaaaatccaaagaaaaagaaactccatgatgtatttgttctttaaaaaatataatgtgaatctaaatagtaatgtattttgagaatttttacctaatttgaatcttatgaatatatatttttctt

SEQ ID NO: 54522 - DNA, 505 bp, Arabidopsis thaliana landsberg
  unsure (1)..(505): unsure at all n locations
ccccccccccccccccccccccccccccccccannncatgcaccccccgcgcgcttttttttgggggccccccccccccccgccccccgcccgttttttttcgggggggggccccccaccccccccancnnnnnnccccnccccccccccccccccccccccccccccccccccccccccccccccccgcccccccgccccccccccctcccccctccccccgccgtttttttttttttttttgttttttggggnnnnnnnccnnnacaccccgccacccgccccccccccccccccccccccccccccccctcccccccccccccccccgnggnggcgggcccgccgccccccccccccccccccccccccccccccgctcttcttccccccccccccccccctcccccccctccccctcccccccccctcgctccccccccccccccgccccccccgccccctccccccctactgtccccccccccccccccccctccccccc

SEQ ID NO: 54523 - DNA, 554 bp, Arabidopsis thaliana landsberg
  unsure (1)..(554): unsure at all n locations
gtctttaggaacaagctcggccgatctgctccaccaatcttcaaaacacatttcatccagtcccggggaaagggcagccaagcgcccaagcccacatagcaagtcggtcagccgtccaacacctattatgtgtaaccaactagaggaaaaaacggcacttaggcggcgccaagtcctccagattctcttgaaggcagccaaggagnnnnnnnnnnnnnnnnnnnnnncataggcagatttggcagagtagagaccattgctagagaatctccaaaggtgcttatctggaaccccaggctgaagagcgaaattagtgatagcatctgtaagagtgaggaaatcagcaatgatctcccatgtcaccatttcacaattctgttaggaaccatactaaatacatgaggtgccaagtattgaatcctctgtcccaatatccatctatcatgccaaaagagagtggaccgcccatccccatctcagaagccattgctactgagaataacactccaaaaactggtttgactggataggcaaataagccacggtttggatgt

SEQ ID NO: 54524 - DNA, 543 bp, Arabidopsis thaliana landsberg
agcatggccagtcttgaagataactgtaacattagtcttattagtctcttctcatatctcctactctgtgcatgactcattgaagacagaggccaacttcctttcattgctaagatataccccaacacttatatttcatatacttcaatgaaatggtctgttattctattagttatgaagtcagctgagtatacatctttggacaaacttttcaactgactggtctactggttttcacatagtgctgcgtggcttattttctaatgcttaattattccttcaatgatactttgcacttgaatcctttccatattttagcacacaaacaaaatctcactatcatatattattttcaaatatttaagttctttagcttctttcaatctttttgcaaattttaatactctcttcagttataagcatcattatttgctaactgccaattatcaactgtatttcatatgccacaataaatagcactttagcaactggtcgagtctctttcaaatactatggctggaacagaaataaaaaccccacaat

SEQ ID NO: 54525 - DNA, 104 bp, Arabidopsis thaliana landsberg
tgagtttctgtcgtgtttcagcgagacttgttgctatctcatagagacatgcttgtggtctacagggatcctatcagctcgttccgacctacgataataagctc

SEQ ID NO: 54526 - DNA, 924 bp, Arabidopsis thaliana landsberg
ttcagaatcttcagcatctttctgtagcaaacatcggtgtttcttctctggaacagtttcctagacttggtaatttacagaagctaatcttatctgataatcggatcactgttggtttagagtttcttgttgaagctgggcttgattcgttctgtgatttggatttatctaataaccggatccagtttgttgaggatctagctcctttggcggagttgaagcttgtgtctcttgatctgtatgagtgtcctgtgactaggcttaaggattatcgatctagggtttttgggttgattaaaactttgaagtatttagataagactgatgctgaagggaatgagaggcctgagtctgatgatgaagatgatgaggaagatgaagaggatgaagaagaagaagaggaaggtgatgaggaggatcctggaagtggggagattgatggagatgaaagagcagaggctcctcggatgagtaatggccatagtgaaagggtagatggtgttgttgatgttgatgaggatgaagagagtgatgctgaggatgatgagtcagagcaggctactggagtgaacgggacgagttatcgggctaatggattccgtcttgaagctgttaatggggaagaagtaagggaagatgatggggatgatagtgagtctggtgaggaggaagtaggggaagataatgatgtggttgaggttcatgagattgaagatagtgataatgaggaagatggggttgatgatgaagaagatgatgaagaggatgaggaggaagaggaagttgataatgctgatcgtggtcttggtgggtcagggagcacaagcaggttgatgaacgcaggagagattgatgggcatgaacaaggagatgacgatgaagatggtgatggcgagactggggaagatgaccatggggttgagg

SEQ ID NO: 54527 - DNA, 371 bp, Arabidopsis thaliana landsberg
aacacaaatagaacgaatgactaaagcattgggtgctttggacttaaagctaacatggggatggagtaccaaatgttattttccttgacagtctcgtcgacctaagttggttttcttgattggctatcatctgttagataattaaaattctgataaattattagacaatctttggttgtgtatctgttacatcgcaaatcatacaaacatctctaactcaagcacatgatactgtatatagcatatttcttggttgtaaataacacccatggtttttccgtatggtaataaaaattcctgatatatatatatatatctatatatatatatatgtatatatatatatgtatatatatgtgccatatatatag

SEQ ID NO: 54528 - DNA, 416 bp, Arabidopsis thaliana landsberg
taatcggccacagggccaactagaagtggcggccgccggcgccgtagccctagccgccgccccatggttccctctcccagcagccaccttctctctcccacgcggctccagctctctttctctcacctgctcatccgacaggagccgcgcacaccgccccgggagccacgcttctgcatgcgcacgccaggaacggacgccaagccgccacccggccgagccccagcagacgtccctaggccacccgagcagtcgcgatccaggccgcccgcgaccaggaccgaccgaagcagccccgccgaggaccgagcgcgtcgcgccagggcgcccagccacccgacacgaccgcgccgcgccaggactgccgcgacgtccgagccgagtacaccgatgtcaacagatacgacgccccgtgc

SEQ ID NO: 54529 - DNA, 565 bp, Arabidopsis thaliana landsberg
ggttttcaaatgtaaaacaaaactgtcaatctatgtttctcatacaatgccaagatttcaacattttctttgttttaccatccttgttgcaaccataaccttttttaaggtagcttcagttcacgtgaaaattaaacctgctttaccgcagattgaagatccattgaccgtaaaagatgtcgagccttataccataaaagctgtgacaacgttcctggttgagcttgagaaggaatgccccaaaacagagaaatttaaggtatttttcgaaaaacttaaggcgtattccaagtacttgtgcccagtctctaaagcaaaaggctacaaatctgacatgaaggccaaggtcggtagcctttttgaggcaatgtcagccctcatctccgttaaacacagatctaaagaaggatcagtaagtgacttattctcttttttattatgtccatcaaactggataaaactctaaaaaaattatttggaggtttatatggtttatatcaaaccattcaactaaaaaaaaaaatcaaattgaaacaaattttatttcttgaaaacaaattcaaat

SEQ ID NO: 54530 - DNA, 458 bp, Arabidopsis thaliana landsberg
gattcacgtagccgtcaccaaccggtgcaaccaaacgaacgcacaaaaatagaacaaggtaaaaacgaaacgatacgcacccacggtaattggatccaggatcaacggtctcgatttaatgagatgtgatacgctctgatccgtccgatcgaaccccccccccaatggctcagatcgaatcgaccaggaagagggctagattcttatccggccgttcatgccacatcgaacggtccacggcacacccgcctccgagctgagccctcacggcggcgccgcccgaagcacggcagcgtatggccggaccgcccgctaatccccactgcaggaccctaaagcttaatccgcgcctcccaacatgatgcccagtgaaaagcggagaggctggtgtactattctccttgaatccgagcggtgcctcgctgtccacgcggcttggcggttcggcggcgggggtt

SEQ ID NO: 54531 - DNA, 488 bp, Arabidopsis thaliana landsberg
gttgcctgggggtccattctttggttcgccgcccctctcctcaaccttctatcaagcattgcaaatggatctcaccctcaaatgctaccactgaggtgggcactgttacccaggcattctgctcggagctccaggaggagctctctgattattacaagctgctggctgtactggaatcgtactcattgaatccaattcccacacctggatctgattcaggtgtgtccagtaattacatctcactgcaccgtcttgcagtgtggcttgctgagcctgcagtgagaatgcgcctaatggctgtactggttgatggatgccggggactgaggggtggtgctatggctggtgtgatccatgggcacgcacaacacagagatcctatgtttcaggagtttatgtgccgattactgtgccgggtgtgctcgccgttgtttgagatggtcaggaagactatatccaggttcgatgagttcatgtgcttctgtttg

SEQ ID NO: 54532 - DNA, 926 bp, Arabidopsis thaliana landsberg
tgtcaaaaacaatcctttaaagaattgcgaaaatatccttcaacgaattaagtgagtgactgtttcacctacaccaactaatgaaaaataaaaactcaccagagaacggagacagcggcggagagaaaggtgatagcggcggagttgaaccgcgaggcgaagctggagctgaactgccttggtaacccggtggtttaattatcatgatactacgtgtaactttcactgcttcttccggtagcgaatcctcaccgtacgatctcgcacttccagcttccgattgatctaatcacatccattaaaatccagatcaagaaaaatacatcaaatcaacgatctaatcaattaaggaatcagaacgatcaacagattcaaatacttcagtgcatgtttactaattttaagtttcgttttaaagagtttgattaatcggttcagtttttagcaaaacacggcgtaccattgccggagctaggtcggaaactgaaggtatggtgtttacgaagcttgccaaggccgttctctggccgtggaccagcgacagtatcatcccagagatgatcaagtaagcccatagggttgaaattgttaagaatgtaaagtttttggggttttttaaaatctgttgttgtagaggttcttcgattcatgaaggaagcgatgatttaaaggcgatcgggtacatctgagacgttgattgtgtgtgacgtggcgactggatattaggtctacgtaaggtggataaggtcgaggattggaagtgtgggaccgatatggtcgagatatttagatcggagtgccacgtggattttcatcggagggttataaatgcatctcacgtgatcgcatctgtcgctttcttttttgtattacgagtgtgccttagctttacttgattgagttaaaatcccctcgatttgtgttta

SEQ ID NO: 54533 - DNA, 206 bp, Arabidopsis thaliana landsberg
aagaagctttgatcgatctaacgatacccttctactcatcatatttcattcatccacgtctcattcattgccactatactattgagcgccacagaccgtcgatccgatcgggctctaaccgacaacttttaagctaacaaggctcctatctgattcatcaacgcctgtctcacgtcacgacggcctattatatctcgcacgcctaa

SEQ ID NO: 54534 - DNA, 479 bp, Arabidopsis thaliana landsberg
  unsure (1)..(479): unsure at all n locations
ttgtttgtttttttttgtttaagaagagactctcttgaaacccaaacatacaacgaaagaggtacctcaagtttcaaaaattctttaaaagaaacaaagacaaatcttcttactcattcttgagcattactacttgcgtccattggctcagcctctgttgaagcctctcctttctctcccgccttttgtgctgcgaaacaccaaattgaacctttttaatcaacatgtggatcacgtcatatagggtaaaagtctggaaatttattttaagttcttacctttcttcttctttccaccacctttcttcttcttgatgccccaagcgaagctccctctgatctcagggtnnnnnnnnnnnnnnnnnnnnnnnnnnnnnnnnnnnnnnnnnnnnnnnnnnnnnnnnnnnnnnnnnnnnnnnnaaactgtgaacttaatctgagcaagaacatcccctggtagaaatgcagaacgacatgcgc

SEQ ID NO: 54535 - DNA, 963 bp, Arabidopsis thaliana landsberg
gtggacaggacaatgaagagattacaaaactagaagctccatcaacaaacaagacaaacaccttattgatctcaatcacatgcggtagttaatcatggtgataatggtcagatcaacgggaagaagacgaaggaaattcacagagtaaaacgagcttcagacaaaaaggtgtcgtctaaaagagtctcaagaacttggaaaatccctaagtatccaaagaagcagcctaaatcagatcaagaacatccgggtttcaatcttgattatatgcagcccactacacacccgcctcatcataattgaactcttaatgatcatgtaataactccatgcataaacaaatttcatatcgtggtttatcaaatatcataactcaagtcacgaagaatttccactttttactcgtttgatatatcatgatgtatggtcagaaacgacctagttataataagcttttatatttaaaattaatacatatacgaattagattatagtgaaactgttatcggtattgttcaatactactccgttgggtttcttgatgttgctaccatatcacacttgcaagttgaatgcatatcatcatgatgtacaatatatactttactcctcttttatatgcacatgcatgtgtatgatcatttcgttgctaaattactatatcaatatgtgtttttgttgttgttcacaattgtgttatagtattagctaaggttaacaaatgtaattgaaaaagacttgcaggttaatagtaatacatgtggttttctgctaatcataaatcttttaagttagtctgttaattcatcgtttctaatgttgacaaaactgatactaaatatgtatgtatataatatacatagtatcttgaacttggtggaccttaaaaatagtaatacagtactaacaaatttgcaatattttcatccaattaaagaatagtaatactaccgctagtcaaat

SEQ ID NO: 54536 - DNA, 1122 bp, Arabidopsis thaliana landsberg
caaagaatgttcaatttatatgtgatgcccataagcagaagttgattaatggttagattctagtaataaatctagcgacttaatagttaataattaacttaatgtagaacctatatgatgtttttaatttcctactagtttttatagatcttacatatgaaatgggaccggtaatatgttaaccactcggtacttgtgaacggggaattatatttttagttgaaacttgaaagcaaaattcatgcattaaatgatgttcaccaaactatacaaagccggtgccatgttttatatatgcattaaagtaaaatttcctctaataaccataccaaaatcctataagttataaagtaattcaccaaactccattaccactgagaacaataaaatgaactaaccaagtgagtcattcaccatcccaaactcaattttgtggtatataacaaaaaatatgtatatattctaaacatattttaaattatgatttaattattttaagtgaaagtattttcgttttcttttttcaaaacttacatttatattataaattttatcttattatttgaaaacttgtagatatattagaagttaaaagttttttttaattaaatacattaattagaagttagtttttttatagcctaaactcatttctgaaacctaattttaggggagtgtacattgttcatagccaagatttggcgtacggatactagacgtatacaaatcacgtttttaaaaacagagattatttcacctaatttctctaatccaaaatgtgaataataatgacactcttaaatctctaaaaatatatgtacactcaacgtataaacatataagtagtaaatcaatgtcaaataataagaaaatgaaaaaggtagagaaatcatgcataatttgattgattgatgcatcatctaatttatatgtggtttgacccgcatttggtgtcttggtcaccttctccgccatgacggcgcatctaatgttcctccaatcgattcttcttcctcctctgattctctcctctccaaactaaaattctcacttttctttctgagattatctgacagtaaaaaatcatcctagattagaaactgtcagatcaatctcagtctt

SEQ ID NO: 54537 - DNA, 1147 bp, Arabidopsis thaliana landsberg
aaaccaaaactcaatataatttattgcaagatgtatttgtgaataaaaacacataataaactaagcagtacatataataaaatattttttcctagtttgcaatataatctgagtttaaatccttacaatacatattgtcgataaacgacaacatgtaataaatttgtaatatataacgacctcgatcgtaaaaattaaaaatattttcattttggatttggtttcttgtatatattccctaaaccacaacccaaacaaaaacagtcaataaaaatctgattaaacaccaaatataaagatcgatgttttttgtttaataagtaatatataaagatcaatatgcatgtaaaccttcgagggcgagattaacagtgtgacaacaagaacattgaacacttgtagctccacgaatgtacattaagagtgtatgacatcctccacataccaactgtgccatctccgttcctgcattgcccaatcagttattacaaaactcaaagatctctttaagactttaaccaaactcttttgttatggtttaaaggattttaccgggcggaggaacggccgtgacggcgttacagacggcgcaacagacggaggttgctccgacgggatacatcagaaggtttctgcaacctgaacacactaactggctctgcccacttgtacttactacaaatctcaagttgtttttatttatttttttggcccaaaaaagtacattcaaatggattatgaacacatgtgaaataaataaatgtggttctggataaataattgagcaattttttcccatcaagagtaatacgcattgggaatctgataatatttgatttttccaagtatgcatgaccatgtacaatcttgtttaataaagccaaaaaatcagtcttataagtatctagagcttttgtaaaagaatatgataacagaggatctttttgtattaaaaatagcttgtccatttaagaaagattttaccatttgccggaggagtgttgttctgcggagccagtgccggtgccgtaggtgttggatatggtgcaagagggactggcattattcactccaaaaagaattgcaatatttttttggataaatctcttctatcaatctctgtattatataataatggcttctctga

SEQ ID NO: 54538 - DNA, 518 bp, Arabidopsis thaliana landsberg
tggctctcagggagggcgccgaattccgcggctgtggccgcgacggcccgctcgacgtcggacggcacgccgacgtcgtcgggtacggccagcccggtgccgccggcttccctgatggtggcgacaacgtcgtcgagcttgtccttgcgtcggccgaacaccgcgactgccgcgcctcgctgcgcgaggaggacggcggtggcggcgccgatgccactgctggccccggtgacgagagcgaccttgccgctgaattccgtgctgttcatgacgtttctcctcaaagtcaaaggcggatcagtcgaagtccaccgagcggccgacctgcgcccaccgctcgtcctcggtcgcggtttcccgcatcacgctggccatgtgaccgaccgcgtcgcggtccagcacgaagtgcaagggcggccgcgggttggcggcgaggtcaaggaaggcacgcgcgaccttggccggatcgatcggctcggtgccggaggtctcgcgcaagtgcctgcctatcgcgccca

SEQ ID NO: 54539 - DNA, 503 bp, Arabidopsis thaliana landsberg
agcctcggttttatcctgtaaaatagaatacaacaaaattaccattctgggcaaacaaagcttcagagtccataagaacatcaccagttcgctactacggaagggaggaggagtggcgaagagaggagatgggagaatggaggcagcgcgatttgggttcttggatggtggtgccgggcacagggggcgcttggggacagtaaaccaatacatgaagttaaatttaatgaataacagactaaaaaaggtcagtcaattatattaactgagcactctctcatagtaatctaaaagaacaacacgaattttggtataacatttcttaaaatccagtgttacactaacaacacatttaatgcccaatttagtttgtcaagtatatggtgcacaccagtttatcttacgaacctaatatatctttgtctagaatgcatatggttacatttcagtgttgaacgcgaagaacaaatgagctactcacaggtgtatctgctaatggaaca

SEQ ID NO: 54540 - DNA, 1075 bp, Arabidopsis thaliana landsberg
aagagtagatgatttatagacgttatttcatttattgtcaaattatatcaatgatgattttcattgatatggtaaagtaggagtttgtatttagctatacactaactagtctaaggtttagaggatgatctctgcgatcattggacaaattcttgtttctctccagactttcatctgtggatgtttatattttatattatttgcatattcttatgttaacccaatactcatcagtcatcagcatcatatttaataaataataatggttaaattttcttacaaagattttaggaaattagttcttaagtttttagatttagctgtttcttagtaagaaaaaaaatcatataagtaaacataaaatatattttacaaaactaaaagaaaattatcttagactttttctctgtatatacgtacataattcctataaaagcgtctgaccaaattaaattaaaaacattagtatcatatatatatataaagttgatttaccatctaagatgacccaatttggatgccaaatgagaaataaaacatttgttaatttaattgataattagggttagtgtcgacagataaaatcttagagaggaataatcaaacaaccaccactggtttcctcttgtttcccgaaaattctttttcattgtcgagttaaaaaatgatgggttttcgttagttccaagaaaggtactgatcgattaccttatttataatcaaagtgattaataattatatcgagagttagtaaattaatggggtaaaaaagggatttgtctttggggaagaaacaggtaatgaaaaccctaaaaggtgccgatttgtcggatgaaacaaaagcatcaaagttgtcaaaaataaaacaaaagggtgtgcttatttagacttatgttataggagtatattttaacaaatgaaaaaggttgatctatttgatcttgatactatatagttatgttagtaattttttattaatgaaacacaaacacacaagtcgtggttcataggtatctctctcgtctctcgtgtctcgctgccttcccgatctaccctttttttatacccttttgtt

SEQ ID NO: 54541 - DNA, 444 bp, Arabidopsis thaliana landsberg
ggggacggggtgtgcgggagcctgagggcaaacgaggtttctacacagagtctactgggctctgcttttggtatcaggccgtaatgatccttaggagcaacggggggaatctagttgaccattgtgggtggacccaatgactatagataggtcgtattcaatttttacagcgtgctgcttggtggttcatgggctagatgcacctaccgtgtttatttctggggcgagtaatactaatgcgggtgattcagcgatggacctagttgaattagagcgctatgacacattcaaagcccaacgaacaaagtgctgaataagatcggacgagtcgctatagggggttatgactcattattggacttgctgtgtgatggtcgaattattcgttcagttaagaaaagagcgtctattaatttatttcaaactcgtgagtaggaatattat

SEQ ID NO: 54542 - DNA, 610 bp, Arabidopsis thaliana landsberg
  unsure (1)..(610): unsure at all n locations
tttctgcggcggcggagaaggaggaggagaggaagatggctgtgatggaggaacaggtttttgaggctcccggagagtaggaggagccgatggtcttcttaaaggaccttctgtctgagagcatctgatgatgaagacacatggcttagtcgttgttgagaatctaaaagacgacgaagctgtcgaagaagaagatgaagatgatggatttagaatcctgatacattgaatcggtgaagctactgacatttttttgttagttgaattgtctgattttcgaagctttggttctgtcttttggtaatgtctttgtggatgtgatatggccaagtctcatggttatgtgcaaatggtactttcgtaatcatcccacgcgcgttgaaagccgtgtaatagttttaactgttgtttgacttgaaagctaaaaccaagtaatgatgattgggtagatttttttttaagagctgaaactttggttaccaaaccggaaagagccggtttatttggttgtcggttaccaaagtatttgtagagtgttgttgaaaagaaattcggtttggttcttgggtaaattcgatttgtnttttgtntttttctttaaaatttgggg

SEQ ID NO: 54543 - DNA, 554 bp, Arabidopsis thaliana landsberg
gtttactaacttttgtcttgagttcttctctgttcctctgcaaataaataaatagttttgagaaaaaatatcgtgaatttaagtttaaaactcagtcgattaagcctatgtttagcttaccttaaatagcagataacgggtagtgaaccagagtgtgtatccgagaccaactacttccattagcttaggaaactgtaacatcaaatatgaaaggttactacaattatatcaaacagagtttgtttcgggggcttgagagtacttaccagagggattgcttcgagtgaactgacgattgcagacgttaagtagagagcaactatcgcaccactcccatagagcaggattgaatatgtcttgtctgagtccagctacattgacaaaatcgcaacatcaagcttaaagaactgaaatgaaatggtttcattatctagtctattgaatcgtgatacaacaatacaactctaagcataacaaccagtgtattaacattcccatcatcttaagatattaatgttaattagatagataccttaatatcgtcacaaactcta

SEQ ID NO: 54544 - DNA, 916 bp, Arabidopsis thaliana landsberg
aaagtgtcatggttttggctgtgaaccgagcttaggtaataaagagacttctggatgaattcttggaagaaggttctacgatcgtcaaccatctgcagaatatcttcccgatgtgaattcacctgtgtttcaatgtgcttaagcatatgaactaactgtctcagctgccccttatgcttgtgcaagatctctttccccgctgtttcggctttagcagcatagttttcttcctacaaaatcatgatacttcaaatgaacttctgaggaagaaatccactcaaagtaggcagaattatatatttaactgcaagctccaaacccacatgaaggtacaaatggttttccaaacagctttgtgatgcaattgattaaaatttgaaacagaaagtgtagagaagacagcatctaaactatattccctattggttctcattaatctatagcagaactagccaaacattaataacgaatcaccagaatgaaacttgactaggcacatcacagtttcatgatcatatttattagtctgcattcactctataccagaattaggtatacatgtataaggaatcaccaaactaaaacttgactagacgctttacagtttcaggatcacattgtttggtttcacattcaatatctagtaaaattagtcatactaaataggcaatcaccaaagtgaagcttgacaagacccgttacaatttcagaatcatattgcttttttcgcatcacatctatagtagaacaagggatacacatatacagaatcatcagaatgacacttgcctagacacataacagtttcagaatcatatcaattggttcacgttcagtcttcattataactaggcatacatatgttataagaatcatgatgtatactactatactacctttgaactgcgaatttgaa

SEQ ID NO: 54545 - DNA, 885 bp, Arabidopsis thaliana landsberg
tagctcgcctagtcctattgttctgttccctttgctgtttagacctgacattcttgaccagggggctctttgccttcttgtctctgactttcctcctgcttctgtctgattctcccctgcttcatcacgcctctcaagttgtgaagaagaatctggtgaaggcagtaacctctttgggcttgagtctgtaaaaatgggacacacatcatttgattagctcaagactgatgtccgtttaaaacaccaagaaagaagatgatactaatgcaaactcaattatagtcaactgttccagatattgattcacttattttccttgccatatttagaaagtatatgactctacatttctagcaatcatcaagtccaaacattgtaagccaaggaaaagcgaaagaggtacctcgaacttttccatctatttcagttatgtcgttgttctgtgtccttgctgggcttgtacaaaaaaaggtaaagcttggcatagagggaattccagttgatgagaagccagctgtggttgattccggttgtttcccatcaaaagaaaacccatcaaaaccggaatttggcagtgtgttatccgcaggtaggaatgtcgagaacgatgatttaaaatcgttatctgttgattgctctaactggccaacgctaaagctatagtcttgttcccgagaaacgcattgtgtggagaaagaacatcccccattctccaatccttcacaaccaaacccatcctgatcatattgttcttgacctgattcagataactgctccatccaagagtgagctgcaaacatatgcacacaaaaattatcactctgctttaatctacatatgcatagtacacattaaagctatatcttagtggcctgacatgtttag

SEQ ID NO: 54546 - DNA, 939 bp, Arabidopsis thaliana landsberg
ggaaatactatggtctccctgagttaatctcaataacttaccacatgtagctaacataaatctccactaaggttctacttgggcctcgtgccttgtcttgtgccttagtttctttgagagtgtagaaccttcgtgctcgtggcacaaatgttagttacttgtggtgtatcagctgaagacgtggaactaatctataatgcggtggtacgtggtaccagtgatgctagtggaagtgaggcttatgaaaagcattctatcgattgtgctcgtataagaagggaagaggaagcacaagcaccgaaagaagagaggacacttatagtggtcgtggagcttctacttctggacactaataagaacaagaggtacaaatgctttttaagatgtaaattcatttgtggatgtattatatcttttggttacagtacgagagttaaatgatactgctcttgccctagtccacggtgttgtgaaaaatagtgatgagttttgcaagaaagttttgacggcatagacatttcaacggatgaagctgatattcaatgataactaatggtgaaaaatgaattagctcccactcattttgaaaacatagattgttttaaaaatttaaaaatcattaaattatttttaattctcctaaagaaaactcgcgtaactaacctattcacattctaagattaaagtactcgtacctatacctacttttttattttaatcaccaatctgaacatattcgataaaaaaaacatttgtctatgtattgttaaactagtcatagccacataatcggtttataagatttttcattataatttgtgttcgtcatctaacaaaataacaacatttcttgttggtctgatttagtgcaaattaccaaaaaacaatttcaaaaagttggctataatcaactatagtgaccctcgatttatatatatt

SEQ ID NO: 54547 - DNA, 373 bp, Arabidopsis thaliana landsberg
ttaactgagactttggtatcttaagcttcttctcgaactcaattaattctgtcaagtttagatcgtttatctctttttctccaataacatttaccatcctcttcgcgacagcctaatttttaacgagaatcttaatacttgtagacaaaaaaaaaagtatataaaaatatagaatcaattcaaataaagacttaccttcagctcttgtcttctttgctcgagctccatcacattttcgtacccgggtataagcttcaaagtggtagtttccttagtgctcatttctccatgatccatttcttgatttcttcttggaatgaagaagacacatgaatggaaacttttatgtctaggccttcttttgtaatttttt

SEQ ID NO: 54548 - DNA, 1102 bp, Arabidopsis thaliana landsberg
aaaattgaagcaatcatcattttttttactgaaaagactcatacttctctagtgaataatcaaaaatatcaaaagttagcgtaacaaacgtaaccgaaagcatcgagcgtgcttgaagctgatcatgtattagataattgatccaatgtactccaaaggagtattattaaaacatctaaaaattaaaagagaaacgaaaaaagtatgtacaattaacgaggatttgaacggcggaaaatttttgtcgctaatccctcgcttatatacaacagattttgaagatagatatgatcatatcattgcagtcttatgtccgttgcaaaattgtgatgactaaaaattggtaaccagtgttataatctcttttatttctttctgactccatcaaaatcttgcttgtaaactttggacactatttcgaaaagcaaaaacgtattaattttggaatttttaaaacattaatagaatatttaatatgtataaatcaatagaatacattaaactaataaataaataatacaaaatatgaattttaaccatacaaaaaatctcaactataattttaaaaaccctctaatagctaaaactgtaaaacatatactgagttggtctctgatattgctcataaccgaccgagctaacctaaccacacacgggacacgctcgatgttcccattctccacggtactccaacactggcatacaatacaaaacattgaaggagacagtaatgccacgtgcacggctctgcaccataaaatttaacgcctctgatttaaaacaccacacattgacaaattgacataaccaaagctacatagagaaaaaacaccaaaaatcaaaattccatcaaaggggcttttgaaattttggacaagaacaaaaaaaaaaaaaaatggcaacgagaggagctgttgcggctgctgcatccacaatatggaagcaccgaagaaacccttctcttcgatcattatctcaccattttaatcccaatttcaatcacagaatcatcccaacaggtacagtttcattacaattctgttctaagatagatatatgtaacataagatttgtgtcaaaagttcatatcaatttaaggttt

SEQ ID NO: 54549 - DNA, 1039 bp, Arabidopsis thaliana landsberg
tttcttcaccaaacaatgattttgcagaagaaaactcgaaagtcattgttaacaccatttttattttactggggacgatatttcccttataattatttacagaaatactccaaaatactagtgtattaaaaacagataaaattcaaaagcaaatttttaccaaaaaaaataataatttaaaagcaaatagtatcattattgtttaacaataaattattaaattttacatttccatagaaatttcaaaaaatcggatacccataattttcgaggtgaactatcataatcaaccctaattattttatttttctagcattgattagtgttcacaataatggcataaagcagacgcattaacttttgtaattggggttttacctttcgttttcactttaattattttaattaatcctttttacaagacccataaagaacaaaagtcaaaataatcggtagtctcaaaaagtcaagaatctcacacactcatcatgaacgtcaccaccaccaaacaacacttccattgttcctcataataatctccaccaatactcatttccctcttggattcttcaaacttctctctgaaagttctcattttttggtttgcatttctttggagtccactgttacttactaaaatggtgagcaaatggaagaagatgaagctagctttgagtttgaatctctgcaactatctccccagaaccctcgaggaggaaccaccatcattggctttgaattccgctgagacattatcagatgctgctttgctctctcctcttaactggcccatgactccaacaccttcttcttaccgtcgaaggttgtccagaagtagcagcaaatcgtcaaaggtttgtttcatcatgacccatattctcaaatctctttaattccaagaaagattgctacttttggttcctgaaatactgacctgttctttgtggctcatgagtttgtcttggataagtccggtgctctgctttcgagctatatgaattgaaaatagtacaaaaagctcaaatatttccaatctatt

SEQ ID NO: 54550 - DNA, 640 bp, Arabidopsis thaliana landsberg
  unsure (1)..(640): unsure at all n locations
tacatnnnnnnnnnnnnnnnnnnnnnnnnnnnnnnnnnnnnnnnnnnnnnnnnnnnnnnnnnnnnnnnnnnnnnnnnnnnnnnnnnnnnnnnnnnnnnnnnnnnnnnnnnnnnnnnnnnnnnnnnnnnnnnnnnnnnnnnnnnnnnnnnnnnnnnnnnnnnnnnnnnnnnnnnnnnnnnnnnnnnnnnnnnnnnnnnnnnnnnnnnnnnnnnnnnnnnnnnnnnnnnnnnnnnnnnnnnnnnnnnnnnnnnnnnnnnnnnnnnnnnnnnnnnnnnnnnnnnnnnnnnnnnnnnnnnnnnnnnnnnnnnnnnnnnnnnnnnnnnnnnnnnnnnnnnnnnnnnnnnnnnnnnnnnnnnnnnnnnnnnnnnnnnnnnnnnnnnnnnnnnnnnnnnnnnnnnnnnnnnnnnnnnnnnnnnnnnnnnnnnnnnnnnnnnnnnnnnnnnnnnnnnnnnnnnnnnnnnnnnnnnnnnnnnnnnnnnnnnnnnnnnnnnnnnnnnnnnnnnnnnnnnnnnnnnnnnnnnntggtcccccccttttttgaaaaaaaaaaattctggcccaaaaaaaaaggaaaacccccctcctctgggcgggtgtttttttttttttttttttaaaaaaaaaacaaccccctcccccc

SEQ ID NO: 54551 - DNA, 1181 bp, Arabidopsis thaliana landsberg
  unsure (1)..(1181): unsure at all n locations
aatgacctttggtatttttttaatctataatccttcatgattttcttaagtctttgttttgaaaatcacgaacgaataatttctgatggatgtacttgaatattagtaacaagactaattgaattaaagaaaagagaagttattcctttgacgtttataattttccgcggctaagggaacatatacgttccttgaaactgttgccatgcaacttttgctttaacagtttagagagttttttacttcatgctacatcctttttctcctgacacacacaagagcatattatacatccatgtacctcctccatcgaccatcaatatatagatacatgtgattattaattatctacataaaaagttataccacgaagttgcgattgataatatgaaagtggtacatgctcgaaatagataatgagaatatatcagctttagttgtctcatcgttagtcaatctatatgtgcatatacagttaacaagaaatctataagcatatacgaactggggtcccaataaggtctaagaatcttttttttctttttttcttttctttgctttgctttagtttagtttgtgaaatttagtgaaaatttcattttgtctcatagagaaaccacatgttagtcaaaaattatatagtaagtccaagaaaactatattaatatacccatattaccatatagtcggagatttctagtatctctagtttagttcttcttattcattatcaattcaagtgttataaaacctcgagaccaataaaataggattcactctccttcgtgcccccaaagatataggtttacatatctatatttccacaccaccattttaaaagcaagagttaattaaagagatattttttagtcatcttggtatgtaatctggtaaactttttagtttgttatcttgtataaacaaccagtaagattttggttcttttgtaaatacttctctttgaatttaggactagtgttttaaaattactttcctcccatatttttgttttgatctttcaatttaaattaaaagttcgtttacaacccatgcatgcacacttccgaatttaaactcggattataatttggcactataataatctattagaatacgtcttgattaattntaaaatatttaggtgtcttaaaataagtacgtacgttgataaatatggagat

SEQ ID NO: 54552 - DNA, 506 bp, Arabidopsis thaliana landsberg
atactacctagcttttccgcagccgctgcttgtaggtggataccgtcttcgggctcaggcaaagctgtttggtctctacgttgagggaataaccacgcaccaacatcatggcaacttcaagttcacgtcccgacacggcatccaacggagaggccgtgtcatccagcgacgacaaggccatgcgcttggccatctcggtcgcgaggtagcggtccccccgggcgacgcaacgcacggctgccaccagttcggtggcgggacaggccttggacagataaccaagggcacccgcttgcagcaggcgccgcggaaaacgcgcgtcgtcaaccacggtgaggatgaggatatgcctgggcaggccagaccggcccacccgcatgggcaactacatgccactcatgccgggcatgtgcacgtcgaccagggccactgcaggacaatcctggcgaatcagcgccagcccgtcttccgccggtccagcctctcccaacacccggatgaacgac

SEQ ID NO: 54553 - DNA, 971 bp, Arabidopsis thaliana landsberg
gggattcactatgtgtttcgcgctgagtcactcatcataatcttaaaaccctaaggaaaaagaaaatccaatggcacacgtaaattacactttctttctttttataacaattatactgtttttaagagcatcgttaataaaacccttcgagtgatcaaatcccatttggtttccagaaaaccatcataatcttattcttctttcaggatctcatttgcggatttgcctctcaatttggtcaacacgtatactatcctagcgagacgctactcatacgctcattattacaattaaagtacaatcatttatattatgagtgaagttattatctacgttatctgaaattataacttacgtacgcgagtgaatacatatactccaacttgtgaagaaattaacgtttttccgataaatcactttattgatatatcaaattaccgatgatatagttgattaagccatgtcgctgtttcgctgaagtatgtttaaagtacgacgccacgcgatctgtataacaaagcgtgggacaatcaatctttcaatctagctaacgttacgctaatatcacgaatttttctattctatatatgtattcaatgggtttgacttttactttgtgacacatttattcttcattaagctgattggttaaacagatttaaacctttctctttacaataaccattataacctatataacataactcatgtaataagccgataatcgagcgcgagacacatgagtttatccattagtcactgtcagtctgtcaccaaccattcagaacatttgttttaaattttaattacgtgaatgatctaattacgacattgtagtaatcaagtggctaagcacttaagcttatccaattttcagaaattatatataccattcgatttacggagtatacaaaatgtatacggcattaaataaaataaatatttgatttataatgtaacgtagaatagtt

SEQ ID NO: 54554 - DNA, 1117 bp, Arabidopsis thaliana landsberg
ctatcaaggtatatagggcgaggggtgtcgcgggatccaccgcaaatatccaaactaacgaaaagaagaatgaacatactggaaaaaagacaaaaaaactatttcttgcaaaacccctgaagacaatagccagctgtagctgattcctagttcaatgtatatatacacatacagattaacatgaagcctaaataattgattttccatagaagaatgatgcaattttaatgaaaagggtctaacctttaaaaaaacattgtgtcaaaacactcaaacggtaactgacttgctgatgtggctctcctaatcagccacgtcggaaacaactacctttaccgctgaaaattgaaacgtcgtcgtttcacagtgttatagtctgaagcgcaagccctagatttccaatcgccaaacgctaaaataatgtggaagccgccatcgacacctcccttcatcggcgttgggaacatcgattgctacgaagtgtggaaagaaaggaaaccgcggcggagatgatgatagccttctactggagttttgagtttttttttccttttctttttatgtgtgttttgttgagaaagagagcaaagggagagggtagttttgtttgcaattttggctgaggggttactttgtaaatattattttctttgctctaactaaaaagtttgttaatattcactgaatgactgaaacttttttaaatgccaaaagagaccatatacgatgagaagatacaagaaaaaggcaaaatcgaactgaaactacaagccatcaattctgcaagtagcttctgaatttttaactctttcgaattcctgggtttactccatctgattgggtatattgcttgatcagtttattttattgcattagcttcggcattttcttgaaatttgttctttacaagctagaattatcttttttggtcttgagagagacatcacattctattgaatctgaatttaggtcttgcttctgtttttggctttgtatcatcatgttacagaatgctttcccgtaatatatatctctacttactctctgctgggtcatggattttcaaacaaatgtgacaaatgtcatgtgttacttgcagtttcttatgttttttttt

SEQ ID NO: 54555 - DNA, 506 bp, Arabidopsis thaliana landsberg
  unsure (1)..(506): unsure at all n locations
gaggcatttctccctgctttgcggagtctgtggatagactgtatacgtcgtagaaactatcgacaactttctgctcatagtcaagcacgccatattcctagaaatagtttactacaagttattattcatggtaaatcatgtaggcagtgtgaaaacggcaaaactttctataaaagctttggctgaatcgtcagagaggaaacaaagctgtataaaaccaagcaggtgccacaacaaccaaaaaaatcaccagaaagaaatttacttggcatattgatcagtaaagaagtaatgaaattcaattagctaataagaatcccaacaatcatgacatgctaaattcgggtcttatcaagctcggcgtacctttgaagtcattatgaccccaagagtcgataaacacaaagagagaatnncagcatttcctagatataaaaagagagnacttacccagtactgtctcgataacctctgggctaccacctncgatgaatccctccttgaat

SEQ ID NO: 54556 - DNA, 679 bp, Arabidopsis thaliana landsberg
aatgataatattatcaaagccttccgctagaaacaatatgaataaaagttatttcaatccaataaagttcgggtatagcaagccccttttcatatgaaccaccggtacacttgacagtcacaatgtttgacatcatcaaccttccaaattcatacatgaagctatagaagtggagattcataaaggttgaatgcttatttaccatatgcgctattagccatagcagcagctacttcgagtaatctatcataaccctctctcatatcttgcatatcctgaaaacaattgagtaataagcttaggtcataaaatgtatcttccagttctagttcaaccaatcaacaactagcatcagttacaatatcaatttcttaccataactgatataaataccaattccaaatttctccataagataagtctataaaagtagaaattaatgaacaaacttctataactgtaaaagtcctgaaatttccaattagggtgtgatttttgatcggaaatttttatccacaaaaactcatccaagttacaatcttgtgatcaataactcacgattttgaaaagaaaaaaaaaaactaaatctcagagaatcatgagagaagatcagtgaaaagagggaaaatttaccttggcggctcgagcaagaccttcaatttgtgcagtgggaaaaagc

SEQ ID NO: 54557 - DNA, 854 bp, Arabidopsis thaliana landsberg
agtcggcgagagacagacatgtggagatcgtgtgaagtttgtcaaagataggctaattgcatgtatacttgtaaccgatgccagagcatgaaagttttcgcttgacactcgtactctagctaagaaatgagctctacgtcggtcttttgttagcatcgagtgtcaaaaacatgcacactatgtaagtccatcacgcctacatgaatgataccatttagatgcaatttattttagtatataataggcgttcatctaatgattatttcatttaatgataatgatatatctaccatgataggttcaagatatatattttaacgtttttacatcaattagttaagttttagcaagcataacaaaaattaagtttctaagagaatttaattcgacttaatccatgaggtagagacaacatgaaacgaaaaatgtgtagaaattacacccatatatgttacaatacatacaaaataccaaatcgaagcaaatttttaacatacttgttagtgctctttttgatgttaatcatgttcctactcctagattaaaataggaaaaaaaaaaacaaacatcactatcccaagcttataaagcataagtagctgcgcgcataaccgaaaaccccaaattgaagctgataaaaataaattttagagaaaaatggaatgaaaaaaaaaacaatggtttgaaagttaaaactatatatttatgaaagttaaaaaaaaaaaagacaacaaaaagagcatgtcagttatgaaagcttgagacatttttcttccaaaaaaggaacaaatttttgaccgttgaagatctttcatcaatcctcatgattggtcaatctccggaagatgattggt

SEQ ID NO: 54558 - DNA, 757 bp, Arabidopsis thaliana landsberg
aaagttcagcgtttttccccttaacaaaccgataatttgtctctgccatttttctctgcgtaaaatttgatgatttaaattcctatactttttgaatcctctttggcgtggaaatgcttgattttatcagtactcttacttctcatgctttttaacagtcttaagtattttgctgttttgcagatgacagattcagcatcctcgggagacatggaagaaattttctttgacttcaggaagcagcgttttatatactcaaaagagttaggagccttttccaagcttccttatcccacaaaggaaacatttggtcattatttgaaatgtactggtcatggtacagaagctaaaattgccactgccactgagaagtggggaaggaatgtgtaagtcgccttgtaatgtttctctacatttatcgatcacttgtttactgtaacgttgatgattgatgttttttttattggcaattttttcgataggctcttattttgtgcgttctgtttttcttttaatatgtcctacgaacctctattaaaacatttctctgtgcctttgcctctgtgcatatccaaagttttgtttgttttttaatctggtttgacactttacctctgtgccttacagatttgattatccacaacctacattccagaagctaatgaaagaaaactgcatggaacccttttttgtatttcaggtgttgtttactttataatgcatttatctaagatctcttttatagttattggggcgt

SEQ ID NO: 54559 - DNA, 936 bp, Arabidopsis thaliana landsberg
atccaagaatgttttcatgaccgatttcccaactgcccctattattccatttaattacacgggtacgccaccaaacaacacaatggtctcaagagggaccaaagttgtggtcttgaagtacaacacaactgttgaattggtgttacagggcactagcatcttgggtattgaggcccaccctatacatcttcatggcttcaacttttatgtggtgggtcaaggctttggcaattttaacccggcccgtgacccaaaacattataacctagtcgatccggtcgaacgaaacaccatcaatatcccttccggtggatgggtcgccatccgcttccttgccgataatcccggtaagggtttatgagtagatatttttttttttgtcaataacatgtattatacaattttggatttaggtagttacacaacaaaatctctaattttaatgattaatagtactcacaaactatatgttttattctaatatttgtttgatggtgataggtgtgtggctgatgcattgccacattgagattcatttgagttggggtctgaccatggcttgggttgttttggacggtgaccttccaaatcagaagctccttcctccaccctcagatttccctaaatgttgactatgaccgatccaacgcctctgcaaatgccacatcacctttttccctttcttggaatgatatttctgaagtgcaatatatgtctctttttcgttttttttcttcattttatttctttcctctttaatacttttgttttttgagatttctgagtttttttatccctttgcttgatgatttgttgtataaagagtgaactgaagaacgatggtcgcgttagtaatttctgtgtacgaaatgttaacgcaaaataaataatcgtaaagttttgtaataaacgaaaaaggcattagcacaaatctgc

SEQ ID NO: 54560 - DNA, 398 bp, Arabidopsis thaliana landsberg
ccctcctactctttcgaatctacttggacataaaaccactccttcgtccaattgctatgcaatttagtccgataagccagcacggggacaactgaatccttctgataagcgaagttgtaacaattgaagttgttgtgcagtttgtatgaaagcctagccttcatatgatagtgcaattcgtgcactctgcaaaaagcttcagcatcagtgtgaataccttggcttcgcacaacccatatagatacactgagcctaacaatagcattgggcgtcaactgattcatgtatacttcagatttcttcataaccttggtgatcatcctacacatcgatagctgaagattagctcggaagaagctcttgaaaacaacaacctcatcatccttcagctttggagt

SEQ ID NO: 54561 - DNA, 522 bp, Arabidopsis thaliana landsberg
atccccctccctctgtttccagttttgacgtcctccaaacagcggtgagggatctttatcctgtttgtcaacagttatatatgccaacttcttcacaattgtgttgggagtcctctttggtatgacaacaacatttggatcatccgcaacaggtatcgggcagcctgtagattgaagtaagaaacgcgaggctatgaagcagtcacattttagccaccaaaagaattttttaaggcacaagtcttacggtggagtggtttggatgagagccccatcgagtccaacacagagagaactttactgtcttttttgcaaagagctgcagaaatacaaggcacaccaaggcatgtaatgctaactgataagacaaagtgtcactgtcatgataagcatcagcccatggaagaccaggagatatttaacttctgagtaaatggtctgaagaaaatatgtatattcagacgatgtagcactgaaacagcatcgtcaattcattacagaaattaaataaagtattagaat

SEQ ID NO: 54562 - DNA, 468 bp, Arabidopsis thaliana landsberg
tacgaatgatgtgccgcgattggttgccgaagaatcggcctcgcgtctggtaaccgcctgatacctcgtggactttgaaccctgccgcatgcatgagcttgccgacctcatgcagcgagtatgcccggacactgatctcctgctcgagctggcgaccgtcgtcgaacacgacggaacgattcacggcgatgcgcgacgagaagtagttgagctcgacttcctcgaggacaacgcagccgtcgccttcccaccacacgcgcgtgggcaagtcggcgatcacgtagtcgcgattcagaatctcgacgaggaccttgccgcccggcttgagggcttttgccacgttttgcagggtcttcttgttcgtctcgtcgtcgaagtaaccaaacgtcgagaacaggcagtacgtcgcgtcgaactgattttcgaactcgagctcgcgcatgtcgccgcgcacgaagttgatcgtca

SEQ ID NO: 54563 - DNA, 1143 bp, Arabidopsis thaliana landsberg
tgatgcttggagtggagctggtgagtgatcgcaagcttaagactcctgcaaccgccgagactctgcacattatggatcaaatgaaaggttggtgtgtttacgctttactgaggtgaaacatgtattaaaaaggtgaattaatttgccttatgaataaaaatatacagaattgggtgtgttgattggaaaaggaggctactttggaaatgtctttagaatcacaccacctctctgcttcaccaaggacgatgcaggtttgtgtcgtttcatttctttgctaagaaggaatatagaagaaaaataaacagaataataaaagtctctttgtggcagattttctcgtggaagcgatggactactcaatgtcgaagatgtgaagaaatggaaaatgatagatgatggttttatgaaatatggtttactaagttgtggtgaagaatgcttgtaattatgctatgaacgactacaagattgatgagccaacatctcgttgcttctcaatcactatgttttcttaatgttcacaactttgcttgtgtcaaaataaagtcacatcattacaaacatctaaatcgcatcttagcatcacatgacatcacttctaaatcgtgttgtcgaccatgagtcatcgggtgtgttcgtctttttttctttcatttggatgcaatatcttgcatgttgtttctaattgctaaatcagtaagcgagtttggttgcaaaataagttgtataaataacttgaatttttgtgcaaaaagattgatccaatgctgcatacaacgaatgctgaagaatcatgtgacatacatctgagcctttagtttccatagcccattaaaaagcttgggagtttgagttaaagggacctaaataagtccaataactcaaaatgcctttctagatcttttcttttgaaggagcaatatttcatacctctgttgcttggaaagtgtagtgatcccattaccaagaaattagttgtggatgtttccgatcaaagcattgactgctggagactgacccgtcggaactggctaagacattaaattatactaaaaacagaccaatgttccatttcccatgaattgttgtccacagcttttataacattctcccccaaaccaataatagttcacacaactc

SEQ ID NO: 54564 - DNA, 607 bp, Arabidopsis thaliana landsberg
  unsure (1)..(607): unsure at all n locations
ggctccaccaacaccccgctcgataaggcctcgccaccggcctgcaagccttccgcaacgttttctctttcgccaccctgccatttgcgtcgatctcggcgttgtccgatcaggccacaggtcttggagcgcgcgcttttatcggcatgccggtcttgaaacagttcataagcttcatgaaaagcttcacgcccgacaaccggcaactggcgttgaaaaccgggcttggtctcgatcaggcacatcaggcctttgccacacagtcccgcttcgtcggctggatcaacacccgatcgttgaccgggtatctcgctgatcgcacgcatgcgctgtcgttcctctccccaatgacccaagcggcgaaagtcgggttcggctgggatttcatgacctggatggcggacctcgccagaaccaaggagttctcagaactccagccctggacgcgggacatgttaaagcgtcacggctggaccaaagaggattggaccgcccttcgcgatgatggaccggagacctacaagggcgtcctatgtctgacacgggcggtgattgtcagccaagccngagaagacttggcagataagttcatgcgcacgatgctgcg

SEQ ID NO: 54565 - DNA, 560 bp, Arabidopsis thaliana landsberg
cctgagtgctgtgtactcaatagtgggaggagcaccatgttgatgaaggagactgggtcggcttcagttctggtgaagcacgaggtgtttgacccagcggcacagtcccccacgtgtgactcaccataacctcctcctctagcactcccttgccgatgatcggtacaagaggacttgaagctggttccctgtatgagaacgttacatggagcattagcgcatcaagtgaagagtgaagttgatgatgttgtgacatagatatagagattaacctgctacaactaatcaagacatcaacgaatgcatctgatggtagtagacaggtactgaagcctcatgctctcggtctcactacactgctaataaaaactgagccaggtactgaacattcatgatttctagtcagactcaccgggactgggagtagatctctgcactacataactgttggcctggttcttattcgttgaatggctgtcgctagggaagtctagtttgacgtatggccattccaaatattactgagagtgttgagatgataaaatcaggtgactggagaa

SEQ ID NO: 54566 - DNA, 326 bp, Arabidopsis thaliana landsberg
agaggagcaaaaattgtgtgggatgttgtttgaaattataaggaatgtggtggtatagggtttaggagggtaatggattggaataaagtgattggggtgaaggttatttgggttgttttgtatggggatggatatttatgggtttaatgggttaggttagatatgattgaaaatagatgtttgtgggaattgaatgagtgttgttgggggagttgtatatggagtagggtgtgtaagttgaggataattgatagggtattaatattttgtgatattggtgtagggatgagaggaaaattatgggaggataattggaaagggttagg

SEQ ID NO: 54567 - DNA, 1151 bp, Arabidopsis thaliana landsberg
tgatgttgagactccgaaaacacattttttggaatggtcaataaagactagtataacagttgagttttaccgatgctaaacaatgagtattagagattaggctattgatcgagttttgtctaccaaaataatgtaaaagtaaaacccaaaaagaaagaaagaatgtcggccaaatatatcttgctcgaacaagagaccttcaaaacaattgctccaatctagaaaccaatcacacaagtacatactatgaaaatgttgcttagttattgtattattggacctaacgaatttttaaaatcgaaattctctaagtctctaacggaggatcagccatgaagatgactaattggtttagactcgttttagatcttatacgtaaacatgaaagaaaagctaacatatcatctttatgttgtcggcttgtgcttgctgtttgcaatggatcaggaagataaatgaaaagaaggttataaagttcgatgaacctacgacatttataaatcctattcctacccatcatagtgaaaaaaaacaagtaaagtaacataagattaattacagcatgcattattttctataagatgcgtaaaacataactgtaaaatgtataaatccgcctacatcatgtaatgttgctcgaaaatcatacataataatatcggttttacgttaattttaattttcgtaaaaccgagtgaaggattaaacacacatatattgaccataactatgaaccgaccatttaacattacaaatgacaccatacaaaataccacgaagcattaacacaaaccactcatataaccaattattatcattacaaaataaaattcatcgaaaaaatgaactctaacacacacagaacaatgatagttaaactcgaagactcgacctcatcagtatctcaccacgtcacgctttattattcatcatcatgatcatcataattaagtttactgtccggagaaggaggaggacgtggccgatgaaacttgtgacgacgatgacgttttccaggctgtgacgatggagcagcataaccacacataccaaactcacaaggcgcaccggattcacactcgttcccgcattgtcacaattagacggatcaggtgtcgtgtccacacaatcttcatcgcagcacgacaatg

SEQ ID NO: 54568 - DNA, 785 bp, Arabidopsis thaliana landsberg
catcaataactataaagaaacgccttacaagttcttaatcaaatctcctcccacatcagcatctaagtttcaggtcaagatcaggagcccacctaaggtcttggtttctcctacaagaaatggcagtaactcggttcggaagtcacctagaggctccaggtctccgacaagaactgttaacttaggaaagaagtcagcgtcgatttctcctattagaaatacgggaaagaggtctccaaagctatcaactgctgctaagctcagaagatcatttactcctacgagaaatggcagtaacttggctcgtaagtcgtctatttctccgaaaagagtcacacttcaagcatttctttctccaacaagaaatggtaacttttgtaagaagtcacccaaagcttcgatttctccaactagggtgtgcaacaagtcgcagaagctgtcaacggctgcaaagttcaggaggtcattttcgccatcgagactagctatgaggtttgtatctccaatgaagagcaggaaaagtgtagccaagtgcgatgatcatgagatggtgagtggattgaaacagcgtccggttttggttcctaagagattctcgataaggagaatctaatatgagagagtttttaatgaaagaagatattatcttagtttttgatgtgtttgtgtatcgttgataagttattgttttatcgtcaagaaaatatatggaggaaaacattatttattggaattacttttgttcaaatgtgggtgtaatttgagggtaccactatgctacatta

SEQ ID NO: 54569 - DNA, 1334 bp, Arabidopsis thaliana landsberg
tgcattggttcttatctctgaaccaacctaaagtagcagctaactttggaatgaaacgaacatttaaagcctattaaacttgaaacaaaatctccttctaattaataccttcttctacgaaacatattcaaaggaaactatacatagagatcgattgttcaattcgaaatgttaattctactctaagcaactgttaatccagatccaatttacagtcaaaacatgactctaaagatttaccggtgaagaaacaccgttacctgagctataacaccagaaaatcctccgacgagagcctttgtggcgagaggaagagactcgctattgttagtttcagatctgacgatgagtcctttcaaattctcgtatccaatgattctgataggcgtgtagaacaggtgtctgataatcgccggagatagacctttgtagagaccaatcactccttcctttctcgcaatctccgatacgactccgaaagcgccaatccgatgcgcaccagaagcggatcccgaaccatggagctgcattctagtctttgtgagatcaatcggaaacgtaactgactctgcaaccatcgcagagagtgaagcaagcaggatcctggttccggtcggtgcttctctggtcactcggctccgctccattttcaccggatttgattaccactaacacaatgtccatcacagagaacacaacttgattctatttcgtagtcaacgacatcgtttcggtcatcagagtgtatttgagacgtcgtttccataatattgggctttaaagtcttatgggcccatgttcacaaattctaaaatacaaaactttagagataacagccgacgtggcaaaacatgaaagaccgagtagacattatagttttgagctcctcccatttcatatccttaagaaaaacaaaaacaaaaatcaaatgagctccttcaccaccaccaacactccgccaccgtatctcctccggaaaatttatcatcgccgtgtaaaccaaccgttctccgtcgtatgttgcaccggagaaccccaacaagacatcttcacccgccggagaaccttgacttcactaataacattcacggtcatcggcggtgctacgtcatcagcattagcacaggagaaatgggggacaaggtcattcataaaggagaaatattttatgccgggactatcacctgaggatgcggcggcgcgtataaaacagacggctgaaggattaagagacatgagggagatgttggaccacatgtcgtggaggtacgttatattctacataagattgaaacaggcttatctgtctcacgatctcaccaacgccatgaaca

SEQ ID NO: 54570 - DNA, 411 bp, Arabidopsis thaliana landsberg
  unsure (1)..(411): unsure at all n locations
cccccccccccccccncccccccccgttntngntgttccccccccccccccccctttcccccaccccccccccccccccccccccggcccccccccccctttcttttcttgtgttggtttgttccgggggccnccccccccnnnnncaccaccaaccccaccccccccccccaccccnccccccncnnnnnnnnnnnnncccccccccctccccccnctccccttctcccctcccccncggcgncccgcgnnnngccccctcccccccccgcgccccccccccccgcgggtgcccgcccccccccccccccccccccccgccggctcccccccccccccccccccccccccccccccccccccccccccccccccccccccccccccccccgncgccccgccccccccccc

SEQ ID NO: 54571 - DNA, 140 bp, Arabidopsis thaliana landsberg
  unsure (1)..(140): unsure at all n locations
cccccccccccccccccccttctttttttttctccccnccccccctcctcccccccccctcccctcccctcctcttttnnnccnnnnccccccccccccccccccccctccccccccccccccccccccccccccccttt

SEQ ID NO: 54572 - DNA, 1622 bp, Arabidopsis thaliana landsberg
agactctctttagctcatagtatctcaggattaagctttgtattctgatcacatatcctcaaatttataatcacacagtttttatgaaagcaaaattatagctacaatgttatagcgtcatttatctctcaatctttcagtgcctactccttacctgaacattattttctttgttgtactccttgttgtattaagaccctactctcagttgtctccgttaggcgaaatctcttgaccgtctaacagctaacataagtgtctgaacgcatctacaatttctctcttagcttttgatgtatcaggaacagatcagaaaactatcccagtctcaccttatggaacagatgcatttcattttctgatgcatccacaaatggacacagctgcctgtctggtgaatgcggatcaacatgcctcgttgcttgcgagtaaagatggattatctatctcctttgtatttggaagttgaagctggtaatgaaatcgcctttacacgcacgcagtcctcaaggtcaaaaatacaggtctgtctccaaatttagttgttcaaagaaactaattgaaatactacttgtttgggcagatgttcttgatgttattcttatgaagacccgagacttgatgttcttgacttatgaaatactacttgtttgatttgaggagttaagggtctgatttgatcactgtgtcttttgtcaaatagattcttggtttaaacgtggttgtagaaataatctcatgctagactggctcatttcataaaaaataatagcggcttgacaactctggatatcgccaaactaaatcccaacctgccaaaccactacgttttttgaaaggtttgtctaataacccaccgtaacaataccttttctcgatcagtttgtcatcttgaccgttctatctttgttgctggaggcagactataagagtttggctctgtctttcagttgttttaggatttcttgttgctagcttggtgctactgttcagttttttgaaatgtgaggaaacatagacaaagaaatttacattttctgtttagaaaaaaatctgagttgcttaagctttatgagtttgtatatagatttggggctggtagatccggtgccgttcacatgaaaggcagccttattaaaatagatcaatgtaatttcaataaaactcagtagcccatttccacgtggtaatctcaggtttgagttatataacttctcttcaggtataaggttcactttgctttaaaagaagagcttcgttctgtttgtgcattgactagtttaattttataatttcgttctgctcatatgcactgtttaagagattatctttattgttttaaatataaatttagatgtcaaaagtcatcattagctttcagtggagaataaaaaatttccctcattaacggcgcacagtaggacttaaatgtgtatttcgaaatgtttactgagtcaacttgttctagccttttagggagttaacaagttgaaggtttaagttgaaaattcaactgtttcttaaaatagaaaccaattcccttttacggctacaagacctactcatatcagaagttaggtttactttaaataaaaaaaccttactctgttctacctgacttt

SEQ ID NO: 54573 - DNA, 500 bp, Arabidopsis thaliana landsberg
gaactaagaaaaattctgataccaaacattagtgacacctgcaaaattccaaactcctaaaaatttaaagaaaacaacaaatcgaaaaaatctaaagaaagccaacacaacataacaaatttctcctatgatgaatagagactacctcacaaatcaaatgttagcattgtattttatagtgagtaagaattctagctaaacccaaataaaataaaattgaacatcattactaggtcttagggaatactcgctcattcttcattcattttcttcctttgaagcatccttgtcgtttcatagaatgttttatctttctccttcttagctctcataatccatattagactgtggattaattctctagtactctaatctaaattttatctactatgtttatgtttccgactttttttttcactatgtttccgacttagatgttagaaaatcaccctttcatgtcatatcaatattttcttgtgtctatcattgtacactttaag

SEQ ID NO: 54574 - DNA, 1672 bp, Arabidopsis thaliana landsberg
ataggcttatggaacaaatgggcaatgattgcgaggcttttccctggtagaactgataattctttgatgaaccattggcatgttgtcatggctcgtaagtatagagaacactcttctgcttaccgtaggagaaagcttatgagtaataatccacttaaacctcacctcaccaataatcatcatcctaaccctaaccctaattaccactcttttatctccactaatcattacttcgctcagcctttccccgagtttaatttgactcatcacctggttaataatgcccctatcacgagtgaccataaccagcttgtgttgcctttccattgctttcaaggtagcctatagctcttcctcctctttcaatagttttttcaattgtcttttgcatattttgaactcttttttggtttttgttatatctacaacgttcaggttatgagaacaatgaacctccgatggttgtgagtatgtttggcaaccaaatgatggtcggcgataacgttggtgccacgtcagacgcgttatgcaatattccgcacattgaccctagtaaccaagagaaaccggagccaaatgatgcaatgcattggatcggaatggacgcggtagatgaggaggtgttcgaaaaggctaagcagcaaccacattttttcgattttcttggcttggggacggcgtgaatgttgaacaaattggtgttaatcagataacgacagtggttaaatttggttacaaaaaaaatagcatttagctttagtagctagaaaacaaacaaaccagatcctagcctttgtccttgcgtttacgttaattactaaactgtagattgttgttgttggcacttggttgtctagtgtaacatttgataagtcattgtttttagtagtactcgttcagaaatatttaacaaagagagattggttttaaaaagttgattcttttatgatgaagtgacgtgaaatattgctaaagacgtgttgagaataacaacgagagagagagagagagaagggaaattaaaaagagtggagtttctaggagttggagaaagagacgaagatgcgtaattaagagaagaggaactgccaaaattgaggcagagattgtgcaacagaaaggccaaacatgaaacatgctcaccaaatctcacacacacattgcatttgtttcttctcttcaaaccgtttttccaactcttcaagcttcttacctatgtatctctctcatgtcacgcggacccacacatgcccttctttcttgtaattctttccatgttgtagatataaaagaaaaatttaaattgaattgttcttttgtatagttttggttgggttaaaaaaaaaggaaaaaaattagttttggttttgaatatgagtttttaaaataatatataacgtggataaatgtatgggtttttcggattttgaaaggttgttgtagagaagatttttaatttacccattgggtctgaaattgcttcaataggcccaatctatttcggagatgttctcgagtctctctttttgggaacaaacatccgagtgaagtcaatattaaatgattttcgaaaaggataaaactattctaaaactaattaacatttttccactcattttagtaattcttccaaaggaaagtgcttaaagagagggggaaaaaagtgcttaaa

SEQ ID NO: 54575 - DNA, 597 bp, Arabidopsis thaliana landsberg
  unsure (1)..(597): unsure at all n locations
ccggtaatatccgcgtcgagttgcgcacgaatcttcatggtgagcttgaatcatcgcgcccgatcaccagcagcgaggtgctctgcatctctgatattttgcggttactgtaccatgccaactccatttagtgccctgacaaagcaacttgaggggcattttccttcaattttcattcagcaaactaccaagtcgactagagcaaagttgttcccctatatnnnnnnnnnnnnnnnnnnataaggatcttgagcagttacccactagatcaagcataatccagctccaaagtcgagcagaaaccattgtcggtctgctttcagtctaagacccgactgacagcccgacttctagagtattttactccaattcgtgtaccattcttgggctaggtcacttaatcaaacttggactactataatagctctacaaatttgttgtggtgactcatgacaaaatcctcatagatcaagagatatagaggcttaaagtcggcctgttacactgttttcagggtttaacacaagggtgtatttgactttttcaattactcaatttcacacaaacatggaaatccaacataaagttcttactttg

SEQ ID NO: 54576 - DNA, 539 bp, Arabidopsis thaliana landsberg
tgtgctctacagctaattgaattcatgaaccaaaacaagagtaaaggagttaacaacaacatacaaggttctgagcattgttaggcgggtcaggactttcggaaacggaccagacaatcgggtccccatgaaagacctgtgtaatgtgcatcaaaaccaacaaagataagattctgattggatttgatttcataagagaagcattgtagaagagatacttacaaattttccaagcgcatagaagcccattcctttggaatggcaccagtcacagagttacggcttatgtctctgcaccaaaattgttgtatgcgtcgagaaccaatttctaaagctaaaactttgagacagaatgaaaaagctcaagtctttctgattgatcacttacaaaactttcaggcgacgaagcttatatatatctggagggacaatgcctgctaagttctgcgacttcagagctctgacaacaaaattgccactattaaaattgttactgtttgacagctagattctgattaggtcgtcttttacagaactag

SEQ ID NO: 54577 - DNA, 592 bp, Arabidopsis thaliana landsberg
ctaaacctatttctaacatgctttatttgatctgtaaacaaagcagataaataatccttggcttgtaatacgttgtttattctcttgaggaagtccaggttatggacctttcctcattcttcactggcttcagcagaaaatattctacgagaaatttccagcgttaaagttgaggtcacgccacattgattcgttaaaactgcttcagaaagttcagcttaaactaggacaagcgttacttagatacatttgctatacattatctcccttgaactatcagatagagaacttagatcctcttgagcaacgtgcaatagctactgcctcaagagttccggatctacggtatcagtcaggcatcctgtttatcacttcatatgcattagcgacgtgattttaactaaagatatgttcatttttggaccacttttaagggataatcatgtcttactatctcttgatttctgatttccctagatctgtatgaaaagataccaagccatattgagccaaagctccttgcttttcagcgagaaggcatagagtatgccagccatatgtagcacctgtggcttttcttattaccaaatga

SEQ ID NO: 54578 - DNA, 663 bp, Arabidopsis thaliana landsberg
gtctgttgagtatcatttatattttgtgatatctctggatgcatgtactggctttttatatacaattaggtggcatcttatattactcgctctagtaactatcacattaatcctggtatatcaaaattcatttcacctcttaacttctacacgtgcataaaaaaactaattgcttggtgacgtattcatttcattatttgagttactggatgtagagggtttgctcttatgcagctgtcaacaattgacccagggttttataaaagcagtagttctgttacacattcactggttaaattttatgcttacatgattttgatcacagtgcactatggttgaattcaccttaccaaacattgtttgtatcaatttttttggccatttaggttgcacaatatatcgaaggaggctggattcagcccttgaggaatacttcatataaatttcctaatccaaaagaggcactggctgatgcaattgatgcagcaggtcccacgttggggcctactctactttcaatgagcgaatttctgatgtctagttttgatcagtcctaccagtcaaggtatgtataggtcaccagcagattcatgctttgttatcttttgtgagttacgctaaataatccatatgctccagatattgttgccttcacaagtatta

SEQ ID NO: 54579 - DNA, 642 bp, Arabidopsis thaliana landsberg
  unsure (1)..(642): unsure at all n locations
ttgcattcttttgtggggccgcggcagtactatcatgaccactttatttcttatgttnnnnnnnnnnnnnnnnnnnnnnnnnnncttgcgcacttagattatgcaaaatatcgtcctcatggcacttaaattatgctcatctatagcgttacaaatggcgaaaaatgttatgttcatcatgttacgagtgcttccaaattattagtttcattgttgctagaaggtggagttgctttatgcttcaagttgccaatcgggttccacaattaagttgttctgttgcattggtgctgggatcaagattagtgtgcatctgtttgccttgcttcctttgatctttttttttacaagcactatccactgagcctccctgaggtgcaagtttgtgctactgatgtcactcgcttatttaatatgtcattcaatgcatgcaggtaatcatgcatcttctgttcaggacagtgttatgggtgcaagcaagatggacaattcttatgttgtgctatcgaggcagaacaaagttcagggtcctagaattccccacgcccaggaagtgcagtggcggcacatactgatccaaccaatcacaagagcgatagaggggcatatatagtgctaccactcgtccgcttcatatcaaga

SEQ ID NO: 54580 - DNA, 611 bp, Arabidopsis thaliana landsberg
aagttggatttggccattctcctcttcgacaatcctttgttgaccgctccgatcgattctcctaattgattcatttcctaaatcatccaaacaagagttaagccatcatacctttttatattacaatagaaattgatagataacattattaattatgtctaaatatatacttgataagtcatattatcaggatcgatgttaacatcaggaggaagagaatgagtactgtcgtcagatgaatcatgagaagaactgccaacatgactttgttgctgggtagatgtcgaacggttcactacagattaaaagtgaaacgtacatataaaatacgtttcgcagatataaaaatactacaatttatctttaatgttgagaatttaacgtttaatataataccatttaggtcttggaattgatgggtaacatcgtcagttaacgcatcatgattcgccatgtcttgtgttttggatcaatttcgacatgcaatattagacattaaccaaaacgcatatataattatataaccacattaccgactgagttattaaagtaattattcgtcaaaaaaaacaagagaagcgaaaataaatatatacacttacattcttgtt

SEQ ID NO: 54581 - DNA, 753 bp, Arabidopsis thaliana landsberg
agcctgtgacaaaagaacagtacagtactcgatcaaaaactcaccatatagtagaggaagggatagagtgaggaaattggtagagctgcaaacacatgatatcaaataagaacgtatgaggaatcgcataacgaatcattactttcaacacaagaagccaatttcaaaacatttagcagtaaaaccattaagcaaatcaatttccggaatctcgtcaaagtagttgacaatgacgaatagtcaaaaacaacactatagccgaatccgattgacaccaaaaatctcaaggaaaattgacacaatagtaactgttatgagaaggcgaagaaggtgttacaagtggagaggacgataatccaaacgaaggaaagctcgaggtaaggatatcctcgccggagctgcttcatctgctccaccttacagccgggacatccgtcgtgatagttctgcttctccaacaacgcttccttgtactcctccgccatttcagaattcaattccagcctaagaattcacaacctaaaaattccaatattaagctaataagcgtgagaattaaaggaaataatcaatgggggaaatattcaaaatcgtaacggaatatttgaaaatgggaaaggaaaaatgaaagagtaccacacagagattctctcacagtatcgctggagctgaacgtgtgggagtgaaaaagacgatgagtcacgtatatatgtacaaatggacggatgtatgcatatatatatatatatagcc

SEQ ID NO: 54582 - DNA, 617 bp, Arabidopsis thaliana landsberg
  unsure (1)..(617): unsure at all n locations
tannnnnnnnnnnnnnnnnnnnnnnnnnnnnnnnnnnnnnnnnnnnnnnnnnnnnnnnnnnnnnnnnnnnnnnnnnnnnnnnnnnnnnnnnnnnnnnnnnnnnnnnnnnnnnnnnnnnnnnnnnnnnnnnnnnnnnnnnnnnnnnnnnnnnnnnnnnnnnnnnnnnnnnnnnnnnnnnnnnnnnnnnnnnnnnnnnnnnnnnnnnnnnnnnnnnnnnnnnnnnnnnnnnnnnnnnnnnnnnnnnnnnnnnnnnnnnnnnnnnnnnnnnnnnnnnnnnnnnnnnnnnnnnnnnnnnnnnnnnnnnnnnnnnnnnnnnnnnnnnnnnnnnnnnnnnnnnnnnnnnnnnnnnnnnnnnnnnnnnnnnnnnnnnnnnnnnnnnnnnnnnnnnnnnnnnnnnnnnnnnnnnnnnnnnnnnnnnnnnnnnnnnnnnnnnnnnnnnnnnnnnnnnnnnnnnnnnnnnnnnnnnnnnnnnnnnnnnnnnnnnnnnnnnnnnnnnnacggtgcagaccagcagcaatcgcaggcgaaggtgcggcgaccgggttttcttggctaaaattccagtgctgtgttcacacagccgatgcaatgtgtcgcgcagggcagggaggtggggt

SEQ ID NO: 54583 - DNA, 922 bp, Arabidopsis thaliana landsberg
agttttaaatatccaacaaattcaactcaactactttaatttagttttcaagtttccaatatgtgaccaaaaagtgaaagctaacaaaaacaagacctttgtgtagctgggggttcgaactccactttccctattattactttgtcaactaaaaaaagaaaatagaaagaaaaaaaatacacaaatttcttttggaaaaattatgcttgctacccaagctaactatttttgaatgagttttgattggcaaattcaaattcctccaatctgatcaccgggacgtgagcaagaacacgggatcggagatgattactcgtcatcataatctgatgatccatcggaatcaccggagaaatagaggcggcacgtggtatcgccagaagttggtttgtaatttctttcttcatgacctttggcaatttgtctgttgtagtttgctcaattacccgtaaattagcagaattaagttgtaacctgtaaaaactaacagtaatcagacaatccttttaaaaatatatatttatgtcgccggccaaaacctgtttcttgttggttacgtttgcccattcattatttactattattagggttttaaaactcagatgatcacttgttctttagattctgttacctaaacagtaaaagaagaattaattcatataaaagatccaaatccttgtaatccttctccgataacacattgctcctggaatctttttttttttttaatttgtttcatttgagggttcatcatcatcaatggaggtgtttggagataataagatgttttacatgagagacacatggagagaaggaaccatgatttgtgacgtcttacctatcaaccctagctccaatggtgttttgccgcaacaaaaattctcagatcctaacattcatgttcattttctggaattacgcg

SEQ ID NO: 54584 - DNA, 371 bp, Arabidopsis thaliana landsberg
gacgcatatccacatgctcgttgaggcggacatcaagctggctctctttcgcggcatttagagcttcctgatttcgggcgcgaagcacatcaatcgcgagtacagcttccagatgaagctcgaccagcggcggcgtgggcccgagttcatcgatcgctgtcatcaagaaatcatcgagacgccgagccaggctcgtcacgcgctatcctacgtcttgaacaactggcgcaagcaccaggaggaccgcaagggggtcacggtgacctggaacagatatcctttcttgaccgggatcaattttgtggggtggcgtgatcactaagaagcggtcgtccactgatgaggtcccaagacgtacgatccgctcgtgg

SEQ ID NO: 54585 - DNA, 1554 bp, Arabidopsis thaliana landsberg
  unsure (1)..(1554): unsure at all n locations
tcatcatgggcgacagacctcatgagctttaaagataccgacgactctcctcctcctagtttgaaatgaagaaacgtttatactcgctcttcatgacagatccacactttttttcttccacttatattctctacttgtttgaaaataaatatattgtatttgtttaattgataaatacaatgcgtttgctacgatcgaattgtatttaatataatttcagagaattatttgaatattttcaaacgcttcacttatgtaatgtacgtatttccgattccatgggacatacgtatgtttgaagaaagctcaaaatctatttgagaggaataaatataatataattagggcgagaaaatgttttatataatatagcaatctctcatgcatggttgtgtccaatgtccatccaaaaaagcacaagcaaaaaacatgtcgagacaagagcgaggttcttggacagatgatcatgcactctttagtatcagattcagtgatatttcaactcttcttttctgataaaaattagaaaacaaaagtaaagctttctagggtataaagttggctacatacatacacctcttaagttattctctataataacttagtgggtataaacataaagcttctttatgcaaaaagaaagatatgtatgttccttttctccaatgatattattatttaaaactatcttttttcgtaaattgcatctatctgattctgatcgtgtacaaaaaacatgaacccttcttttgtttttataagcctatcaacaatttgcagtctttcaacttgtaaactttagcttcttcttcctctctttttctcccaaacacaaaatttctctctcttttcttgcaacctaagttagctcctctaggttacttttgatctttctctgaaatgcgtctcaaaaatttccccttttttgttctcttcttcttcttttgcttcaacagcaatcaatcatggggcttgatgagttcgaaccaacaacctcaattcttcaaacttatgaagaactctctcttcggcgacgctttgtccacttggaatgtctatgacgttggtaccaactactgtaacttcaccggcgtaagatgtgacggtcaagggctagtcaccgatcttgatctttccggtttgtcactctccgggattttccctgatggggtttgctcttacttcccaaacctncgtgtacttcgtctctctcacaaccatctcaacaaaagtagcagcttcctcaacaccatccctatttgttctgtgcttcgagacctaaacatgagctctgtatatctcaaaggaactctccctgatttctcacagatgaaatctttaagagtcatcgacatgtcttggaaccacttcaccggtagcttccctctctctatcttcaatctcactgacttagagtatctcaatttcaatgagaatccagagcttgatctatggactctaccggattctgtctctaagctgacaaagctcacacacatgctcttgatgacgtgtatgctccatggtaatatcccaagatccattgggaacttg

SEQ ID NO: 54586 - DNA, 621 bp, Arabidopsis thaliana landsberg
  unsure (1)..(621): unsure at all n locations
ggcgcccgttgttccatcctccagggtgtgacggtcggcgccaacgccctcgtcgctgtcggagccgtcgttttcaagagcgtcgaccccgccgcgatcgtcgctggcaacccggcgtcgcctgtcggcaaacgtcaagagcctacacgctaaaatcgcgaggcgcacgccgttgcttcgcccgcagtcattcgattgatcgagaacccatgcatcccagcccttcccaaccgacgagcgacgcgacggcccgcggcagcgatcaggcagccgccttcaccttcgagtcgttggccgcgacctacaactacctcaccatcaagagtttcgcccagacgttcgccgacgtggtagtcggcgaagccgataagcgaggcgagcgatcttgtcgcattctcgacattggctgcggcagcggcattgctcgcgaaaccagccaccaatggcgcatcaaggatcatgcggccgactactggggcattgagccagacgaagggatcgaagcgattccagggctgctcgaccactntaagtacgccctcatggaaacggctgacttgcctgacgaatcatttgacattgcttactccagcatggtgatggaacacgtngcagatccgg

SEQ ID NO: 54587 - DNA, 1147 bp, Arabidopsis thaliana landsberg
aaaaaattggtttttccttttttttccgggcccaccgggtattagaaaaaagattagaaaccttgaatttaggtacttggtttttaaaattccaatccatatagccgataaaaaaaatttataatcatataagtaaataaattatttatgtaataaacttaaatgaattacaaaaattcaatattggtagctttatagggtaaattctaaaatagcaatagaaatgaagttatgtgatgtgattatctcctctctctcatttttttgtaagcattgtttggttggattatgataaaataaaaatcttaagaggtggtgtaatggtaggggctgacagactggcagccaaactggactcattcgtcatatgtgactcattagtcagtctctctctctctctattattcctttttttattgatactcaattatttgtttctgctatgtcgattaatttatttaacggctatctcagtaggtgttaatctgcgtgattatcggttaatctgccaacattttgattttttaaatactaaagattttcctatctatctcacatgtggtgtcagaataaaacaatttatcgtgatgatgttatcttacatatgctgttttgtttaggtagagtgtattttacaatattaaaaactttttaacttgggtttaatttgacactatttataataatactaaacagtaaataacgatttttctatggtttttgattcataaccatggcagattgattgattttacccttctattccatatcctttttctttttctttcaaggttatcagttaaaaattaaaatatatatgagtgtgcttgacttcttttttaatttggagtacctcggttgttgaatgtacgacaatatgaattatttgttgtatagttattatatttgttatttaatgattcatgtaatctttattaggtggctaattcactaactagtgagaggaattagcccgtggatccgttacatcaatcattttatgtgtcagaatatatatatataataatatcttttaacataacaggaacgtgcatgttgcagttggaaataaatgaaggtcatctttttttaaatttgcaaatcctaaaacgttatcagcttttactcttcaagggtactaatggtt

SEQ ID NO: 54588 - DNA, 903 bp, Arabidopsis thaliana landsberg
caatgatgaatccataatataattatgacgttttttcttttgacttctctttgatttgtttccttaactctttcatccataaacaatccccctgtcggagtgataacgatgctcccaaatattacaacaactcgatgcaaattctgattaaaagcaagcaaattgtctcagtctatacatttatgtttgatctcttcaatcccaatattgatcacatggtgtaaataaatatcacaaaaaactaacaaaaaagaccctacatgaaaagattattgcttgaaaatatctcaatatctacatgtatatatacaactaataagagactagttaccacataaattacaactcgaataaaaagttgagaaaaatacgggttcttaaaaaagttgctgcagtaggactaatgaagattgttacaaagttgctagccaagttattaatcagacaaaacattggttttgttttcactaagaattcaccattgtaattttgtttaaaaatgtttagtagatttgatgagagtaaacttgtttaaactattttattaaatcagacgagtgattattaacggtaatggattcagagttacaacatcaccattgttacacgtataaattaaaaagaatacatattttggaagaatcttattttggactgatatacaattaaaacatttcttccaaaatgctttacaccaaatcaaacggacttttcacgattgttcggcgccgccacgtgtcatctataaccttcgttggatcttgcctttcacacgtcaccatttttcattttcttcttcttttaatatcatctctttccctaactttctccgtttctcgtcaaaagatttttcgagaacaaaattcaccactgagaaagagagcaattacatttatatgaagc

SEQ ID NO: 54589 - DNA, 1240 bp, Arabidopsis thaliana landsberg
atccgataccctctgccctgggcaaattctcatctgacaaggttactagacttatcgccttttaccgctctcttaagtactatattatcactcaacattcttttaaaaatatgattgcagaaaatgtcatatataaactaaatccctattttatcataacgtcaatttcagacaattaatgagatatgtaagcataaaccatattcatattgaacaagaaaacctccggttacaattatatgtgttgtttaaaatggttacaaaatcggaagattgatcgctatgaaaaccttaaaccataattaatacatatgttagaagataattagataagtaatcatttaactagatttatctaaaaagtgattatgttgtttttgtttgagaaaaccaagtaaaggtgagtcttttctcctttgggaaaaacaaaagtagaattcaaaaaagaaagaaatagaattcactaattatatagtaatccattaatattactggttagaaagcgtaattagcggcggtggttatcaaaagtgacttccaccatatgtttcgaaagcttgagtttcacgaagaagatggaggaggggcaactttagactagtggagatgaatcgaatgatgatttattgtagattctttgtggtatctcatctttccttcgtataaggtgtgattcacaacaaatacaatttaacaaaaactagtttgtctacattcggtatgatataattaaggactttgtctcaaacagattaaagttcttgtttcatgattttagattgtggatgccttgtaccaatcttcttgtagaaatgccttctcctcctagaagagaaattacaccttacgtgtcgtacatgactacatggaacagtcactttgcagataggatatggtgttagacatttagcttgatacaattaattaatgtttaacaacaaggtttaaaggcaacgagagctatatctaataagatgtggtctaagacatatgagacctgatacatggagaatcactcatttataaatttctggtatattaacgacattttgtgtctaaaaaattagctattataatgaatatggtctaaaattgaatttaaattaacaaaactatctataaagtttgaaacgatcttacctaatcaaaacaaataattatctaagcaatctgttttgatttgttcggattatataggaccccaaacgtcatacataaaacttgcttaaaattttgtttt

SEQ ID NO: 54590 - DNA, 329 bp, Arabidopsis thaliana landsberg
tgtccgttgcatttttcccgtcaacgtttaaccggaccggttcaccacgtgttagccctaccttatcttcttttctgcgacattgttctgttttgcttgcgtgttattatcaccgcttgtgtgttagtttaggttaaattcagtttgacaatttctgttgagctaacttccataatcattttttttgccgtttgcgggtaatttaatctatcctcgtaaaattcgagcaacggcgtgatcgactttcttggttaatggtatgaggctcaggagttcgattcactgtgtgaatattgacctaattcttgtgttggacatactggtccaga

SEQ ID NO: 54591 - DNA, 756 bp, Arabidopsis thaliana landsberg
atggtatgtggtccagttttttgaatatcactatatatatttttctgattaacttttatggtagacgaaattcgaaacgggataagcttggagaaatagaagagaaagacaaaaaaaataagaaatggattaagaatgttggggataaaagaagaaggagaagaagtgacagtgatgatgataagattcgattttaatttaaaacgggtcccgaaatacagctggtgtggagaagtacaaataataatacaagtttttaagactatcggaaatgaatttatagagagtttgggtgggggaggagaagacaccaagtacaagtttatatccaataacaaaattgaggtcttggactgtggaaaatggaaactttaatgaccttaaaaagcgacgtgagttctgaattttcggatattttaagctcataaattaggtggtggacgtattagtagggagttagggactattggcaattcataagaggaattaggcggtataaacacgacgaaagtaggcattttaggccatcaagcatctcttaggattggtcgcttatcttaatgatctaacaatgacgtgatagtcatctttaagtttttttttttctttctcttggtaatttggaaagatgggattatgattctatagttcattgcttacgtttggattttgttagcttccccccttcacaactaaactgaaatctgatggaaaaacaagagggtcatactagcaacatgagctgaattaatcttc

SEQ ID NO: 54592 - DNA, 1148 bp, Arabidopsis thaliana landsberg
  unsure (1)..(1148): unsure at all n locations
acgaacccttcattttatgtcaatctttgatatctcacccctttctattttttttctttcagtcagccccacaatgattggggttatattgactgaccaagtgatcaattaatccatgtccttttaccaaaggacatgacatgagttggaaatttataattttcaataaaaactatatattatatgctcaagaggtaaaccaattgtatttcatatgctcttatataccttatagccatctttatttttacttaaaaatcatatcaattatacatttaacgtttttactaaaacaatagtgagtttaaagttaaagaaaagtatcataatttttaatgaaaatttacatattattaatatagatttgattattattctctatgatttttattatgccaatagtataaagggggttattgtatagaaagggaagaaaatggtcatatttataagcaaataataatgtcggataaaaactgaaaacattttggtatataaacatatcatcttctcgtacacaccacaattcttttgttttattatatactcttttttttttttttggtgtcacgaaaacgaacgaatcagtgtcggctcttgggttccgaacaaaaacaacattgtacgtcggatccaaaaaacgcgcgttatataaacgcttaatttctccaggattcttcttctgcttccgccattgctcgaaaatcgcgtcttctgacaatgtgctgaaactgagtcatcgtccgagttagcaaagtgaaacttcgaagtttctcttacactaatctcaggtttgggattttgtaagaaaccgcgtttacaagtaagtgcgtttgcgtctgaaactttctttccaagaaagatttattcttttcccagtttgcaaaagcaaaactgatcctttctcgttaattccttctacgtagaaggaaagatttcggattttatttgcattgctttttctagaaaaacatctttctgacaacatcgaatgcaaagattaaaattttcctctctgtaaaaaatttctgggaaaaagttttctctttttgtttgttgttagctggaaattgaaatcgcagtcgcaggtacccgcaaaatctactaaaaacactgaaagtatcgtttttttagataccanaatgcta

SEQ ID NO: 54593 - DNA, 826 bp, Arabidopsis thaliana landsberg
  unsure (1)..(826): unsure at all n locations
ggtgggatgacgaaatggagaggaccatttgctcggattatgtttcctctgttgtccttctggttttgtagttgcttagctgtctcgatgttgattttgaatgcttccgcgattatgtttgggtcgaaaccgctgaaagcgttgttgcctgatggccacgttaatggttgttcttcttcttgcgttctgctcccggctagttggaacatctacatatgaagggttcacaaaaaaatgacattatgtgttatatatatgaatcactattttaatcactgagtggtagtcatatagtttgcatgcagtacaaatttggactttcttgaatttgatgattaccctagggacttggtcaagctggttttctctgttggtgacatcaagaacaatgacaatgacggcatcggaatcaccgcggttgtaccaccactgtgaaactccggcaagcgaagcaaacacatcccctcgccggaaattctccaacttctggtgcatgtcctcaaaacgtcgacccgggtctcctcctcctcctcttcctgatgatccttcaacttctgcaaaagtctcaggacaaccagaagcaatcgtccccataactccttctcctgaaaacaattaaaataaaagaccactttttttagattttctataggttgcgagtttttaattaggnnnnnnnnnnnnnnnnnntttatttattttcttaccttggacaacgtaagcaagggcaggtgggctaaagaaagcgggcaagaaaatggaattgggctgaagggtgatgcgagccaccgttacaccggcgcatcggagctcanggctcatgtgg

SEQ ID NO: 54594 - DNA, 580 bp, Arabidopsis thaliana landsberg
acctacctaaaaaacctcttgcgtcttgcgtctgcggctttctttataagcgacacacctatattttagtgaatcaccaaaacaaacaaaccctttcttcttcctctcataatctctctctctcttcttctctctcgctcgctgctctgttttagggtttttctcgttcgtctcttctataagtactaggtttgttttttactcaaaaatcgttcaatgtatgttcgattttgaagctttcatgcatgattcctgttgatttcgtcgattttggtgttttttttctcttttttttagcgatttctgcgctgttagtgttcatctgtatttttcgtcgtcgtcgtttggtgttaaacaagtgatttttgttgtttcatgagtttctctggattttttggtcatggtagtgtttgtttatgttgaatctcactgttttttttctctttgaagctgcgttcgatgttacatgattttcgtcttcttcttcctctgagtaatcgctggttatttttctactctggattttttgtttttttggtcttctctctgacctctgttaagaaatctggaaaaataaatg

SEQ ID NO: 54595 - DNA, 599 bp, Arabidopsis thaliana landsberg
ccctgcgcatatctctttgggtgtctgtagatcctacttttaatttgacagcagaaaagccctcatccattgcctttttacaagattctctgattttatcatcgctgtaattaaaccaaccaatcgaagtgtcatatccaggatagcctacctttagtatgggcattcttaaagatgctgacaattgctggcccgtcaaaatggctaaagcctcctgtctggttaggacatcttctaaataactaagatccaaggtgcttatgatctctgctggagaaagttcaagaagtaatttccaaagtggtacgcctctttttttggcccaaagatcaaaacaagcattggttacggcggccagggccaaatgtacgacacctttatggggccctaaccacctgaattgctgctcattagacaacctgttgaacaaccctccaaaatctaccattacatcttctatatctttgccttttaaggtctgactataaaaatcagctgcctggcaaacaagttcgttaccagcccctaccgtaaaaagcaaaccagaacctactaggccactatcatccaccaactcaactacagcgtaagaatatact

SEQ ID NO: 54596 - DNA, 456 bp, Arabidopsis thaliana landsberg
  unsure (1)..(456): unsure at all n locations
nnnnnnnnnnnnnnnnnnnnnnnnnnnnnnnnnnnnnnnnnnnnnnnnnnnnnnnnnnnnnnnnnnnnnnnnnnnnnnnnnnnnnnnnnnnnnnnnnnnnnnnnnnnnnnnnnnnnnnnnnnnnnnnnnnnnnnnnnnnnnnnnnnnnnnnnnnnnnnnnnnnnnnnnnnnnnnnnnnnnnnnnnnnnnnnnnnnnnnnnnnnnnnnnnnnnnnnnnnnnnnnnnnnnnnnnnnnnnnnnnnnnnnnnnnnnnnnnnnnnnnnnnnnnnnnnnnnnnnnnnnnnnnnnnnnnnnnnnnnnnnnnnnnnnnnnnnnnnnnnnnnnnnnnnnnnnnnnnnnnnnnnnnnnnnnnnttgacgagcactgcgatactgatccagtngtggttccagaaatgtttaaggattggtagtgggtggattcgtgtaaattgactcaaacttaaatcggggttta

SEQ ID NO: 54597 - DNA, 471 bp, Arabidopsis thaliana landsberg
ccgtggattagccacccatgcatgagcacgtcctatggttgatgatcctgctgtcactgtggatggatttgcgtatgtggatgggtgcatggaggtggatcaggggtggccaagaatccaagatcacccaccatatacaacactgggcagtgtgcatgaactgagaaaagcaatgcaagctcaaaagggtggaggagggagggtcagagaaggtgcaaatgtgatgcatcatgctttcaagaagacaaaaaaagggggaccggggtgcatttccaggctttagctttcactaatggacgctgcgcgcaaatcctgacgttcgttcacatcgcctgccgttgtggtgatcgatcgtgggggtcaccaactccctgcggtcagacgaggtcgctacgtcacgaatcacgacgcgggcgcccagtggtttcgtgatcagaggtggctccactgcaccacaaggtaaaatttttg

SEQ ID NO: 54598 - DNA, 747 bp, Arabidopsis thaliana landsberg
aatcaatctatataaattagagaattttcaaatcaaccaaactaaaaaaacctaaaactttttaaagatttgattgaaagggagggaataaagacgaaacctttttagcatccttagggactccatacccagagtaatacatctgacctaacaaaacctgcatagtgatgttcccagctttagcttcctcaagagtgtctttaaaccaccgcttcgcacaatcagaaaccaccgatgaaagcggaacgaaacgtcgggcagtttcgctggtggtggtggtggaagatgaatctttgtcggaactgtccatggaggaaatgggtcggatcggtattgaggatttgatgaatccagctactgctgcggaagctcctcttagccctgttttgacgggaatcgattttcccatttttaatttataaacataaaaataaataaaaggaaaaaatcggttttcttctcaatctcttgtttggttttggtttggtctcattgtataaaataatattaaaatatcttatgggcctagctcttaagcccactagaatttttttatttttttccctagcccactagaaattaagactagctccttgctatttcataacggttactgaataaagagctctgtctatataaaggccatcataaattcttcacaattgcattcttacgctctcgtctccttgttttttttagtagcatgagttcgtctaaggttttagtcagacaataacggtaatcgag

SEQ ID NO: 54599 - DNA, 559 bp, Arabidopsis thaliana landsberg
acatctctatgacaaaggactgtttctgcctttatgcccttttgcctttatgcctttattccccatttttgagcactggtgagcctgagcctcaggaccatctctcaaatgaggacacttatctttgacgagggggcagcactctgcagaggtgatacctcaggagaagtctaaagaaatatagacttttccaatctaccagttcaaaaaccagaaccagaacccaggcaatcaggctacacggtgaacaagtccacttcattctgcaagcctcttaccctctgctccaattgtacttcagttcacctaaacctcatatcactcccctgaaaatggactttgggaagggtcattggacagctttatttgtttctcttcccaatgagcacactgattaaatctctttttgtcaccattactcaccttcaattggcaaattgagaaaagcggctccattgggatttatgaagccagaccttccacccttaaactctcataactagagagcccatgatggtcattggaggaagccatgtgtgatacaagcatgtacaacctc

SEQ ID NO: 54600 - DNA, 686 bp, Arabidopsis thaliana landsberg
agcatccacatcttacttacacgttaacagataagagaaataaagtatacaaagacagaaaatcaagaagaaaaaaaatgatgaatggaagtgcaataaaaatagtaatgtatagaatccaaacaacatacattatataaagttgtttgggtcatttaagtgattctatagcatgatcacaaagagatcaatccaaaattatttgtttgaattgtattttaactattataactgaaatcatagtttataatggtatttttgcgtgtgtgaaaattgatctgtgtggtgtggtgtggtgtcaattgatttttaaaagcttacatatctctcttttttttgaatatgctgaatttttaaaatattgtaagtttgttttacatcaatatcatatatttataactttcctatccactagtcaattatacatcaataattttcgtaccaattgcaataaatataaattgcaatgtttatggagtttgtcaaacatttgctcaaactaccccacggagaatacatgagcaaaacgagagaaatgtaagaggaggccaacacagaaaaagacacataatcaaatcaaatcacaccaaacacgtctttgtgatctgatcttactgtctccattcatcactcatttttttggttcgttgaccacaactttacaatatctactgttttttttcttt

SEQ ID NO: 54601 - DNA, 1044 bp, Arabidopsis thaliana landsberg
agatctccgaatccgctgtgagagatcttagtagtgatatcgtagttgtctggaatcaaggagttcgtttttttaaatccttaagcagtggaggagactggatcaagttcttcaaggtacaattctactctttatgctcaccaaacatgaaaaatatctcattgctctcgtttcctaaaacaaaacataaaaacagattgcaggatcactgtatctcctcaaactgattgtatcccgttcattggcagcatttcttttcacaggtactcgaacaaagcttttgttttcacacttcataaacatgattaacaacttcataaacatgattaacaacttctttatccataacattttctctacgctttgcttggacagttatgtcgttctcattcaccggtttcttcatctacgagcaatacgagcttgagctctaccacctagcccggatattcgtcgaatgcttaacatttattaaaaggatggtgatacctgtttctgatgcttcatctaaaccaatgttcatgtgaagcttccaaagtcctccactaaacgaacaccaacaatcccagagactaattgcagttattagatgtcttatgtacaaacattatgctatcaggatgtaatcttcactgagaggggatggatatatgattatttacgaatttgccataactactatcaaaatgcaccgttttgatccggtttccaaaaaaaaaagaaaaaaaaggaaagtatccttatatatcctttaaaagccgccgcttcgatattccctggcctctctttctctcacaatctaatcttcttcgtcttcaaactcaatctagggttctcttctcctctctgtaggtaggattttgaacactcaaatctctcatcgaatttttcttgctcaacgtatcatcgcacaattcgtctctcgtttccgccacgtggataatcgaaatctcataatcccaaaggtaaaacaatcaattctgggattggacatttggatcctaggaatcgtcaattgaaacaatcccgatggcgttatctatg

SEQ ID NO: 54602 - DNA, 1694 bp, Arabidopsis thaliana landsberg
ttatatatatatataaaaacttctgtaaattactttcattattcattcaggagtacgcgaattgagaaagggatatggccagtttttttgttcttctaaagtaaccatcacttatcgaacattttatgaacaataaatattaattcaggtctctaactccggctacttaatatccacaaactccatccggtttgaaatacgatttatattcatgtttcgttcgacactcttgacagtggatttgatggtctatggtttcctcggattttccgatcaccatgtctttgatcttctccatcatgtcctttacttcactttatccaacgtttcttctgctgcattcttgtcttatccttcaaatttccggtagcgtcaaagatcgtcttcgctccttcatccgccttcttcgccaactacacgtccggtccaatttttttcagttcaaaaccgtattttcaatatttggttgcacaagtgacatttctgtttactaattttacctaatatattcttgggagattgataatgacgactttttcttgtgcattagttgttggattcatcacaaacggaattctccatcctcgtactcgtctttgattaataattgcaagaacttacgaataacgttaattaattaaaaatgtgataaaaataatcagaaaaagaaagaatctttacgtacgtggaagtgttttgtcgtgacggggagaagaactctaggagttgcacctgcattgagtgcattgttgcggaggaaagctgcagtagataaacttgccattttgggattctcttttgttgtcttctgtataaagtaattaagaattgagattagtttgttaattaggatttgtagttttggtaaatttatacattaatacaaaaaaaaatggaaaccgtgaaggagtgtgagggagacacgttacgattttgggggagacgtggcgagtttgtctcattgtgaggttttctgttatgctttgctaattacagctgtgtgaccaaatccttttttcctttatttccatgtcctctctactatttcttttggttgtacaattttgtttaccaacatgtagaataatatatctatgtggatgcaaatgaaagctacatttttcaagtaatgattctttttttctagtttttgtttcttaataaaaatcccatcgtttacggaccatgagaaagtcaaattaaccgacagtaatagatgatcatatgtatcgttcttctaaaatatccgtgaagagtagttgaagttcaaaaaaattgtccaaccaaaattttatttcttatactatacatgtctaaatatgattcaagaattcttctatatatacatgttttgttcttttcatttgtcaacacaaataaggtggttcaccataacatctccattcccattggaagaaatatgttactacaatttcactcgccaaaacaagagaaacaaatctctagatctaaatgattttgatcctcgaggcttcacgtatttgctacttgtataggagatttgccttatagtggacaaatccaggtaaaaaaattctctagaacaataagccaaaactttaaaagagtgaataaactcgagtaattgttgttgtgtgtagtaaaaaccatgagaaatttaagctttgaagaagtggttttttgaagatgttatgctttgaagatgataactc

SEQ ID NO: 54603 - DNA, 1612 bp, Arabidopsis thaliana landsberg
tttatgctctcgctcaatgatgtttaaggtagatttttacaaatttcagtaatcgaactttacatatgtgaactaaacctaaaaagtcggatatgaaaatgatacatattacattttaactttgattagattgattttattttatttttatctaaaaatcaacaaatcaatatcaaacgtatataatcatgagattcatgtaaaatcgagtttcaaaaatgaaaaaaaaatactgaaaaaaaaatgtgaacagaaaagccaaatagaattgaatattaccaaaactaaaaacctgtatattataagatttatatccaagtcgagtaagtgataattacaagagagatatagagtcagcaatatataacacggagtgtccaatcctgtcgagagaaccatgtcgattgacctctagttagttgcgtatgtggcttgtgtgccgttttcatttctcacgagtcactttcctgtcgttttctttataaccaaccttgttttcattcgccaggtcgaccaactgtggccaaccacgtgtacctttcttatcagtccaactggcgtttttgctgatttctttccgccgttaatacgcagccacgtaagccagtctggcacaacagtgaatttattttattttattttccgtatgattcgtttatttaggtgatcggacttttcaaatgttttggaaaatttacttcttcgctcccgcctacatagtaaaaggtaaaaaaggattacattatttgctgctaaccaaaacgttctagccaaaatcggtattaaaaaactgcgatgataaaaccatagcgaaattgggttttaaagggacggtataatttgtgtaagagtatatacaagtagctagcaacatcatatatatatatggtaattggcaaacgtgagatcgattaactaacaaaatacgtaaacggtatggaaaattggagtacagtttacaacttataaattataatccattcttgttgatattaacagctaatcgtatagtggataactgacatgctttctacattgctgacagtccaatatagaaatcgatttttctataaaacaaaaaaaaagagcacaaaaaagcagagacatgcaccactcttaagtcttagccatgaagcaatatttttagctaattacaaataaaaccgtaatttttagatatctaacgcatatgcatattgtcgaaataaatctagaaacaacacgatttgagttttggatgcgttattgagcttccaaactccaaactctgtgtacattttgacttattaaacctaatcggctaaaccatcgacagcacgacacgagccttcgtactaggattataaaaagaattagtggtgcaaataaataaatattttattggaattggaaagaaatcatatatcagtgatgatttgtaatgactccatccaaataaaaatgattcaatcagtcagcagaattatgtttcagtgctatctgacttgaattcgaatatgatagtttaggtcaaattggtagaacttactaaataaagtaggtgtaatagaatgaaaagtaataaacttatatagtaatcagaagaataacatctcttaagtgcccattttgt

SEQ ID NO: 54604 - DNA, 824 bp, Arabidopsis thaliana landsberg
gatgcaggtcagcgataccgttcatggggccagaatcgacccttacaattgtgttatttatggcttttacaaggaaaaccgttgggaggacgccctggaattcctcttaaagatggagaaactttttccgagggcagttgacaggagcttcaagttgataagtttatgcgagaaaggcggtatggatgatttaaagacggcctatgatcagatgattggagaaggaggagttcctagcattatagtatcccattgcttgattcatagatacagccaacatggcaaaatagaagaatcacttgagcttattaacgacatggtgaccagaggctatttgcctcgatcatcaacattcaatgctgtgattatcgggttctgtaagcaagacaaagtcatgaatggtattaagttcgtggaagacatggctgaaagaggttgcgttcctgatacagagagctacaatccattgctcgaagagttgtgcgtgaagggtgatattcagaaggcttggttgcttttctcacgaatggtggagaagagtattgtccctgatccttctatgtggagttcactgatgttttgtctcagccagaaaaccgcaatccacgtaaactcctcattgcaggacataatccaaagttaaaagctagaggcagtgacataaatgatcattgagctcgaacttgaggcctttaataatgcatctgcaacaaatacgaagatggctccaaactagcaagcagagagatcaagatggtacgtttgcttcttttgaaaatctgttaaaagctttgggagaaaaggagaatgcctaaaatcagaag

SEQ ID NO: 54605 - DNA, 1116 bp, Arabidopsis thaliana landsberg
ttgttgtaaaatacgaaatggttggttttactttttatcttttttcagtatgcattttgaaacttattagtggattatgaagaaaataaataagttgggggaattttgcttttgctttatttataacaaccatatacataatagcttttctttatagcttctatgtcagcgaccactgaggtaaaaagaaaagcagggttttggcctttgttaaaagatgtgacagaataaagatttatagcattcatcaattacacgaaatcaaaatggcagagaaaattaaaacaaagtaaagaaatgaaatggcaaacaaaaatataaagagagagaggaaatattcgtaaattaaaaggtcaaagacgacgaaacgttaaaataaagtcgtccatgtgtatactttggtggagcccaatgccacaccaaacgacccaacccattcgaagcttcaccacattttctttctcgtgtgtgtttcttttgactgtttttctaactcttttttatgactttcactttaagaaattggatctttatcttactactaagtctaagtgttaaccacagaggaagaagaagcaatttaggtggatcattttacggatttgattttttactttgatcttaacaaaattgcttcttttggtaataaagtaattaaatttataaaactttaaaatgaaaatgtggagcccataaaagatctctgaagttgatggagaaccatagaaacgagagacttaactgctttttgagacaacaattggtaatggattatgcaattatagctattggtctatttcgcattcattttacactttcttgtgattttaattattgtgatttgttcctctcttttctttcttcagcagccttttgtactcttgatgatgtgaattggagtgtaatataacacccctcaatgttgttaatataagtgtttcaaaaatagtctacttatatgatataaactaaagtatatggaggaacaaattcgaagatgctcgatgttatcataagctttaatactttattgaagaaagcattttatgttgaaccgcttaactatactcaacaagaaaaggtaaattctaaccgaaacaatataaccctttaatt

SEQ ID NO: 54606 - DNA, 419 bp, Arabidopsis thaliana landsberg
aaatcgagtgttgaaattacattacttgggtttggttttggaccatttttgaatctttcatgccaatttcactacccaggtggttgatcatcaatacctagcttatgggaggattattcttcttgcacctaattacctttgtgtttgtattaatcaattgaaaaagattatggttggtgctgagtgtgggaacatgccaaagtgcgtacgctgagaacatgtacactgactttgttccgatggcgggatttaccgacgttaatcaaggttcggattgtactttgttctgattgaatacattagatttttgattcttcgagcgcttttatgtatcatactagatatgctactctatgttgagcacgatactgaatgaaaagttgaccacaatttcgatatgacaccatatggtgaaacca

SEQ ID NO: 54607 - DNA, 132 bp, Arabidopsis thaliana landsberg
  unsure (1)..(132): unsure at all n locations
cccccccccacacacaccccccccccccccccccctccccncccccgggggcccacgccccccaaaaaaaaaaacaccccccccccccccccccccccctcccccccccccccccccccacccctcccccac

SEQ ID NO: 54608 - DNA, 474 bp, Arabidopsis thaliana landsberg
tatttcaacagctaattttcaaccgctatttattttatttaaatttatcttgtcattatatttcgttattgataaatatctgaaaaagtgggtgacaaaaaaattaccgattcaaattattgtaataaaattgacaaatcaaaagattgaaatagaaaacaaaaatggactacatttctcaaaatggcaaataatttttattcatatttatcaacctcgaaatgacctacatatatagagacacaaagatcacaacaaaatcaaccattcctttccttatcttcttcctcttttgcttttctaatctctcaatggctaccttaaaacacaaacctgtaaatctggtatcttacgtttataatttgaatactatattctcctcgcatagatccacgggcgactgcgcatgctactgcagccatcaaaactgatggtacagtgagctttctcgttatcggagactggggaagaaga

SEQ ID NO: 54609 - DNA, 889 bp, Arabidopsis thaliana landsberg
  unsure (1)..(889): unsure at all n locations
gcgccttagtgaaacattagagagaattggaaacgaatgtccgtgtcatttaagttgaaaagaggggcgcgtgagagaggggaatgcataagatgtatgttatttatacgcgccatgctctatnnnnnnnnnnnnnnnnnnnnnngatattgggcccaattactaatttttagacaccaaagcctcccttcatatttttttggggttttcaattaaatttctacatatttctaaatatttaggtttgttgaatgatgtttatttcttattttatcactctatttttctaacactttaaataattgattatcttatttttatttgaattagatttacttttttactattttattttagaaaaaaattatgaacaagttttttacacgtattaataatttgatttgttgactgacacatgttagcgatcatgttaattactaattttggaaaccaaagttttctatgataagttcacatgttaagtaaatatttaattttaacattcaacttctcatattagattatgttaataactacttttgagaaaccaaattttctataataagatagcatgataagtaaaaaaaaattcttaacattcaacttctcatattagaatatttaatatagaaaatacaagaatttggttccggtatagagaaacttattatgcaaatggtacagctagaagaataaaagtggtataataaaccattcttccaattctatacttttgggatgacaaaaaagtttttttttttaaatgattacattgaaaagggtgaaaattaaaaaataattattattcaactctttttttactatgtcgcaggtggaattgattgcctaacctcattcatctattttttaggttattagaatataaaat

SEQ ID NO: 54610 - DNA, 922 bp, Arabidopsis thaliana landsberg
atgttttgtgtctttaggatccgctagaaaataggagtctctttttatataggggctctcgaatcttcgattattgggtactaacatcgatacaccatttgtccggtttctgtttgggtaattgactgaagtggtggactttggcgatccttaaacgaaactcatttatatcgactactaactaatttggtttgctacatctgctttatatctcttctgtgtcactttactaagtgaaatttaagatttctacatacaaattaagaaaacatatcaattttttgtctagtatttttgtttatgtaaaacgtagctaagtaaaataaattcaaccaataaaaaaacagaatgcaaaatataatgagtaaaaaaaaaattgcatagaaatttataattatcacttaacatgaaacagaaggaatcttaaaacattgcttacaatggtaccaaatgaataaaattttacatcttcttcttttttattgcaaagataatcacttccttatgtcattattatatgtatcctctctattttcttgtgtgcttctagagagattccatagggaatgttagtgcagaaaacaagtatatgttttttggactttcatttcaataaaattattgcagatagataaagcgacaaaattaaacacaaataaagtgatcactccatgatagagaacaatttgattttgtattagtataaacttttcttcctcataatccctgctttacggacataattgcatcttcgggaccaaccattgcgttataatccactagggcctagactaatcgatctcaaaacattagtaataaaaatatctagaaaatcacgtatcaaaccgaaagtctgtgcttaggaacttgttctaatataaagtagaaaagggaaccctacatgcactgatgcacgagttaa

SEQ ID NO: 54611 - DNA, 592 bp, Arabidopsis thaliana landsberg
ataacccgtgtagctacctttgattttcatcgctcaactaatcctactttagaagtgacttttgattaggtttaggtcatttatgtgtttacttccatcaatgcatcattatcaaaacactctaatcaattttgcactatggggcacccaaattctacaaacctggctaagtacgatttcaacttctcgggatcttaaaagctaataagtacaaatttagatgcaatcattctatgttcacatgattcacagtttggttttgaggtttctatgtatttggcttatcatggtttctttactttgtggaccaccttttatatttgtaaaatgtaaaataaagttatatttttaaataaaaccagaaaagatttgggctttatcagccgtttattgagacccattgggtatatactataatctaactcaattacccaatgttatatcaaccatagatattaattaaataaaattcgttggttatatatctcaacacatctctatacaataactgtttttctttctgaacaaacatataataacggttttagaaattgcatctggcagagaatagaaagaataaagtaaaggaatc

SEQ ID NO: 54612 - DNA, 835 bp, Arabidopsis thaliana landsberg
tcctgctgccatcacatattctgcatatataaagacccaactgcaatgatcacaattctcagttatgagaaaactaactttcttgagaacttaagctatctaacccgtatatcagcacactaacctgaagttggtgacgcaaacagagcggattccggcatttgctgcagcacgacaagcgatggggacaacatctgagacctgatgggaccagtatcttcttagttaatttagaagccaaatactcagaagcatagaacattatcttaaaagcatttctgaagtaccacaaggttggctttgatggactttagccactcagcctctgtggctaaaatagagtctcgaggttccactgcaatctcacaatactgcaaatttgacgaaaaaagaatgattcaagctaagcacctaatggtctaaaggtaaggaggaaacatctcagagagataactggaacagaccttctccaaagaagcacgacgatctacacttaacgcatcagcttgtacggatccacagtccaacagtacctaacatcacctccatacattgtttaaaacaattagagatccatctttggatgtatcagagtgaaactcaacaaatatttctatgaacttaccttccggataaagagatttggtgaatgaatctccatggtgaaaacaaactctggagcagcagagacaacatgaactcgatgtccagacgatatcagataccgaaccacctaaaaccattgcatgaataaagataaatctacgatatcaaaatgttatgatctcagggattctaacctcgacaacacgagtggcatgaccaaagccgggct

SEQ ID NO: 54613 - DNA, 1181 bp, Arabidopsis thaliana landsberg
acattaccagaccatcaaagagtgtattaaaatgttctttgatctaccaatctttattcaaggctggggaggaaatgattcggaaggcggatcattgcgtggaacgttaggttcaggagacactaccgggatatccaagctgaatcttctgtcccgttcagtctctgcagatatttctcttacatcagaaactcttgcctctgttgcctgaatatcattccattcgttttctcccaccggaggctgagcgtttactacctgctcttcactcatatggactacattctctcccggtatagaggctgttcttgaaatgctcagacatgctttatccacattcttttctgtttcctttgtcattggaagagaagcttcgccgttagtagactcagtcttctcctcacacacttgctttgtctctagttgctgcctgtttattcaaaaataaagagatttatgacccttcaaaagtcatgagtttccctgggagatagattcagataggctcacctttgaagctgagtttgtaacatattcacatatgctaaaagctcttgcttctctgtccaagcagttgcttctctctgagaagcctcttttgattttgcttcaccgcttgcttctgcaaccctcactttctcttcggccctcacaacagctccttcaagtatgacaacacgctctctggctttcccaagctcagaccgccacatatgtgcctcttggagagcagcgtctctttccttaaccaattgatctttttccttactcaaagtaaaggtcttctcttccaattccttgagctacataggagataaagatcaaataaacaacaaaacatacacaaggatgcaaaagtatctatatatgacatggcctcattacctttaattttgtggcttcttgctgtctctgtgagtctgtagtcaagcgctcaaattccacacaaacgattttcctttgttcatccattgtatgagcagcagatgctgcagctacagctgcttcagcagtctcagatagcttatctgctatttcctttatcattgagtcacgagaacgaagttccctggctaaattatgtaattcttcatctttgacacgcagagtttcctgtaagatgtaagtggctcaataaggttaacatggacattagaatgaagatggacgaataagattta

SEQ ID NO: 54614 - DNA, 452 bp, Arabidopsis thaliana landsberg
cgtataacggttctctactgaagaaaacaaaaaccttcatctatacggatggagtatggtcatgagtgtaggtgctaatgttttagacgaagatgttttatgaagacaaagatttcactgtaaagattgaagaagttgagggtgaactctttgtccacctaactctctggaaggccagtaaggaaattctagaacgtgtattgaaaatctgggcagagcttaaggtacgagcatggttggatggatatgatgaaatctccacctacactaaagatgaacgtatgtttaagttcttcccattctctcaccctcgcggtgaggatgaatataaaggagaaaagttcatggtggcaacatgggcattgcaataatacttggagctgtctctctagctggtggactagtctatggtgttgatcaatcaggtgctcacagacaagccgtttgagcgt

SEQ ID NO: 54615 - DNA, 1098 bp, Arabidopsis thaliana landsberg
agattaacgatttgaaaaatgtggtccattgtaccattatttcttattggttaaatggaggacggttacgaaatggcagtaccttaagtgttattgttaataattgatctgataaacttagcaaaagataaaatggtacctacacataattagaaagtccgccaactaagtacaccttatcggtcaatagttaatgcacaacacagagaaaatagatagttgaggccggagtctcccatgcagttattagcaccaaaatgttccctaggtagacttttctttaagtgtgaaggcttagtgtactgcattcagactataaatgtaccgctcttatcttgttgcattatctgtccaagtgtatgcgcgtctccttatcttccaagtctttttagtgtgatttgttctactgctgtgtgattagttgacaatttatctcggaacatcaacttacccggtgcagtctgcttcctgttgaagcttgtagttgtgttatacctgtgtctgcctgaatagtctagtcatattctttctctatatatgcttcttgagtgtatgacattctttactggcttatctattcacatgcgccatgcgcccttgatgaagttgaatctgctagaatatatgcttattgcaggagaaggctgtgttctttactctaagcggatatatttgttttgaatgtgtgctgattttgcaggacaggcaaaggaaatcctcctgttacatttgcgattgctgcttctgagactcagaatgttaatgtaactgttttaccatgctttggattgtctgaagatagttcttttacagcgaaagatatgtgggatacaatggaacaggtgactttctctagatcatcgttctcttactatgtgcatgtagatttcataccttgtcaaaagatgcttttgactttatcattgctctttgtgctgaattgtcaatttgtaagacctttggtttaatatatatggcgtcattttaataaatgagactaaagctgcgatatttaacctacaaggatgggacatttgatcaagaaaacttcaatagcgggccaagcacaccttcattagctggagacactatctgtgc

SEQ ID NO: 54616 - DNA, 1285 bp, Arabidopsis thaliana landsberg
ttctgtgactcctttttccgattttatatggaatcatgtttagtgggtaaaatatgtatgcaaaatttgacgataaattcaatatatatatgaaaagtataataatgtttctaaagaaactaaaaaaataaagtgaaaataaaaagagaaaaatgtacaaatcttttaaaataatcaaaaatatagtattcgtgctagaaaaaagaaaaaactacaacatgattatttcaattttggagctattttagtggctttacaaacttcctacacctcaactaatcatgtctatatatcttcaatagttatctgtaattttttttggtcaactgctctataatatatttataatttatttttaattagtatagataattataagattatttcaaaatatatctaaaatttttaggttttcttataaatatataatcttgaaatttcattcagttacactttgacaagaggcaagactagtatgaaatgacttcatatcatcttaattcaaattaagattttaaaagaacaaaaaaaatcaaatcttgttgtaaaaagtttgatcttgattagaaatatccaaatatgagcgagatgtgttgttgactaaaggataggaaagagaatggggacacacttgaatctcttctctctcacatgtctaactcactttgctatttctttctttgcttcggacagtgagccctctctcctaactttatttgttttccatttttatattcccctttttctcttttactttttatctaaaattcttttttttaattttcttttaaaagttttgaaagtgatttattaatatatatatatatatatatacgtacatatattttgtttccacctaatttgaaagtttgtatgatgcatttaatatccggtggctaaagtacccgaccaaaaaatccaaatagtcaaaatttggtgctagatataaataaaagttttctagagatatatcatatattatatattttgggtttaattagatttgttttgctactccattatgaataatctttacattaatttgttttgtttaatgtcaacaatattacatttgcacacatttgacttttgacaataaaataaagagttttgactttccttctttcactttttgttttgccaactttttacctaaattaatgtgacttgtcttttttttacttagaaatttcatgataggaaaaatttgaggccgaccattaatgaacttatacaatattttacttgctcttcttacataaatagctataaacatacacaaatc

SEQ ID NO: 54617 - DNA, 627 bp, Arabidopsis thaliana landsberg
tttgaatttatctcgatcaccctttttgagatgatgctgtcaatcttctctcttttgttaaaattttgcaacgcttggccactaagtaattctatcaagtgaaagtagatttccttaatatcttgaactcgattgttaagtgcactatctattattttttcgtgttgaagtggcacctgtcttcttcgatgagaatgttaaaagcattcgagtcattgtattttcttattcttctaatgattctcgttttcttagtctattagtagagtatcttgcttagtatcattcttttcttggttagattgttgatgaaggctatcggtgattggttgttcttaatggaaccaaggaatatggataatgcatgaatgaactgatggttagtgcgcgggttagaaggactcggatagggaaggataatctggatggatagacatagaggtatagtatactactatagacaatgtagcctataagctagtaaaaaaagttaaatagaaaaaggaaggattatgtttaaaaggttccagctgcgtaattgttgaggatttactgaatcaagcttgaaacgactaggtaatgttgttttggattaaggatcaactcgatagaagtaatacctaaaga

SEQ ID NO: 54618 - DNA, 524 bp, Arabidopsis thaliana landsberg
  unsure (1)..(524): unsure at all n locations
aagttacgtctttttttcttaaatgttttaatttagtagagatattaataatataatttttgaacatttatatggatgatatagccaaattttaccattttatttagtacttaacagcacatgaaattttttgtaaagaagctagtagttctatttagtcgagattaaaaaaacaaactaatttacctgaatttcttttcatactagtacactatttcatattcacagtctttatttaaatcatacatggaaaaatattaatactaccacatgattttggcaaaaaaaaaaaactttccaaaaagctatacatccaagtaaccctagtccctttgtctaccaaattggtttggtgtgagtaaaacttatgaattaccgagaagcacctctagcctaattgcgttccacctgcgaccgtctcttttcnnnnnnnnnnnnnnnnnnnnnnnnnnnatggcttggcttggcgcccacattttatgtatatattacctcgctcatggtggcagcagtttagaaatagt

SEQ ID NO: 54619 - DNA, 1161 bp, Arabidopsis thaliana landsberg
gcaagagtggaatatctagaagcttctgtgggtgtttcaagcaagaaaaagattgtggttccacagcttctgcaatggcacatgaaagattttgcagatgatattgaatctcttttggaatggatctatagccagttgcctcgatcagggaacctaaagggcatgattatggaatgtctaaagagaaaagcaaaagttcctttagctaaaattgtagagattcaaacatatggacacgaatttcgttacttgttgtcattgtaaacatgagaggtccttatctagaatagaataacaatgtttggtaacttctctctcggatgtacacattctcgtctgttgcgatttacaacaaatacaatatagtttcatgtgaacactttgacaaaagaaacaagacaaaattaatattcgacaatcctaaatgtttgaataggagcggcgaaattttcatcaattaaagcaaaccctaataaagtgattattaaaaatatttaatggaaatgagtataaactttagctaaaatttgtaagtggagaagacataaacatgttccgttcatatcaccaaaaaggaaaaatgaagaagtagacgacttgtggacttatggttacgttttgcatcaaatgctgtcgggaaatacttttttaaaaaacaaatttcatcggtcaaaaatcaatcccacttattaaaggcttttcatagaccaatagccattgaattattcttgcttctcgttctacaacactaccaaatctaagtgggatccccgtggatctaacactaacgtgcatcaactatttggtaatggctagttagttagaaataaacaagaagattagtagtattaagtatcaataatacaaccatgttttaagattacacgagattaaacgttacaagttgtaacttacaaccaaaccatgtaaaatactttaatagctgcgggctgctacaaaatgttctcacagccacttcagctactcactttctctttctgcctcatttccccctgtatcactcacaattaaaacaccaaacccaaaaaaaaaaacattaaaaaagtgaaaacacacacaaaagtcaaagatactttcccctgatttttctctcctttccatatataaaacttagtaaaaaaaaaaggaggaggaatagcg

SEQ ID NO: 54620 - DNA, 528 bp, Arabidopsis thaliana landsberg
  unsure (1)..(528): unsure at all n locations
gtagcatactcattgcattttcagaagccaatgttaacagaaggccttttctcacgtttatacgtttaattcgtctactttctaaggttatatcttgcttgggccattgttcgttatatgggccttagttgtcacatgagtgggttcttaatttactcaactcgtatttatgagaaaattgtccaagtgaactgataatgaaatttgcacgacggagagagtccatgcaaaaactgaaaaaagtttgacaaaaactcgaaaaagtgaagccaacataaaaatctttggttagacactaaaacacagtagatgagtagacgtttggcgaaattcacctgacttgtcgatttcaatttgatgacgtggtcaaatgatttaacttacaacaactaataatagccgtcgattttaataaatctccactagttatgagcattcagaaagccatgccgtttcttgagacaagaggattaattaaaaaaaaacgccgngacattctctcgtagttattgaagacagccagacgtt

SEQ ID NO: 54621 - DNA, 133 bp, Arabidopsis thaliana landsberg
caccagttccctaccatcaagtaccccaaaaagacgcagccacacccaaacattggttattttgaaccaagactaaaccttgcttctaccttacaccaataccaacctttagccgctagcgcaccggggacga

SEQ ID NO: 54622 - DNA, 1180 bp, Arabidopsis thaliana landsberg
ttaaacgttctgtagtcggtttagaaatatatttcaattaaactcggtttttagtcgtttttctaacgaaatgtgtttggtttttagagattatttatgagcaaaactgagtttgtgtttgggttttagatagggtacctaaaactcgattaaacatttagaccagtttccagctggtccgactccgatttaggttggtcaatgtatgaaaggcaaatctaaacataagacacattttatgttatgtattactaaattactacaaaaaaaactcctacaactccaaaatacacaatggtttagatttagatatacatgtttttagaactaaaattattgaggtattttataatagtactccaagttataatttctgttacgaggcgagaataaacgtgggagaggaaggaaaaaaaggtgccgtgcggtgcaactagattttacatatttgtacacatatttcacgattgaatctttcaagacattatatgctttatcaaattttatatatataacaattagataagaaacacaatctgacccgactctactatttataattatacgtatgaatctctaacttcgttactaaaacggcaaatactaaaccctgaaaggaaactgtgtgagaaacagttaggccccttgaccatctttgttcaacgttgtcaacgaaaaaaaaatggaaccataaaggataattaattgtatcacaaaaagacaaacacaaattattgaatataccatcacttatcagtatataattttatacaaatgctttaaataacaaatattatgtagaaaaagagaaaagaaacttaacttggtcaatttgatcatttgtgtaaacgatgatgcggaacatatgcgataataatgttattggatggcaaaaaaaaaaaaaagtattttagttgggccctaatgttaattcacaatcaagcctaaatttggttaatgggccaatctttcttatatatgtaggactcggatgttcggtctactcgaactatctacaaaccaagctaaaccgaaagttaatacaaaatcaaaccaaatgatagtttggtttatataggttttaaattttaatccatataatccaataagttgcaactcataaccaggaaaataaaaaaaatgtggaatgaagaagttcaaattaataaccaaatgaatt

SEQ ID NO: 54623 - DNA, 505 bp, Arabidopsis thaliana landsberg
aaacaaaaaaaaaaaaagaaaagaaaaaaagaagaaaaaaaggagtacgtagcaggctagcaagaaagagagcgaaaaggaagaaaaagaggagagaaaacaagagaagaagaaaagggattgaatcgactaaacggaaagaaaagaaaaggaagagaggaaataaaaaaagaagggaaatacgacatggcaagaaaaagagaaccaaaaagagaaagaaaactaaaacaaaaggggaaaacggaaagaaaggaaaccgaagacgaaaaaaaggaacaaaacaaaaggaaagaaggagaaaggaagaagaaaaaatatagcaaacacagtaaaaaaaaaaagaagccgaggcaaagaagacaatacagagaaccaccaccacgaagagaagagactaaaaaaaaaaaaaccagaaaaaccaaaaaaaaaaaaaggaaaaaaagtaggaaccaccaaaaaaacgtggtaaaaataaaacaaaagctccaaaagaagaaaaaaaaaa

SEQ ID NO: 54624 - DNA, 845 bp, Arabidopsis thaliana landsberg
ataagatgtaaaaagaactatgcagagattaagaactaagtcccttttttgtcctgttaatgtatatatgtgctccatgtgaagaaatcaatcaaaaaatagattgtaaaaacatacgtttttgttggtgtttactggtttacacaaattcttggaataaaattcaaaaaacattagttaaatgagtccaaaaacatttgatttagatggttatgtgaggtataaatggttgtaagaattgcattgagttggattgatcattggtaggtacacatcctttcatgcatttatgggatggttttttaagaaaataaccaattttatttgagattattagttatttttcttcagagaagtagtagactttctcaaaatttatatttctttgaatggaaaatcaaattgaatttacattgtcttttttttttaataactacttttttcatttttttagcaaatagtataacatagatgagctaagtaaaccaacaaggatgggcatttgcatcaaacccataccaaaccaaaaaattgaaccgatattatgaatcaagaatttaagatatccttgaaataaaaaatctgaagatccaactgaagccagccaatgtttttagactctataaaaagatatctgattaataaattgttatttcctgatgcttttaatttttttttattttttaatccagaaaacaaaaaatcaatggtcaaaacatacatagaaatctcaataccaatctcaatttattctgaaatattcttctgaaaccagaaaccaaagaaatccagaccaaaccgaaataaataaaccggaataaaccccctatccagtcatagaaaca

SEQ ID NO: 54625 - DNA, 517 bp, Arabidopsis thaliana landsberg
cggacccgagctaagcatatcggatatcgttagcgatcttcatcatgctaacggcaacggtcttaagttcgccatgcgcctctacaattgcatcgtgtgcagcaaggctctcaaatttattctcagccgtgataaaaggaaggccggtgagctttgcgatctgtgcagctacattttcggaatagccggggggcgtattgatacctgtgcccacagcagtaccacctaatgccagctcactaagatgagccagggtgttattgatagcacgcaggccatgatccagttgcgatacgtaaccgctaatctcctggcccaatgtgagcggtgtggcatccataaaatgagtgcggccgatcttaaccacatgcatgtagtctttcgacttctgagcgagcgtatcgcgcaactttttaataccgggaatggtcacatcaaccagcatcttgtatgccgctatgtgcatggcagtagggaaagtatcgttggatgactgtgatttgtcacatcatcgttg

SEQ ID NO: 54626 - DNA, 710 bp, Arabidopsis thaliana landsberg
ggataacgatacgatatctgcatttcatctccttgttattgttgattacttgcctcattctgagatttttttactgtattcgcagacacagcatcatccccaggatacaaatcgaaaacaacaactgtttggttaggtgaaaacgctgttaccgctgatttcattctcatcccagaaacaagttcccgaggcaatcaactgagaagcagctgcgactgtagctgtaaaagctgcggtcagccgcttctaacgcaatttttcacagagacaaataatggaatcacgcttaccctattcgtggttgtagtgttcctttgttttttgttgcaaagaagggtgagattcaacctatggaagcaaagacaatcctctagaagatcaataacagtatgatttataggtataataacacaattctatatactctaataagaacaaccaaaatccaaacaattgagtccaattattcaagtagttgttacattattttataccattgaacatttctttgtatcgttgtactttatgtgtttggtggatcttatcatcttacaagtcttgtactacgtcaagagtgcaacattgtcgccaaacttatgtcaccaagggacattaaaaaatgtaaccggaagaaaaagtcatgcttattaagtatttgaagaatgcgttcacaaatgaaatgtgaaagtcaaaacaccaattaggaaaaa

SEQ ID NO: 54627 - DNA, 625 bp, Arabidopsis thaliana landsberg
tgtttcgtattatgaaatagtcattcattattttaagtggattttattataattgattgaagaaaataatgatatcgaaggtacaaagtaaataaaaggttacaaacctcaaaaacataaaaatacatgtaaaattaaattattttaaataaaaatgagtacaagttatactctaaataaagaatcgcccaatactattaggggagtgaaaaaaaaaaggaatattcaaaaaatttgaaataatttaattgatcagattaggaaaattggtaaaattagtgccttgggcttggaagacccatgcaagatagtctaggagagacacgaatctttgggctgggtcttggcgatggtattgggccaaataatcccattgttccgttgactacacgaggagaaaggttgacttgttcaagcgcccgcgtctgcagatccattgggtagtcccgcacacacccgatccttggaccgtttcctgtactccacttgcatgaaaatcgtttctgttcatctgaaccgtccgatttcgccaccatcatcgacggcttagtgcttccatcattattgaccagatgatcatcgtcgtcaatcgcattcatctacaacacaattaattacgaaagtt

SEQ ID NO: 54628 - DNA, 1050 bp, Arabidopsis thaliana landsberg
gattgagcattcccaccgaacttacgatcaccaaacacataatctgcaaatccaaatgacattaaaacattttcattgtggacaaagaagaagaatcaagcctgagtacacacacacacacacacacaccattctcacgtagttggaaaccattaacactcttaaacacttcatcatacaacgaaccactccaagccataacagaacgaggataaggctgaacatttggtacatcatccttgttacaaatcaaactcacaaacaaagtactcttatccacaatcacagttcctcctcccgtaaatcgtttaatcaccggtattcgatcttccataactggtccaacctcaagaagctgagaaggcttcctataaacaacaacacacaaaagttaacattttgcgcaaacgatttcgaatagaattgatgaaaagatgattcattctttaccctgacattcccatcacaatggtaggaacattggttccatcattaacaatgcaccaattatcagaagatgttctaagaagcctttcttctaaatgaagttgctccaaaattggtgtacctttaagtctaaccaaattcatcaacggaagtctcaaatcctttgctctacttaaactcatcttaacctgagcccttcatcaaaacagagacttttcaatttctacaaataaccaaactttaatctcgttcttcaaaaacccacaaagaccctggacactaaaaccagacaaatctcgaaatttcgaatctttggtcggatttgtgttatcaaatctcgattccaataagaagagaagcttacctgaaatcagattccggtgacggtacgatctccgacttcaatggaactggagaattctgtattacagctgtgaaagcctctagcttgaccagaagctttatcggtttctcgaaaaaacccttatgcgcgcaaggtgttcgatgtaatgccacaaagagaatgtgttttataaagatcgaaagttattagatttatgaatagattgatacccaccttagggaatcaagcctatatgatta

SEQ ID NO: 54629 - DNA, 501 bp, Arabidopsis thaliana landsberg
tcaggtcgttgatgtcctgcggctgccgggtgcccaggcgatacagcaccagcgtgtccactttctgatttggcgtggtgaagcgcaggggctcttccagcgacggctccgccgatggcgcgacggccatcaggccggcggcggcaaaatccgcctggccatggcgcaccgcgtatttgacggcggcgaggctgtccagcggcagcaggcgcagtttcacgccaagacgatcggcgaaacccttggccagcttgtattccatgccggtggggccatcgggggcgtcgtacacggtggtcagggaggggcgggtggccaccaccagctcaccacgcgtctgtacgcgttccagggcggaaggagcggggcgcattgccattaccaggccgataacacacagcagggttaccggcgtcagcaagcggccgctttgacgtaagcagtgcctcatgttccagggtgcctctgtcgggtactccgaacaggtcggtacggcccatg

SEQ ID NO: 54630 - DNA, 1120 bp, Arabidopsis thaliana landsberg
ggtcttcgagtacctagattcacatatatgatgatcgtgagttttcttaatctccctcttccctccacgttttaaattttaaaatcagtacggtgcatattcctaaacgttgtaatgccttgttgttgaaggcagggataattttaggtcaaacttgccatttcagcaacaagtcttggatccatgacatttttttccctgatgataaccgaccaaaggtggccgagaccctaggggctttctgcttcgttttatattggttcctcaaaggtgtgaccatggatgccgaattgccatttaggacggagaaaaggtctagtgtgatcggattcattacagttattatacccttgatttgtggcagcctcacttttagatatagagaacgaagaggggactcaagcatattaaggatggaatacaggttgatcatattcttgcaaagcatatccgcgttcacgagcatcgacacactcctaaaagacctccagatcaaacactcagagtttgggaggatagccctctctggggctatggtgactgacatgttggcttttggtgtaacattttttaatgcaatctactacgaaaaattgtacggcttcatgcaaaccgtaggtttctgcctctttgtcgtcgttatgatatgcgttgtgcggccggctatgtattgggtgatcaagcagactccagaagggaggccggtcaaggatttctacctctactcgatttttgggattgctttcgcctgcttcactttttttaacaaggttattcatctttttggacccgcgggatcatttgttttcggcttgacggttccaaatggatatcctttaggtactactttgattcaaaagtttgagagctttaatcttggctctattttgccactctttggatcattaaccatgatgcaagtagatctcttacggttgttcaaagagagtggagatttaatacggatggagggtcaaatctatgaggtcatttcctttattcttttggtgaataccacaaaattcgttgttaccaccataaccgcgtatgcttttccaatgcccctgagagactcttttgcttagcacttgtaaaagtataaggggatcttgagctgcct

SEQ ID NO: 54631 - DNA, 859 bp, Arabidopsis thaliana landsberg
taaaaaagggcctaatgatgagacctgatgttgtgttttatgtatgacgcaccaaacatctcattattaaaatgattcaaaaaagtcgaattaacttcattacctaccgttggaacacttaaatcataatccatcatgtcccattttcttatataagaagaaacttgactagtagtaacaaaatatacgattgaagatatgaaaatgacactacgtgttcgattagaagacaaaacaatggtggcaaaaggatgatcacttcctttatgctacgatcgtttacatgactcgtgtccactttcattcccatggtaagatatttgaacgttctaaacaacatagactttttaggccttcaaatcagtaccgattttttgttctctagctaatacatgcaattgaaaaattcagattatgagatcattcttgtcttatgatcattagagtttctgaacatgaatatttgaataatcatttcactgactgaaattttacagttttgatggaagtaagtaatgttttgtcagattcccggttaaggtgaaccggaactccacgaaattaaaaatgcttgaatcttgttggatcaaaatctcttttaacagaagaaattacaattacatacacgtttgaatagttcgatgttggttacatacaaaaaacaaacaactatttttgtggactaatcctcccttgagccgagaagctaggagccaccgttaactccgtcggaccaccaccaccaccaccaccaaactgatccggcaacttaaactcttgattcaccatcggcggtgaactctccgacacacgccacatctttcccgatctatctaaactcccacttacacaatccacc

SEQ ID NO: 54632 - DNA, 1241 bp, Arabidopsis thaliana landsberg
tctacaaaagtactactccttgcattactttttagcttttaaaagtaattctgtactttaaagtttatcagaatgttttgaggtgaggtaaaaagaagtacggtgcaattgtactagagccacggaacaaaactccaaaacaaattactttagctgtttttttgtcgttgtctaatcatccttccttcatctttcatctttcatctcttcgtcttcgctttgttaacccaccccaagtatttacgtgcctttttctcatctttcatctcttcgtcttatactttcaaaacattcaaacaattcacaaagattctaaacatcgaaaataaagaataaccatatatatatattttgatactatactacaaattttaaaaaatgttgatttggtttaatatattgctgttgtttgaaagcaaataaaggttaaataaaactattaaaagaatggcaacttggctgtaatgtgtggtgctgccacagtctacgtctacacgtaacccaaaacacaccaacgtctcaccccaattattgttctatttttgtttttatatatgtgcccgccaaatatatagtaataagttgcttaaaaatatgtaaaatctaaatttatttacaaaagaacctctttcttttttgtcaacgttatcatattatatgtttgtattaatgtatgatgtatattatacgacgtttgctatacttgactattagtgagccgagtggacctcgtcagattttttttcgttaattcacttttttctaatactaaaatagcagcataattatttaaagggaacctttaaaattacaacttggggcatcattttttttgtcattcacacgtaataaccacaatttataaatttgaataataacttattacagatttgaaaaaaaaataataatatgcagagcagaggaaatcaagtgctatataaacgcgtcatcggtttaacccaaaatattcaaagccctaaaaatcagagattccattttctcttatctctctctctctctttctctttttccgattctgattctattttttcttcaccaaccacacaaaacaattctacgtttgatctcttcttctttctccgtccaaattaatctctacgtttaatttctcttgttcaatcatgggacacgaaacaatgacgccggcaacaacacgctcgtgttcacgtacggaactctaaagagaggattctcaaatcatgtcctgatgcaagatctga

SEQ ID NO: 54633 - DNA, 1285 bp, Arabidopsis thaliana landsberg
caactaaaccagttgacatcgcggtaaaccagtaaattggatcactccattaacaatacctataaatattactatgtgtttagacagatttaattctggttagttgcccttcacggagtagaaattaagtcaccgttattttaataacaatgcagatatgtatttaacctatgtagaaagcacatgctcaaattcacgagactcaaaccatttaaatccaccgactagtaactaatgctctcaactttaaaaaataattttcacagaataataaacgaaattttagaatatttttaaataaatagatcaagtaacacgaggacgtcaaacaaaacaagcctacatatgaagaaataaaagcagccaacgaaaccacatgggaaacagatccacccggaagctcaccaatttccaccgacactaattttttcttaaaataaaacagattgtttaagattagatttggcaaatataaattgctaagaaagttttagccgtaagaaatatcgacagaaaattcgtacatatacttttttgttagaaaatacgtacataatcaaaaaggtaaaattacaaaaataataaatttactacgatgtttaatatgaaacagatgaaataagtgatagtaattatatactttttatttttttattctcttaactcttttgtttctgattagtaacaaaatttatttcatatcaattatgtaaataatatttttcaaaattggcttttttaagctgtaaataaaatctgattacaataaaaaaagattagtaagaaaattaacactgtttaattttatttttttgggtgattaatgttggaaaagtttttatatttttgataataatgttgtagccatttgtcctttctttttactcttagacacccttgtagcattaataacagtccgtgtttataatgaaaaacatcaataattttaatttgtaatttaaagttcaaaccacttacctactcaaattgctcactaactataagatgaaaaggaaatttattcaaatcaagaaaacacgtagaacagggtaacaaagtttgatttcctaattataagatgaaagaaagtttggtaatacaaaaaaactgctaaattacaaaaattaaataccaaaaatctgaacgatggttgtgaaaacagtcaatgcggttttacgacgaaattaactaatattacttcgattcattagacctattttcttgaaaaaataagaaaacaaaaaattcttcacaatttaagtcaacgcagtaatttttttgtaac

SEQ ID NO: 54634 - DNA, 1021 bp, Arabidopsis thaliana landsberg
agttaaaaggaaagtgactgttgattggtaccggtcaatcgtgtggaatgacggcgagttacagagacgatggcaactatactgtagttctgtcttgcttttaatgggccattgggcccatttaagggttataagtcgatggtccgggtcgggtagatttgggtcggatatgatgggtggggttgagtaagaaaaggtcaaacccggtattgtgtggcgaacaacagaaattgcatcttctacacagttctgaagcaacaaaacagggttttggctagggttttaactttggctgctctgtctcaatccctcgagacttaaacccacttagtacaatctccatataatttgagtagaacctaaaagatcgaagcttgaggaaaatggtcccttccaatggcgcaaaggttcttcgcttgttgagtcgtcgatgtctctcttcatcgcttattcaagatttagccaatcaggttcgttctcctcttctatgtttctctgtatctctctcaattggtttcgaattggttaaccttcacctaaattgcagaaactgagaggagtatgtattgggagttataggagattgaatacgagtgttggcaatcatgctaacgtgattggagattacgcttcaaaatctggtaactgggtttataagaagatgtactacttatgaattgttctgtgtgtgattgagtttttaattgagggttttaacattgtgatcttgtaatgtaggacatgatcggaaatggatcaactttggaggttttaatactaattttggttctacaaggtcttttcatggaacaggtatgatcagaggttttataaatactcatagttgttagattgtttttataattgaattgtttttgatgtttatgaacactaggttcttcgtttatgtctgctaaggactactatagtgttcttggagtgagtaagaatgctcaagaaggtgaaatcaagaaggcttattatggggtagggactatacgattacagtcaaatatgtttc

SEQ ID NO: 54635 - DNA, 2972 bp, Arabidopsis thaliana landsberg
gaggatctccgaaactatgtgaccactaggacacctacacaagttgctagccatgctcagaagtatttcatcagacaatccaatgtctctcgtcgcaaaagacgttctagtctctttgatatggttcctgatgaggtttgttccttcttcattcaaaaacaccatttttatttatattggagtggttacaaaatgtgttgagatactgatttaaaggattcagaagcttattaggtggattggtttgccttctacatttcaatatgaaaagttgaagtctgttggggttctaattgatatgcttgaggatatcattttgtagccaatcctgcttaagcattttggtcttctcatgggaatgtgatcttgaaatgtaattctctttctttattctgcttatgctgtgtgatttgtccttgtaggttggagatattcccatggatttgcaagaaccagaggaagataatattcctgtggaaactgaaatgcaaggtgctgactctattcatcagacacttgctcctagctcacttcacgcaccgtcaatcttggaaatcgaagaatgtgaatcaatggactccacaaactctaccaccggggaaccaaccgcaactgccgctgctgcttcttcttcttccagactagaagaaaccacacaactgcaatcacaactgcaaccgcagccgcaactacctggctcattccccatactatatccgacctacttttcaccatattacccgtttccattcccaatatggcctgctggttatgttcctgaaccacccaagaaagaggaaactcatgaaattctcagaccaactgctgtgcactcgaaagctcctatcaatgttgacgagcttcttggtatgtctaagctcagccttgcagagtccaacaaacatggagaatccgatcagtctctttcattgaagctaggtggcgggtcatcttcaagacaatcagcatttcacccgaatcctagctctgatagttcagacatcaaaagcgtgatacacgctttataaaagacctgaggaagtgatggtctaaaatgggatctggtttggggtttacaggttagttgttggtcacagtaacttaaataagtttttctttgttaggttgtttaacttgggtaggatgttttagttcagctttgatcattagggaaaagaaaaaagaaaaaaaaaagggaggagaaaaacaaattattattttttgcttacatttctttatatttgtatgcttttattttgactctaggatgcgttaattttcgtttaatctgtactaaaaattagaatttattagttttgaataaataaaatcacagtttgtttatcctctgaccaaaaactataactggattgaaaacggaaattaaaccaagacgaaccggatttaaccggactccagtgttgtaagagaaagtaaacaagttcccaagcgtttcgtaagtaaaaaaacgaatgggctaaacaattagtctaaatgggccttaaaagagtgaataacgtgtcataatcaggagcgttaaatttagggcgatgagtgtcgagagtgttcccgcgttcaccgattcactccactctttggttaaaaagtccactgtcatggaaaattaatcgcggtgatttacacagatgccacgtggcacgttcgctttctttttcttcctcgtgttgattttttttcttctcttttgtccctctttggtttttcttttccccttcacacggcgcgatttgagtcgcctcgcattacaaacccttcttctccggcgtaaacctttgctctatctctcgataaaaacccttgtttcgttttcaccttcgtatttagcgatgcttccacactcctacaccgtcgattcgctttcgcaatcacaagacctagcttcagctatactctcagcttccacgccgtcgagtatctccgctgcttgctcttccgtcgaatcgtttcttcagtcgcatacgcctgatcagtgtcgccatttcttctctgttacttttccgagtttaatctgtaagatcttcggtttcggcgacacgaccgcggcatctccggcacagtcttcttcgctgcgaccgaacggttggatcgatgtaatctcggcggccaacgatttggatttagcggagagagtatacaatctcttatcccctagtggaatactcatgagctcaatcttcgctgttgataaattagctcttgttaagtatgttttcccgacggaacgtttaccggagtatgctagattcatgctctccagcgagaaggatcgaattgcgttatcgaatctgtgcccctttttgaaaggtaaaattgaggaggattcagttcgtggttcattgtgtgaagttaggctaaatgtttttgagtattacatgttttggctctcttattatccagtttgtagaggaaacaatgagatttcagctgtgaatctgaatcctatccaaaagagaaacaagtttaggctagagaattggacacttatcaaaggttttccagggagtaacaagcgtgattctgatcagaaattggagtgtaatctctacataaggcttctttactcttatttgaaagcatttgttcctgttttcgacttaaacgctcaccagccttatcgtagttctcttttgcattacggaaatgggtatgatgggtcagtgatgacaagagctgagttcttggtgaatgttttcgtgcattattggcttgttgagaatgacttctcaccatttcctgttgttacggctaaatcttttggtggggctcctcctttccgttctgctgtggaggagattccgccaacttgtgggttggaagatgtagtgaagttgcttgtcaagtatgtgaatttgagttgggttacaagtggtgttgggagtggaaaaaacattgaaaatggcgagagtccacggtggaagacaccgacttcaggatcgtcgtcccattcgcga

SEQ ID NO: 54636 - DNA, 605 bp, Arabidopsis thaliana landsberg
aaaaggaactccagtgccccccacgtcagtctttgtgccaagtgtgcggtttggcactcggtaaacgggagcttcttttgcggagtgttaggaccataacatttggcaaagaagctttactgattcctaggtgtgctttatttgctgagtgctatggtcattgtactcggcaaaggcactctttgtcgagtgtgacattcagcaaagcgactagagacccccatttttatttgtttttattattccatccaaacaaataaaagatatatcacataatcatcacatgtacattgcagatatcacagaatcatcacatacatcatagacactacatatctcacaaagaccacaaatctcacaagtttcttcacaaagatcacaaaaagtcggcgtcacatgtatcacaaaatagttcacaaaactcacaagtactcacagaaaataagtccacaacatccaatctatgccataaacatgtccacaactaagttcagaagacaccagcgaggtggcagctgaattgattcgacgaagggttgggtgaccatgagggttgtttgacgcagcgaattgattctgcatagagtagagattgtatgtgtgag

SEQ ID NO: 54637 - DNA, 963 bp, Arabidopsis thaliana landsberg
  unsure (1)..(963): unsure at all n locations
cgcatcacatgatgttaatgtttcgccactacaatcgaatacaagaatcacatgtttaatccaaaataattaagatttttttaaaatgcagtttttagcaaacgtgtaattttaaaatggtcaaaaatattagttatcaaatttcttaacaaagtaacatagatgatatttctacaaatgttccttaaattatagtttgtatgaatctcctagctttacttaacctattattgtccacctttgcaataataggctttatagtacaaactactattgcaaaatcaaactatcaatattgtaaaactggaaactaaaatagatctatcattttgtaataaatacaaatatttttacgttatctgaaaccaaatatctcaatacatacaggcattcagacaaaaagagtatgaaaagtagattatattggaacgatcgacaagctacgactgctatatattgaagtataaattaacaaaaacgtaacaatcagaaaagatttggataaatctccaaagagatgggcaacttggctcgatctattcaccaaaatctaccaaaatggtccacgtacctatcagcctcacccacaggccactttatttaacctcgattcaactttatttagtctacacttgtgtctatagtaggttaattcattattacgattacacgaattaacatgatattatcaatacaaataataatatagtttggcgaaggagtggtcccgtcgggggcagagagtggtctctggctgcatacaaagatttgagttcgacaacaccccaaccatatattctttcgtacctatcactctccatcgatctatctcttcttctttttttccccaaaccatattatttctttttatggtctttttgctgaaaatcataactagntttgttcttcttgttggtctcctgctcaaatatagtaaaagcgtactatagttattggcaaaaa

SEQ ID NO: 54638 - DNA, 698 bp, Arabidopsis thaliana landsberg
  unsure (1)..(698): unsure at all n locations
acttcggagatcttctaagagataatattattcagagccaccaagtatcgaggaaaagtaacactaatgaagtaaaagttacattatacactaatggaaaaataaaaaagacgaaaggtcacttactcgtcgatagttccattttaacttaagtgacctcttttttagtgtctttatatatatatatatatatatatatatatatatgtcagccggacctattactagtaaggtcacctgcgaaattttacaattttgaaaccctagttgcatgatagatttgaaataagtttgtgatggttttggtgctatgaattgttggccatggataatgatgtaattaacacaatgacctaaatgataggtcaaagatggcgtgaattgtggaacgtgtatgcggacttgatgtgtttttgttgtattattgcttgatgaaactttttaactgagttctttactcaaatacctatgaacattgcaaattagcctggttagtgactagacaacgtgattgagtagctaggaataggctgcacangaatggagcttagtcgattagtacgtagtagtttgttgagcgatttctttaattataagaaccctaaaaagtggttaaaaagtacttaaattattttcatccacaagtggcattattaagatcaatctggccctttcttttttttttttttccatttagg

SEQ ID NO: 54639 - DNA, 1441 bp, Arabidopsis thaliana landsberg
tgtcggccctaagaaggcatactcatggttctgaaggaattaaatccagtatcagttgattaactgattcaaatgcagcatatcaaagttatacaatttacaagaatcacttactagaatactggtgtttcctgactcgtattcaaactcgagtttttcatcatcactttgagcatatatagactggagagtaaaccgagtcactgggattccattgggacgctgatgttcgtccattacaatctgccagagttttcaaaaggaattcacaagtttacaagttctgtagatgaataagactctttgatcatctatctacacgaataacggaaggtaaggaaaactatagatagcaatagctgaatccctctttgcaacagaaacgcgcagttcatagaccgtaaaaaatggacaaaagtacgaacattacattttacaatgtgatagtcaacattcagaaaactgaaatatccagaatcattgccttcagggaaccattgtaatgctaaagaataaaatttgagtgctacgacataattatgagcaagtggcataccttataaccaaaaagctcacaacaagcccttctaaacacggaaattctatcagcaaaaacagttttgtacctgtttcataattcataggctccacatatgttttagtatgggaaatcaaggtcatatttgcacaaaggacatgttaaacatttatcagtaacaaacctctcttcacgtttttcaagcgtagcattttgctcttttagttgagcaatctttccagttatatgagagtcaactagcttcccagcatctcctgaatattcatgaaaaagaatttacagtaaagcatatttggtaaataagaataacatttttgaaacactacaatatttcttctcaagtcctccggaggcagatcaacagaaagattttggccctcccttttattctcggaaacatagaatatgatgtagagaatagggtcacagagaaattaaggtatgcttctccagtgaattttgtggtgagagtaaaattgaatggtagacttgtagcaaactcagtatcaaaaacaggaaaggtcgacaatcagaaatttaccagactggctctttaattcttcaacagcttgaagtctttcttttgtcttctgtaactcagcttgtaaagcctctattgtttgttttgcctcgttttcaacaccaagagtattcaccatgcgcaaaacccttgtatttgcggcagaataatcaccatgacccagctgccaaatatatgttactgttcagatcaaactctagggtagaagttagaggtcctaaatagcatttctattcgcttttacaataataaaatcttccatgaaacctaagacccacataagatgcaggacataaaaatcgccatacacccttaaaaacttttattattcatttcgccca

SEQ ID NO: 54640 - DNA, 1047 bp, Arabidopsis thaliana landsberg
  unsure (1)..(1047): unsure at all n locations
catctcctactgtgatgtatctggattctcgatcaccagcatatctatctatccctgcagcaaaatcccaactacttaagcacaaacctctaaaagatcaagcaatgccataacataacaacgttaccatatacatgaaattgataagtttcaattagggagatgacttcacctttttccttcgccaaaagactcctttgcatcgatcatcactgcaaatggaatacaatcgctgttacgggttttgtatcattaaagcagcagtaccattagactatcatccatttcgtatcattctgttatagcactaaaggtctagactttcatccatttcatactatctacagatcaatatagctaaagggcaggttgatccaagctttcatcgagcaagtaagtggactgatcaaagctaaccttagccggagaagtggctactctgaagcaatcagcattcatcccaacgagacccaatccagggaaaatgacctacaatggcagacattgaattgcctaagaaaatggagacactataaaagcgtagtcattgttctaaattctctgtgaggcaattcgtcgaacacctggtgacttacatcgagatgtttctgcatagcttttgccctcttccttggccggcgagatgacctgttcccactcatgctgaacaaatcttcttcgatctcgtctcgagctagagcaacccaaagcctgtgattctcgttcgcaacctcaccaccgcctaatccgggtgattccgccgggattcctctctgcctgttcgatttcggctcaattcctgcgcctgatttctgattcttcacctccgaacctcctcctccgccgccaccgcaaacctccgccgtgaacacgccgtttcctttcttcgaaccaccataagccttcctcggacgaagaatccacgtcctcttcgcttcctcctcctccgtttcttctctctccttcaccgacaccggcacttnctctctcgcgggagaaatctcatcggatttcagcttcttcaggttatcgtgctctgatgaggga

SEQ ID NO: 54641 - DNA, 584 bp, Arabidopsis thaliana landsberg
agataccttagctttaaaggaattctttgtatcactttgccagctcagcaggccctcaacaactccagtcaagtgttcatgcaatatgtcagctttagatttagcaactaaagctttgacaaaacctaagttcgcctgaccacaacgtcgatgcaagtgtaaaagtcagacaaaatattatagatggttgaaagggtaaagatataagcaagaattctgttgtgtgctttactttgactatttcccggttgttcctttgcataagcaagaaagtctgaggaaggagcttgtatgcgactccgataagctctgagaattcataagtcaaccgagccaacccagttacaacggcactaattgcatatggcgtttgaccagcggccagaccaccagcaacctaaacataaaatcagacaaaaataaaccatacgatgagtatcttatgtataggaatacaacatagaacagagatctcatattcaattgtcgaacaattaatcgctatgtgcaacacaaaacatggcagaatggtactgagtactaacagacggtaaagaagtccatgccacagactggtgaagcct

SEQ ID NO: 54642 - DNA, 865 bp, Arabidopsis thaliana landsberg
cagtttgtgctgttccgaacctgcccggacttacctcgaaaagtccaaattgttttgaacatatttatgttagtctgttttagagtttgctttaatcctaattgacatgtctataatcgactccgttgaaatttcgtcggtggtcatataaatttcataatattcgccgagatcaatggtggttgaaatctaaagtaatctcctacgttgactatcatctcaaaagactcaatactacagaagtattttctacgttccatacgatcgcgcatcgtcaacaaattcaacgttaatgtattgtttcctcatatacggtatatagaaatcataaatatgtgaatgattatgtgtttctttaaaacaatactgtatatagaaatcataaatatgtgaatgattatgtgtatctttaaaacattacggtatatagaaatcataaatatgtgaatgaaacaaatcatccatttcttttcaattaatgtttttatatactatatagactcagactgaatactaaacgctcaaaaatttagtcatttagtaagaaaccgattgacgtcaacaatatatacgattcgagtgataattgtaccaatttaagattagttttatttttgccaaactaagctttaaatctcatcttttggtcaatttgcatactaatcagtaatcactagctagcctactaatcactatcaggtatgtcaactggttcacagaactaatatatttatatatgagaatgattcgactgagatttgtacccatttttttttcttcgtgtcatagattatataaaaaaaattatgaatgtcggcgatcaactagatgatctcagaaacaaagcatatacaaaatttagcac

SEQ ID NO: 54643 - DNA, 1081 bp, Arabidopsis thaliana landsberg
gccatgggtccttcggaatcaaccatccctccgaatctctcctttatccactctttttgctcctctaacttcactcctggcccccatggcctcttatccggttcgcaccaataaccaccgtgaaccgccactttgatcagtcccggatactccaaagacggagttccgtacacatacggagctccgtatgacgcgaacgtcggaaactctccgtctatcgtgaatttctcctcgtggccttctttgattctccaataacacaccgtagtctcaaggggctccaccggaaaatctatcccggccaccgttttcaccagcttacttatccatgcacccgcggttacaatgcattttttaccgtagaacttatctcctttcaccgtgcagactattaccccttccccactttcaccatctctctttatgtttgcaactttggtgttgtctcttaagatggcaccatgtccaatcgcaagcgtctgaaacatggagacggccttggtgggtttgataatcccaccaagttccgtcgaaactccgatccaattctccgggatactaatcctcccggagaaatgctcggaaactgcatgagaatccataacccgatgagctagcccgtgtttttgacacgtggccacaacggagaggagactctgctgatctgccggacccatgtcgaattgttgagttggaaaatgaactttgtatccaatctcggactgagccgcagcccataaccgagtcgactcggaaaccatggagtagtagtaatcctccgggtaagtggcacgtatggtgcgtgactcgccgtgagaagagccacggtgatggaggaaatcgaattgctctaacaaaagagtcttctgacctctttttgccagctgatacgcggcggacttcccataactcctgctccgacgacaatcacgtcgaatctgctgtcgtcggaatattccatgaggaagtgaaagagaggcttggtttgatgtttgagaagcgtgtggttgttgttgatgctctttaaaagcgactatgagttgttcaaaacatatatagatagtgtttgacaaatggacaa

SEQ ID NO: 54644 - DNA, 1091 bp, Arabidopsis thaliana landsberg
tttcgatcaaacataaaaacagacccacttgaaaagaggaagagattacccatgaacatcagtcttagaacttttaagttccattctacactgaatgtttatgaaaaactttagctgtacttgatggtgtagtaggtggctcagtagaaatttgaaatctttggtaattctgtaaaatttcacagatttcaggaggacgaagccatcgatgtcgtgcttctgagagtatttgtccaacatctgtggacaacaattattgcaatcagaagacacacaaaaattagtacaactaagaagatatcattcatcaagaaagcttttaagagacactatagtaccttctgatgtagtagctaaaaagtcaacttcctcacaagaagcagctaattaaagtataaccaacacacgatactaaatttcccaagatattcttagctgcctataacaatcataaattatgcatagaaacttaaagagtaaagaagtaaaaagtaacccactaaaaatgatgaacatgatttagaatagattcgttatcaacttggataagtaaactaataagtaagtgatgaatattcagataaaatatactttcaacaagaacaaatcatcactcacaccaataatggataaaaatgcccttttgaatagattccaatagataaagattgaaactttgatgactatataccaatactcacaccaaatagatcggataaagatttgatttgacccacgcaaacaaaaatatctcaaatacttcagaaagaagaaaactttcacttcacctaattcatgaactgggctgaatcgtcttgcttccgccatagatattgctttctccgatctcagagcttcaaagcagacataaaaagtgaaacttttagagtaaaggtgaaaactttcttcttcttcttcttctacttcgtctacttggtgaaacagaggaatcaaaaagctggaaaacgaaaatcgaaaagggtgattaaagtgaagaaggaagcatctgagtagtgagagataggaatccctacgatgagagacaaaaacggccgtcgaaattgattttttttcctttttaggcaaaattc

SEQ ID NO: 54645 - DNA, 556 bp, Arabidopsis thaliana landsberg
tgcagataacgcaccttttccatcgggttacgctggtatgtcgcaacaaccttctcgcccgctttttcaccgaactgaccataagcctgcgccgctgtcagaacgtgctcgcggaaaatcatgtttaccctggcgcgcgtggtgctcgaccaccagcattcggaaatgggccactgctcaaacacgaagccgccacgctcgcgatcaatatcgatgtacagcacaaagctgccagcaatacagaaatcgagcattgaaccgtaaatctcgctgtcgtagttggcgctgtgaatattccgccagaccagttcagcgcactggctgaggtaatgccctgctgcgctcatgtcgtcctggccggaaatacgcagattcagccactgactgttagcgggcgtcattccgctgattaacgcagatgccagggtgcgcgttgcgtctgtgccggttgagtccacaattcgcttttttggaatcgctgtgcgctgtcttaatgccgctgaatcctgccctaactgcgggtaggtgtagtcgtatcgtcatgccagtgcgactg

SEQ ID NO: 54646 - DNA, 933 bp, Arabidopsis thaliana landsberg
  unsure (1)..(933): unsure at all n locations
ccgatccgctaaaactacagacaaaatatattaaagattcgtttcacaaaacctaacgaattaacatatcgatccacgaacattaacttttaattanagctatatatatatatatatatatactctaaccctaagtcgtctcctatctgattctttgaaaccactttcgactttctttaccctcaagttatcgagattttttgaagatatgggcaacgctgatgagttgataacgatgatcattacgaacaaacggtctccatgaaaacatacaaggttttgttccatgatacaagactttaacttgggtaaattcggagagaccgaactcgttagagatcttacgaggctaaaagaccatattctacaatttctgaaaatattagtaatattaaaatctagagaactttaaattatatagaaaatgggggtccttttaaaagcaaatttataaattgaccctaattatatattttaaatcaatttatcaaagataaaaataaaaataaggtttaaggatttggataattaattttatacattcataacaaccaaatacattaggattgttatttgttagcagtaaatttaaaatgaaataattatgtcgaaatcttagttgacgacccgtgtcgttgttttccaaacatctttgccttcttgtccggtttgatctccaatccctctaagcctatgtttcattctaaagataactaaccacatgcatgcatttatattcgatatcggatcttgttgaattatgcttctatcgtttgatttgtatatttacaattctcgttggaatcggtgttttgtggctagattattattactagtatgctttattggtatagtgtaaataatttgattttgtcatgagtaagaagcagctnttattgcctaaatctatgtaaccaaattttattattgatt

SEQ ID NO: 54647 - DNA, 1147 bp, Arabidopsis thaliana landsberg
atgacgcaattttcccacagatgccaagaactcaagccagcctaaattattgacaccccttaaacccagctatgacggcaccttcttatacagagtggcctagtgccactatgacttatgcacaaacattgaatgcgtcagacgtacatcatttcaggttaacttcactcttagaaaccttcttcatgttctctgttaaacgctcaagtctctcaagtctcttacattgacaattgtgctgtctttttcttttgggttgcaggcacccgaatccttgaccttttggtcgtattcagcacaatgtcttgtatccaaacaggttttattgatgtagctttagattttcagttcttgttgcaaacattggcctcttttatcgtaagacatctctaagctttttgtacaatatattattattatcaagcttctccacgaaatccaaaatctgcaaaaaaaattgttgtacaatgggccggcctgtaaaggttgtggcccgtttagagtagatagacgtggaagtgtggagttttatgggtcaatgattacattttcttgttcttatggtcaacatagaaaacagagtcaacgtatttccaaacaaattttgttttgtttttaatcgttgattcttctgattgaatgcaccttagaattaatgttcaggttcactgttttagcaacaatgacataaattttattcaactatttcaaaaatactagtttgaaatatgccttgttattattaatgggattcataacttttataacataaataaagtaataattaggacgactttttaatttctataggggtatgacttttatagaaacagatcagaaacatgccagctaatgaacccaccatcatgggatggctttaattgatcccctcatatccaataaataacctatagtttttgtttatcaagattatgatttaactattttaaaaatatgataaactataacagaaacaaatcttgattgggtttggtcccataactgagtctacgtacatgaataaataatcaattataaggcatgattaaggatatgagaccatcagatcctgggaatcagtttctgactggcactgtctagtccttgctttttggctgcttcatgttctttgtacactgtactattg

SEQ ID NO: 54648 - DNA, 1399 bp, Arabidopsis thaliana landsberg
ttctccggccctaataatggcttgcagagcaaaagaacttgtgtcgttaatcttgtataagatttgtaatcccaaaaggtatgtggctcaatactctttgatctattgtgtttgcaatctgaaaggccactgaaaatctctttggatttgagatttacttgtttcgtttcatcagtagatttgggtgtttaggtctgatcgttacgtttttgttttctttttgctgggcaatggttaatttcacggagggagtattttgatctgtataggtctgattacaaaattgaggaacatgtggaagaagtagaggatttgaaagcagaggcagaactctttaggtttgttcttttttttctccttgtatttatatgtgttggattctcacataaatcagcggtgtctatggcttgtaattctcacatacatgttaacaaaaaaaattctcattgggtgatcttgatctcaggttgtgctaaacttataagatataagtatgatcagctgagtatgattgtaacgtttttggcttctttttattttattttatatttatctttaggcctggttccaaaattgagaagcatgttgaagaactagaggatttgaaagcagaggcagaactctttaggtttgttctttttttctctcacataaatcaaaacaatctagggtttctaactttcttttcaaatggatattaaaataattatgcttgtggtctcaggttgaaagcaatctcaggaacagaggaactgaaagcagtggcagatgtcaagaggtttgttctttttccaatattacttacttggcttcagatataatgaatggagcctagggctttgtaaagtcttgtttcccttgggatattcacaaaaaacaaaaatctacgattgtccttcttttatatcaggttgagaacaatcttagaaaacaatagtggaacctcataggagtgttagggtgacatgttgaaagaagatctttctctatctttttcttccctcggatcttgtacgtctcatattgtctcgtctttctttcaaagacaacatacgctcttctactgtttgcaaggcatggggtgatattgctgcttctgttcgggttaaaagtcgtcgttgctggcttttgtaccatgatgcatttcaagacaagggcgtctcttacggattttttgacccagctgagaagaagaagacaaaggagatgaatctacccgagctatctaagtcttcaggtatcctttattccaaggatgggtggttactcatgaacgactctctttcactaattgccgacatgtactttttcaacccgtttacccgagagcgtatagacttgcctagaaacaggattatggaatcagtgcacacgaattttgctttctctcgtgctccta

SEQ ID NO: 54649 - DNA, 535 bp, Arabidopsis thaliana landsberg
tgggtgaacggatcgaatgagttatacagcatacgcaggctgtgcgtaaactgcggcctcaggttagggttaccctgctggaaactgatggaatccgatgtggtaagtataggctgcaattgcgcagtactgggctgcccggtacggccattgtagaataaacgcagcgcacgcgtgcggttgaagttataggtgaagtttatggtaggcgtaaaattcacatagctgcggtcaacgatcacattcttggtggtgttgttgctgaccaggctcatgaactgcaggcctgtacccatattgaaattgaacttggttccctggtaccggtagctcaggttggcattgtttgaattggctacatactcgtaagagttactgtacaagctgtcgaacctcgagaatttaccgctggcattatcaaagcgataagtcctgttgatggatgtgttttcgttatgggaataggaatacctcaattcaatcatcgagtgctttgacagcggctctgtataggaaaagtgttggattgaatgtg

SEQ ID NO: 54650 - DNA, 566 bp, Arabidopsis thaliana landsberg
tgcaaataacaaataaataaagaaagaaattaaagagaccaaatcaaaagtggaaagatcttcatatgaattagattattattattattttgaatatggttgtgggatattcttaaagagggtaagtaaaatcactttttaacgaatgttacacattagatattatttttctaaaataaaccctttcttattcatcgtaagatttgtatgttataaagtatttgctaaagaaaataatgaataaaaactatacttttgcattcatactgggattttggctggtgcatattttttagttggatattgaagaccttgatttgagtttagcaatttatgtgaaaatccaaattgaaaatagaaataaaaaacaactcaaaattgaatttgaagttgtacactaaaacagagaataaaacaaaaaaacaaactcctacaagccgagcgggccaatcatttgtgccactccatcttcccttggcgtggcctatgcctttattacttccttatattaatcacaagccaggagcagcgtgaggcaatatctgcgtcaatttttccatgcactg

SEQ ID NO: 54651 - DNA, 816 bp, Arabidopsis thaliana landsberg
  unsure (1)..(816): unsure at all n locations
gctaaacagatccctctaatgttagatcctaaatcttcattcatacccaaattaagaaactagcataagaatcctcttgaaacccaacaagaacacatcaattgaatataaaaccaattacttattataatccaataaaacaaagatctttaaattggggtcagaaaatcgacaattttattaatttgttactaagtaaagcttcaaacatagtgggaaggagccttagaactggagcgtttgcaaattctgataaaattaaagcagtaaactttatgctaatctttgtattaaattggataaaataccttgttgatcgtttccttgagaagatctgagttgagaggaggcaccaccatcgccactttcctctgcttctgtggggttcttgcaaccatcttctatatatattttctttaaattctcactagattaacccaaaaacttctctctgtttgaaaactgggttttgaagataaaaagctcaagcctttgtaagaaaaccacccataacaagatcctcacaacagcttcaagaaacccagatttctctctcactctctctttccttctctcgatctcaatcactctagaatgtctttttnnnnnnnnnnnnnnnnnnnnnnnnnnnnnnnnnncttcgatttgggtcttgtgtgctgtgtctatttgggtcttgtcggaacgtaaagtcaattaggcacgggaactgagagagagagcggataaaggtgttcactttcgtaacggatctttcgttactatttaattttatttatttttttggtcccaacggtctaatacgcttactcataa

SEQ ID NO: 54652 - DNA, 648 bp, Arabidopsis thaliana landsberg
gtccacttaaacggtctaaacaagaacattgccattgtaaacacattgatagagacaaaaatcgttccgatgtgaagccaagtggcgaagctgctgcttctgacacaggagtgaagcatgaagaggtaaaacggaatggtgtaatatctgaactcgatcaatggagtaggaacaagaacaccgcatgtagctaagaaatagaccaatatccaggtctgccttcgagttttcgctatcggatcatgaaagaataagtcaggttcacaatgcaaaatatatgggaaaagtaaataagtatactacagaaaatggttttaacatacctaataaagttaggattgagaaccaggaatagacgtataccgggactaacatgtacttcattaaccaatgcgcattgataatttttctccataggtagaaaggataatggcgattatcagcaagaagatatggatgagccaagctacaaagaattttcagaaagtaaagagaattaagagtctgaagtagaaaagcctttagttgtttaagaagtattcagaaatcaaaccttgaaaagtgtacagagacaaaatccgctactagagccacaagagttagtataaggcttaatgaccaattttctatgagctgatggaactgatg

SEQ ID NO: 54653 - DNA, 745 bp, Arabidopsis thaliana landsberg
acagactacgagtctcttggtagagtcaactggctgcccgggaatgtcctcatagtgcaggttctgaataggtcgcagagtaaactgaaaatcatcagctttgacataaacactggtcaaggaaacgtactgttgacggaagaatccgacacgtgggtgactttacatgactgttttactcctctggagaaagttccttcatcgagaggttcaggaggattcatttgggccagtgagaggattggttttagacatttgtatctttatgagtctgatgggacatgccttggagctattactagcggtgaatggatggttgagcaaatagcaggtgtaaatgagccgatgagtctggtgtatttcacaggaacccttgatggaccacttgagactaatctttactgcgcaaaattggaagctgggaatacatctcggtgtcaacccatgagacttacacatgggaaaggaaaacatatcgttgtgctcgatcaccagatgaagaacttcgttgacattcatgattcagttgattcgcctccgcgggtttctctttgctctctgagtgacggaactgtactcaagattctctacgagcagacatctcctatacagatactgaaaagccttaaactagagcctccagagtttgttcaaatacaagcaaatgacggaaagacaacgctgtatggcgcggtttacaaacccgacagttcgaaatttggtcctcctccatataaaacaatcg

SEQ ID NO: 54654 - DNA, 601 bp, Arabidopsis thaliana landsberg
ctaacgaatgggccttaaggccaccgaagccttgtaatataaattttctgcaacacttagacaaatcaatgattgattgtttcaccatcaatgtattcgccttttggcccatttatattattttcggcctaatatggcttaatcaacatagatcttcaattcttttttgaaaaaatagtcctagtaaagacaaccaaatatttgccccccaaaaaaaagacaaccaaatataatatgaaatcagtttaaaatacagttttggtttcacttttaacatataaataacattcatgatcgattctttttatttttcgattcagacttctttcaacattacaatttacaaatatattagtattaacccaaagtaaatttggtttggaatttacgaatgttgttttaatttaattccgatcggattatataggtttatcaaaaaaataaaaaaattgtgaggtgggtttatcaatattgaacacccacaacaatggacaaagtcattctttctaatttattggattgataagtacatattacaactatactaatttagtaattttacattacacatccaacgcccagactcattcatcaactaaac

SEQ ID NO: 54655 - DNA, 856 bp, Arabidopsis thaliana landsberg
  unsure (1)..(856): unsure at all n locations
gataagttttatcaaataataaacctacaaaatctttctcggntttctccatcttaacgtcatatatttaatgtttgtcattgattttatacatccgagaatattctaatgacattacagaaatatttcaaaattacctcaacctttttttattgagctggtcgtttgttacacattttgacattatactgaccgatccaaacaattattttccaatgaattttactttctatctaatcaagagacaatcaaggtctttaattatacggggcatatccccatttctgctgcaaatgcgaaatcacagataaacataagacaaaaccaacccatgatactcaaaaccgacacattctgttttcaatgacatatattttggataccaaaagctaaacagatcgaatctctcaactaaaataatcaaataaaatccaaaaaggaagattaacttttaatcgcctgtcttaaaaatattaaaagttaatcgtctgtctaaaatcctacctaatcagtattttgaaacacaaaaggtttttcatcattctatattcttaaagcgaaatacgaacttagttttaccatcaaaacaattgtattttttgtttgaaatactcaaaatatttttatgaaaaactatttatttagattcaactctaatatctttatatcattttattaaaaaattatgagcatttataaaattaataacaattttgttttttggtaaatggcaagaatcgagttcattgacacgtaaattatttttaaatcttatcttttttttttggtagagtttaaatcttactttgatatctaatctttattgcattagctttatctttaaacagtttttttg

SEQ ID NO: 54656 - DNA, 1331 bp, Arabidopsis thaliana landsberg
agttcaataagaagtatcttgtttcggttctacttacagttcagttttaagttcgagttcggctaaacgatcattagactgaacaactatttttaatatatatgtgatactaattctaaaaatatattattacaagttacaataacaatatcaaattctacttccagtcttccactataatttaatacaactctccctggttccttcacatcaaatatgcttcgctgtcatcattgcattgattttccatgggtagtcttggatcttccgaaaacaaaaagatgaatgtccatttataaattccatatataaatttaaaaaccctaaaaaaaggttttgtgggtttatacaggaagtaagcaaaacacatatgactcaagaaaaagctttgatctccaaattataaagaaaatatacttatatgcgattaagataatatacgtataaaaaacagatatatatggattcattttcttgcgacaaacatgaaaaaaaaaaaaaagtatagatctttcgtcgaatctgttaaactatagataatatgaaaggtactagataccttaagctgtggaaaagcttactgatttcggaagataaaagaggccatggaaaattaatgagatgatgataatgaagtatatgcagtgtgaaagaactatcttttctacaaaacaaagaacaaatttgattaaaaggagagaaatgaagttatatataccactgcaagatttagtatatagtagtgagattacggattcaactagtgaaaatagaagtgtttataatggtatgggaggatttgaattggttaacaaagagcaatgagactgataccaaacacctaattattaaatgtctacattgagatataacgggtgagtatgagctgtttttgttactattacatgttatgtgtgccggtaaggtaacatatagccaaccttatttccttaagagaacaaacagttacatatgtagcttgatcggttagttttttagactccctagatgtagattgctcttggtagagaaacgttaacattttttgttgacaaagatgattttcttctttctccaatccaatcacatatttacttcaggaactttcttttttctccaagtccaaagcatgtggaaatcttaatgcgtgtatcaagccgttttacattttgaaagtaaatatgtctatctgcttttcttctcttgtataatcatatccgtatacattcttattacaaatatagtaaaagaaaataatctatccacacgatttaaccaaaaaaagaagaaaatggtgcaaccccaagagaaaatcagtaaaggatggaaga

SEQ ID NO: 54657 - DNA, 530 bp, Arabidopsis thaliana landsberg
tcgctcccgagagcttggaccgagatgatcggagcctgtaggcgaggagatgctggcaggttcggaccggcgagcatgggcatgaccgatatgccagcaaaaaggccggaggctgcgagtgtggacatcaacataataaacctcatcgcggcgatcagttcatggaaggattggcgcggtagcgctcaccgtaaggatgcgtgaagtgggcgtttgcccagattccggccttcgctttttgtgcgcgggtctctgcctgtgcatattccgggaatagtgcccggcccgttcgatcgcgtgccgcgaacgctactccattactgatcagcacttgcgacagcgattgcgtttcactatccttcatgaagaagcattcggcgaagcgtactgtcggcaagccagacttttgaccgaggaaatgacaagggaaagcattacttgcagctgtctcggcctcaccaagcttagctgttagcccggcatgtgagaccatggagcatgtggtccgcacgccggcaaagtctatctgc

SEQ ID NO: 54658 - DNA, 452 bp, Arabidopsis thaliana landsberg
acctcttgcctgagaagagtgaggggtcaaacatttgatgtctcatcaaaagttagaaagtaatctcaaagttagaacgaaagcagcattaccttgacaaaggatggttgtcacaacccaagaaaatccgagcaccggctttcttcttcatgattgcaactgccagcgatgctgcatcctgttcaaaaacacattagagaacctgataagagactaatgtatagtacactgccattctagaaaatgagttcaatctgcagatcaactaattagttatgagagtgaacaaaatcacaaatatacctcatagtgtatgagatttagaatatgatcaggacgagcatcaattgtctccttactcaaccagtaagtatgtgcacctctagtttctgtgtataaaaagttcaggagaaacataatgctcaaatcttctacagaccaagaaaaaagtc

SEQ ID NO: 54659 - DNA, 566 bp, Arabidopsis thaliana landsberg
taccttcacccacgagcccgaggatctccgttactaggcttttcgaatagaagctcccaaatctgaatccagggtttgtctccgtttcaaccttctcgaccaactccttggagttccagcctcggactgtgaaactgatcgttggcactctcaatcgagcatctgaagtgggttcgccccagatgatcacatcgtctcgagcgttgaggtagttcaagagagtctcctggagtttggtctcctgctggacgatgccttcccacttcggtggcccgccggcaggactcagatactccacaacggcgggtatcgcatatactagttcgtagctggaacctgccaaagcgatcttgtcttgtagagtcctttttgggttgaagtagtgggcttgagatcgcactcgtgcaagcccattagggctcgcataaagtaacgagatatgcggtccgtacacctaagcgcgtgagcccactaatatgggaaaccttgagcaaagcaactcaaagtaactcaccttgtaccaggagaaggagttgaagtcaactccaaagttcttgacgtcaagc

SEQ ID NO: 54660 - DNA, 1698 bp, Arabidopsis thaliana landsberg
  unsure (1)..(1698): unsure at all n locations
accaaaacctattaaaccaaagttactaaatcgatgtaaaaaaatgcaaaagaaaaatctagggcttagatcttttgtcctctctataaatagaagagactacttgggtctctttgccctgtcacatgcttccttcttcttcttcttttttacttacataaagttgcttacattcttgtcctcttcatcttattcttcttatagtgaagcgatttagggtttagaggaatgttgtttggctcgaggtcatggagagtaattcgttaacccaactcaaaactctaaatgattctcggaccaggcttcattcccctcaacctattttatcgcatttttcagaaaatcttttcacattttatatcacttctcagttctcaccccattcaaaacctatatatgtttcagaagctttttgacccatctagagtataaccatgttacagtgttaatttttttatataaccattgacaaactctttgaatagctagaattatgttccctagaatataaactatttatttcttctatctttcactgtttccccttttgatttactttgaaacgtttctaatctttatttgcacgcagtagctgttctttttactaaaaaaaaaaacacgaacaaaagaaatctggattggatctatgcatgcaaatcttgttttttatacactttcagaggcattttatttactgattctttagcgctaatattattaactttggaaacacaatctgttaaggcatcttggaggatatataaataagatcgagggagtaaatcttgtaatttgtgaattgttccatttttcacatttttgagttcagtgtatgattttttgcaacctttaaatcagtatataaaccataaccattgacatatgatcatttcatttgtcttccattttaactgaggtgaaaaaggaagagaaaaataagggttaaaccaaagaacaaaagaaatctttgcacgtgaatatgatgatatggaatggatggcttctcctcaatattaaaagtctcgtcaagttgaaatgctatttacacatctacacgtaattgaaaaggaccttttattgaggttttacatattgtaaattcacagattgtgattgattgttattttcatgaaagaagcgagattggacgtgatttgcgagtgtatatatatgaactacgctaccaagtatacagtgttgactattgctttatttgggtgtgttaaatagtttaggtagacttgaggagtaacttagaatttcaaaaagttggtaagctgttttatacgagcaaagtcagtttaatttgtatttttataaaaaaagtctatcatcaagttcttttgtccatgaagactcgtaagtaaacgatgaatcagtcaggaaaaaaaaaaaaagaaatcttatctgaaaatggaatatcggaatttacaaaaacaacctcagattttatttttattttgtcaacaaacctcgaattatttaaatggaacataatcaaccaatgtgatttacaactatttcgtaaacggtgtcgttttggtgtttgacgaagacgaaccaacgttgcttttcagacacgaaagcaatcggttaatttgtttccactccattactcgcatctttctgcttcttcttcatattcttctttactctgtctgaaaatctncttctccctcttcttcttcttctcctttc

SEQ ID NO: 54661 - DNA, 465 bp, Arabidopsis thaliana landsberg
ctcaacgcgtcggcggcgtgccgaacaggcgtcgtgggccacccggagcgtagaagtcgtctccccagctcatcagggacaggacaactggccacagggccttgcctttgtcggtcagctcatactcgagatggcgctcgccggcgacccgcgtcatcaccccggccgcgaccagggacttaagcctgctggtgagcaccgcccgcgacatccgcagatggtcgataaagtccgcgaaccggcacactccccagaaggcgtcgcggacgatcagcagcgtccaccgctcgccggttatttccagggcgtgggccagggagcccgcatgccccgggtaatcgttcggaagggccatacgccgaccctacggcatcggttcggtcgagagactatagtttatataacagactcctattcattgacagaactatggattccaggtcatgaatagttcagtgaaaagac

SEQ ID NO: 54662 - DNA, 443 bp, Arabidopsis thaliana landsberg
tcgagcttgccattgagtttggcgtaagaagatcgtggtagcccatccttgccgggtccggttgacaacgtgttcagtagaagggcctcgcaaagaagggcgtcctcctggagggctgcgtctctgactggatgttccatcgtggcctgccgcgcacgaactactatgtcgagcgggaatgggcggaccagatcgccggcatcgccagttctccggatgccttcagcggcattgtcccctgggcgcgccagatccgtgaaatcggtatcgagcatttcgtgattggcaccgattacggtatccgctccggcccgacgcccgtcgaaggcatgcgcatcttaatcagttcgctccatcatcttcgaatcacccccgaagaaatccatcgtatggtcaagaccaatcctcgaaggctgcttgacctttgagtaccgtgcctgacg

SEQ ID NO: 54663 - DNA, 631 bp, Arabidopsis thaliana landsberg
  unsure (1)..(631): unsure at all n locations
tgggaacagcacccaaaccagtgccctttgaggttcttactacctttttttgctctgccacagctttgaaacgccagaaaaggttgcttagctgcccatcatccaggacataaccgagctgaaaatgtaaaaaaatgataagaaaacattttcttcctaatatggtgacagcaagtatagatatgggtaaagacatgtacctcatttaaacggtctttcagtgcgtgacgcccactggataaaatagtatgtaagcattggtttgaacaagacaagcccatttggaatattagtctgaacaacaaaacttccatacctaagctttcccagcacgatgccagcatcatnnnnnnnnnnnnnnnnnnnnnnnnnnnnnnnnnnnnnnnnnnnnnnnnnnnnnnnnnnnngcattccatcctaaatagagtgcatgaataaagaccaaacaatactcattaactaagttatgcagaagattgaaagagtanatatgcaagtcaagagttgagaacctaatgatgattcccttcattaaatcttttcaggctgagtaaatgctataagggtaagtttacttgcgaagactaaaattccagactaggagagtacatttctccgtttataaaaagtg

SEQ ID NO: 54664 - DNA, 512 bp, Arabidopsis thaliana landsberg
  unsure (1)..(512): unsure at all n locations
cacatgattaccaannnnnnnnnnnnnnnnnnnnnnnnnnnnnnnnnnnnnnnnnnagaaaacagaggataaagagcatcgtttacagctctactgcattatgtccacatgattaccaannnnnnnnnnnnnnnnnnnnnnnnnnnnnnnnnnnnnnnnnnagaaaacagtgatatgcttcagcaacttatttattaaaacattactggggtttgctgtcttattaaaacattgcttcagcgcatcttggtaaattaattagcaacgacatagtcatttgaattcagaagttgcagatgtcctaaagtaagaataggaagaaaaaaacttgcagttgtgtatagttatttttctgggtggctgggtactgggtacaggtcatatagttatgttttgttctatgcaaagttatgaaacctaaagccgtgtttccatctaattgtaggcccatttgactctagtctccggtctctctctccactctaactacagccggcccgcgtctcctcgac

SEQ ID NO: 54665 - DNA, 617 bp, Arabidopsis thaliana landsberg
tgtgctctaacggttgtccatgagggtgggcctgcctgagttctatgtctggttttgtcttccagcatgctagataagacttatatggaaatctcggggtttcaagttggagaatgagacccataaaaactgtgtgagacctagaagacaccagaacccacttagtggcacttgtgccgtgctgctttgatcagtgataacctggatcccagtaggagaaagacagacctcacctcttgatgaaacgagttacaagctattatggacctttccttaaaaacatccagagtccattcaacaaaaactacgctatgcctttgcatcttacttcagcagttctcaatgacatatgaactaagtgtgttccttaatgagatagagaggggcctgcaatttttctcaatggcccctttagcttcttctgatcccttcatgcaagtagcccatctgcccaaccccgaattctaccatggagtaaggtcattgtccgtgtttacttccagaaaataaggaaggcttcctgtctgcaaacacgacagcatgctggctgatggtcagagtcccttttttccctgcacaatcatgcattcagtcactgaaataggagaaaaaaaaaa

SEQ ID NO: 54666 - DNA, 1147 bp, Arabidopsis thaliana landsberg
atgctatataccaatttcttggatcgtattaagtgactgtttgttgtggaactagctctagattctgtaacagagtcttctttcctggaatctctttgtttcgagtgagattctagatgaactgattgcctcttggaatcaatataaacagtctgtgtaaaaccttcttgaggcttgtctctatccactaatgtttagatttacaagagcatcaagattagctaatattcgataaatggatttgttggtcattcaatctggatatactttgatgaactccctgacacggagatacaagtgcaatccgccttatatgattctgtcgtttaacgagagaaagctgaaagcatacatcttgtgacttgaaactcgttccagttgctaattaaagtttttgttgtctatggtcccaggtttatcatgggcttcttgttcggtgggatcccttggtacctcggtgcttttattgttctagtcacatctgttgatcaccgcgagaaagctggttacgttgcctgttcaatcgcagtgagttcctctctctcattacattgtcgtagaacaacggcattggtcactcatctatattcatcattgtctctcataatttctttttctttttatgaattcttccagtccgttatctatttgattgccgtcatgctcgggatgactggggatattaacatctggtgaaactactccccagccaaaaccaaactcaatcttgtatatatatctacatatatactcgaaaacgtagatatatatcaatatcatttacaccagttattgctgattttagtgagttacagaagggaaatatttgtaactttgtgttgaattttatatcataactaaatattgtatatatgtggttgattcccttggtggcatatctatctatatgtaaaatattttgtgatttgttttgaccattgctacacaaaaagttccccaaaagctaaatacgttttcatgtctttctttgtgcttttcttcttctactcaacacactttattatttatagatcatagcgaaaaaaaatccgaattcagtaaaattgatggttgataaaaatctgtagagaattataggcagtgggttgtaaatttaaaaggcccaatggctttagcctgtaggatc

SEQ ID NO: 54667 - DNA, 787 bp, Arabidopsis thaliana landsberg
tcgatctttctaatgccttgttatcacattcttagctttgggttgcacgtaagattgtaagttgggatattcaagatggacaataaatttagattagtaccgccgaccaaacaaattcattacccattttccttgtcacgatattatatcaattggctctgtgacattgaattgtattgtattgattgcattgactgaagctaacatttcggttgaactatataagtctaaaatcactaatcagtaatccaatgcaatgcagtaattagtcttcattaattatgcaaaagcaaaacacttaaatgtcatctatttaactaaaagtatcgtttcactaacttttctagatttgaaatgttgaaatacgttaatagatcagattcattatatgctttatgttttagataacttaaagtttgttggaaataaacatggcttaaaaaccaaaaataattaagtattttgccatttagagagaacttatttattcatgaacacaatcagtaatattgaggaaaatctattttatgttatgtgtttaggtgtatagtttgtaaaagatgttaagtaaaatgtaaaaataacaataagaacatttttgttttttgtatgttaaatgtatcttgtttgtctcaataaatttggttctttattgcagaaataatgtggttgtgttggaagaaaatttctgacttcgctcgctattcagtacaacaatccagaagattttgatgagccattatattttcacaatttcagctaaaattaagtagtctcttctttcaca

SEQ ID NO: 54668 - DNA, 839 bp, Arabidopsis thaliana landsberg
tttgaaatgttcctcaaacccaaaactaaatgcagcttataatttctttagtcatatatctcgtccaatcatttggtggaattcttattaaactaggatttatcatattttgtgttataccaatatttttcattataatcaaccacttatcacaattcaaatgttttttcgtgatttctcaaagcttttctatttactcgtttgtcacttgctctataaatttcttccaactaacaatatttcaaaacaacctaacaatatatatgcaatagctcatatctttcatcgactacatacactatatttttgtatgtaacattttcaactactacgatcagcacacaagtctcatctttttcaaccactctttcttcatttgcatatccctggtattttcgtcactccaaatactttcccaatcatactcatacacaccattcttatctatttcctcatgcacagtaaaatgacaattttttccttagacaattcgtattttcaataacactttcaacacgtcaagccaaaataaaaaatagtaaattagtttcactgtattaatttctgcaaatttgggtaaagatcaacgcttcgacacgtctcacatgatgaatggactgggacatgcaagaacgtccgatgcgtttaacgaatggcataaaacgtattatactaactaaccaaagattattagtggttcttacttgataatgggtccatcgtaagaaggttccatcactaattatggacctttcaaatcttattatgaattttgatatcttacattatattatctccgtataaaatttagactgggcttgcttagtttttaacaaatt

SEQ ID NO: 54669 - DNA, 487 bp, Arabidopsis thaliana landsberg
tgaagcagagagattaaatcctattgttaaaaacatatttcaaatttttattttttttttttttataattagttattagtaatagtaggtattcagtttttcgattgtttatttttatttttatttttatttagatacatgcatgaacttggtctgtacgactttggatgtttttatttcgtactcaacgaaacgtttgattgatgagagagttttttttttttttttttttgtgtgtgtgtgtgtgtgtgtgtctaaagattgatgagagagtaagtgaaggttcatactaagaaaaagtcaattactctatctttgattagataaaattattggacgtgaatcgtaactatatgtgtttatgtctatctttttgggttttctatctttttgggttttctgttactgtatatatatcatattgacatcaacgatttatacttaaccaacctatgacaaactgatagtttaaagttttagatatgta

SEQ ID NO: 54670 - DNA, 1016 bp, Arabidopsis thaliana landsberg
aaaagatattttaatgatagtaattctaaagatatacacaagcgtaagatataaattaagtacttttacaaagacactccaacaaagtgttttttttttttttttttttgtgtgtgtgtttagtttgttcatatacgagatgcatatttagctttggtttagtaatgcatgacacaaacgaaaaaaagaaaagaaaaaaaacagcacgcttttcgaggatattcaggtgttcttgtttatatttctctcttatttaacattgagtggcaatacaagtggacaaattccaaatcttgggaagatctcgtagatgaattttatcgacgacatctgcgcctttcctacgcttcttctgctcctttgttttggacattaattgtttaactactctgatccctctccactcgctatgttttattgtacttattattataagatataaaataacaaaaagatgaagatatggactgtatttcttctccaaaaagtttaaaaatatcagctctcgtagtacccttttggtctctattctaagctttgtgataaaacattcttttggcagatactcatctcctttcaacttcatcttcccactcaacaacttgccttcttggaatatttctttggactcttccatttggatccgtaacttcacgtctacgccttcattgcttatgctaagcactcacattcattactcttccattacgaacgtctaaactattcctgcttccaagttttgtatgaataagttgtttctatgtccgcttttggctagtcatgtgatttcttatagcaaatttgtacccaaaatacgttgagattacgttggctttgatcagttaggtttattatgatttcttaagaacgaaaaacttgctttttccagtgattttgataacgatttcattatttgaacaggccatatatggggttttaccctatacccatttaacctatatgtcaatgttcaacgtactcaattaacaatgcatttgcggatattttttacgtat

SEQ ID NO: 54671 - DNA, 131 bp, Arabidopsis thaliana landsberg
cggtatagacgattggttgggtcgcatgcagacctcatccttgacatgaacatgtatcaggtttccgtcccgtataagctagcagcgttcaacggagagacgagtgccgcacgtgccacagtagtgagtca

SEQ ID NO: 54672 - DNA, 1500 bp, Arabidopsis thaliana landsberg
ctacttctcttctcgctatctatggcaatcgtcagtaaaaatgtgttctattcgtataagcttgagttcttttattgtgtctgttcaggtctccagaacctgaagagaagaaacaaaatatgagagggccgaagaagggggcagccaaggcagttgccaaggctctcaaagacttatctccaagtgaaaagaagtgagtatttacttctcttctcactaccttcaaaaacactagtaaactgagtttttttcttttgtatgtgtttaggtcttcggaagcagctgaagaggagatatcaaatgggatagtcaatgcaatcgataagggtctcaaagacttacctccaagtgaagagaagtgagtatttacatacttcttctcttctcactaccataaaaagacatttgtaaactgagctgatgtttttgcttttgtgttggttcaggtcttccgaagccaaagtggagatatcaaatgggatagtcagtgcaatggataaggatctcgaacacatatcttcaagcgaaaagaagtgagctttttcttgtcttcttactacctgtaaaaaaatactagatttttcttcgtctaagctgagtttatcttaattttgttgtgatgttcaggtctacggaagaggaaggggtgaaaagaccaaatattgtgaggacatatgagcggagaaaaaagctgggaagtgaagtaaccaacgcatacattgacagattagaaatggagaagatgtagtagtagtagtagttttcaattttcatcatcttttgttatagctttagcaaactcttttgctactttcgtatctctaagttaaacagagtagtactaagggatagactaagatgatacttagttatatctatgtttggcatagtttgtattctctcctcaatcatctaccaactctgtgaatttactcgagtctaagaagtatttaacttcattcctgtagaaaaatagctatcaacataacagtaacaggtatagaaattgtttgttaagttactctaaatgcaacctattcttaacgaaacaaattgcttatttttgtttcaagttgtctaagttataagtggagaagaaagattctttaacttacatagctagctaggccttaaagtgtcataacaatttaacatttaatcttcttaaccaaatggaatgtataatcatattaaacacatcgtatctctttggaggatcattaaccaaaatatgcctcttcactttcttcactccctcgtataatctcatataccgctcttccggtatatccatcagtatcctttttagttccggtatttccttaaccgataccgaaaccgagaacttcttccagttcaaaacatcactaaacggcaaaacattagtctccgaaattagaaccggtacacatccgctgtatatagcttcccggactctcggaccgggcactttcgggaccacttcgggccaaaatacaaaaaccgggctttttcccttca

SEQ ID NO: 54673 - DNA, 987 bp, Arabidopsis thaliana landsberg
tggacatggacgtggacgtgggcatggacgtcttcttttgcatccgcatgaacaagacggagttgttgccgatagcactctactaggttcttctactggcgaagaatgcataaattgttttgttagaaataatgaataagatcatttaaggtataatgcgtgagtagcaaaaacaacgttgaaattctggagaagatttttaatactaatcatacgatattaagcggtaactgtggtatcaatgtgttattaacttattatccagatttaaatcagcatgttgcatgtttgttaacaaacgaaattaactatatcattttattttattttattttttatttttttaactatatcattttttactaaactctattatcaaatatctaaaataaataatcctttcctagtttaaagatatcaggacttgaagatttcttcaagctactcaacatctgcttgagctatagcgaaacatagaaacaagagaataaaaacagatatagagtatgaagagccaaagaagtagaagaaacaatagacgaagagcaccagttgacttcttcaaattcatttttcttctatcatgtaacgttttttttcttttcttttctttatttatgtataaggcttaccacataacgttgcatctatctatatatagataggaatagaccactaagaacttcaaatttttcacattttctaatataaacctctaacttttagtgtttttttttcagtttaaaactccaacttatttatttaaacaaactttggaataaaaaagtgaaattataggatttccgttagcttcaaatccaatttttattagtagttaatattgtttgtttgttctttcgagtaaagctttattaaacgcatcatagcccaataatctaagtccccttcagccttgttctaacacgttttcttttatgccatccgatgagatccttctgcatgacaattagaatctgtctctcatcg

SEQ ID NO: 54674 - DNA, 491 bp, Arabidopsis thaliana landsberg
taccctttttctttttacttttctttccctaattctttttttttacaaattaattactaaagaatctccacaatctgattttcctaattacttcataatccccacgctaattacctctctcgattctcacaatcaaatgctgattcttcctatcaaaatccataatttttaaactttgcccaaatttgaggatatgatgtcaataatcatgtcaataattgacataataaataataacaataataattaataaaatcagttattttttaagaatgaaataaaaattgaaacaaaatttgtggggcaaatgaaaagtggaacaaaaagaaaaagaaaacgtaaagctaaagcaaacaacactcttgaaggttgaactgtatagctaagcttcactacactttctcactctttcaaaaatcctctcatctatcaaagtccgagaaagagataaaagatctagtttgagagaaaccctagtttaagatcagatc

SEQ ID NO: 54675 - DNA, 1264 bp, Arabidopsis thaliana landsberg
aaccctttaatcaaagtttccatctttgtcccgaaatcaattgtttcgactttttgttcctgtcttttttctccacaacaagagcttcttctgttcttgtcagtatgaaaacggtaataaatctccttcctttgctctttctctcattagggtccctcttctcttctctagtaattgcttccttctcggaaatggagcccgtacctatgtttgaatcaatcggcgaacacagagatgaatccgcacctaagattagttacgattttatttatgatgtgaagaaaaagtgcaaatcagtgttatcttcagcttctgaattaaagcttgaagatatctctagaactcctagaaaatcaaaaaggaatcttggttttcgatacggagattggaatcaagattctggtgattctccgattctaccttttgattcaacgaacacacttagaaactcgtcgacgaagcctatgaatcttgtttctttctcagtcacagatctagatctcccacatcgaaccaagaaatacataggcgtcaatggtgttttgcttctcgcgatcacaatgtttagcgaattaccaagcttaagatcttatgggctccgtgagtttgagttatggccaagtcatactcagcttaagatctcgtttcaagggatttacgttgagaatgatgatgatgaaagagctttgtgtatgcttggtgaaacaatgttaccttctcgtgatgaatctgattcttctaatccatggaaatgggttaaagaacatgacacgcctcctctttacaaagatgatatgattctgcttcttcttcggtacccgaaaagcttcacattgactaaaagagtgattcaaggagagcttacaagtctaaaccagaagcctagtctcaagcttttcgacaagatccatctcttttctcagcttgggaaatctgttcgttacgatttcgtctctaatgatttggtatcaaaggcttgcgatccatatccttataaaaacgatacctttacgagctctggaagtggtggtatcaatgtctataaagagaaaggattctgtgatcttcttcaaagagttactaaccgcgcgcctctaaccgttgtacctaactggaaatgccacggtacagatgagtactgcagcaagttaggtccgtttgcgtttgacaaagatattaaatcaaccgatggtagctttaaagatgtgaagttgtatatgcaaaacgtacattgcgaggaaaccgcagctcggtctcaatccga

SEQ ID NO: 54676 - DNA, 599 bp, Arabidopsis thaliana landsberg
gcttaacgccatccgttaagagcattgatcatgtttttccgatcaagatttgagacaacagcacagggaatgcgagcagttgtaacagcgtcaagccaatctctaagtccttcttttggttctgtgagctgaaatatcgatagcgacacaactcagggaaccaaaacaaagtgcattttattaatacaaagattgatacagaaagaccttactttgagaagactatcataatatatttccgatagcctgagtttcaatctatcaattttgctttgcgttttctcccaaaacaacacctgaaatattttggaaaccagcaattggatccaattccttatgttatgaatcaagtatacacatagagctcgttatggctaactcgtaaatataaaagaatatcatgagacaagtgtttaatttcacaatagatatttatgttattgcttgcttaaaatttcatatcaaagaaaaatggtaacagaacaaataaatctcaaaccttacgaagcacatggtcagcgccggcataaagcatcagtctttggatgtcaacctcctccgtaatttcttttcctgccaaacaaattaatatgagaaat

SEQ ID NO: 54677 - DNA, 1135 bp, Arabidopsis thaliana landsberg
  unsure (1)..(1135): unsure at all n locations
agtatataagtagcaaaatatgaaattatttaaatgggttaaaaagtagagaaaacaaacaaacacccctggtgacaatatataattctctttaacgtgtggtataagatatagttatatgtataatttatcaccaagccaaaagaaagaggtttatatataaatatgactggtggatcaagagaaagagaaaaatatatgccgcatacatccaagagacagaagccttaaggagtatgatcaagaggcgacagatgaagattttggtggtgaacaatgtccatatctttgctagtttagagcttaaacaagttattggggtttgatgtctctggtgatgatcttctgtgaattgagccacttgtgtgttctctctcatcggacaaaacacaacaagaacacaagaactagaaagagatgaagcagagctcacttatcatggatctcttttatggggtagaaaatgggttgatttaagggtttggaggtctaaattagtacaattatatgtttgattaaaaaaaaaaacaattttcagcatgtgttttaaaaagatcatgactgatatttaattagtgctggattattttataaaggctttaaggagaaccatagccaaagcctaactaagtcaagtcaacccacctacgtatatatattccatgttaattaatttattaattttgggagaaaatattcttacagttgtttctttttgtcaatgaaacagacttatggagcccgagtgatctcacaaaattaccaacaatgaaagaaattataagttacttttgaaaaaaaaaaactttctagttgagatgagatgaatgattaagaaatttctaagaaagaaaaagaatattcaattggtcaaaaagattggcaggatattagaaaaaaaggtttgccatgataggccaagtttaggactagttcccaccttatcttaatataacaatagtgccctccaaatttctgtatttaattcactttgacaacaaaatcacttcatgccaaaaatcgtttaaattcttntcacttcttcttatntatatacgagctagaatgtagatgtattcgaagacttacatatctcttctgataatctaatttacaaggatcaatgagatgagct

SEQ ID NO: 54678 - DNA, 835 bp, Arabidopsis thaliana landsberg
gatacatggatatgtgggcgtcctgatgttgatatcttatgttatgtagacgtctacagtgccgtctacagtgtttatcaagtgatgtcctaatagaactaattcttaaactaacctccatctaataaaataaacgtctacacaaaaataaatgttctagaaaaaaaaatcgtattccctataacaactatatgaatgagaaaaacgttcaagaaaatgtcgttgctatttcctttaataacatattctctgttgccagtgtcactggtgtaaattactctaaatatctttaacaaaaatagatttggtccctgaaatacagtagacataaatttggttagttctattacggatcttgagcgaatgcacatcgaagcaattcctctagaacgctatagtatgaaccatacttctagagtacgtttttatacttttggtaaccattatatacgttaactaacaacaattagtttggtttttagcactataagtatatgaagatagaatgccattgacatattcactgtttgggttattaaaaatggattaaaaagtagttagaatatcattaacaagtcataatatcgagaagtatatagtgtttgagtatttcttttgacttagcttactcagcttagcttctaattaacaacccatttatttccaaaccaaaccatcttttgtatattcttttactttcacctactcatgctttgcattgttatataactaaaactcttactagcttttacatgaaaagtgaattttgacacacaaaaaaaaactcaacatacatgttttaaactaaattactcaatcaattacgcaaataaga

SEQ ID NO: 54679 - DNA, 601 bp, Arabidopsis thaliana landsberg
cacttatttgcatattccccgtgcgcgatgcgaataagtaggaaatctatacgccgaggatcagataacaactttctgtaaagaaaactgaaaaaagtggacaaaaaaatctgttctttttttaaaaaaaaattggtttgccaacatgcccgtgaaggtataatctgttacgcggtcagagaaacgaattacagtagtcgcatggtttattctaatatatcttcctatcggactaagcctttttttcaaccaccgttttgcctaagcgttggtattccacccacaaaggaataaagatggcaaccggtttaatatcactggtaaagcgtttacaaaccctcacctacgggtttaatattaaaccagcacccgtacatgttattcgcaacggttacaatatactatccatatctgctaaccgtgtatactacaaactcatgggtataaccacgagcacataattgtttcgtgttagatttgagtagtattttctctctctcaacggggcttgagtagtattttttatgcctctctatcgggtgtgcgagaagaaaagagccaatctgaggtctctggggtgctcgtctggctgattagttgt

SEQ ID NO: 54680 - DNA, 1089 bp, Arabidopsis thaliana landsberg
gatccgtgattgagtgcaaagacaaatttataataatacattttttgtcgtaaataataattacaatattaaagacaaacataaaaataaaataatcattaattcactattaagtcaactccctggcttccccaccaccgcacgttcgtctctctgtccactcattgactccatcccctaccttttctcctctatcgtgcgcctacattccttggtgctaacttaatttccacctcatctcattaacgtgcgccgtcatccttttttattttatcattaccttataattttctaaatcttgttctttagagattgcttcttttttgccaacttgcttaatgtattcttttgttgttgtccttatcacaaagtgtcaatgacatcacactttttcctccgtcaaatacaacttttctttttagcaaatacatgtttttctaatttggaactaatattattcctcctcaaagtcaactaattttacattagaagttaaaacaaattttgtcaactaatttgaaaattacaaccaggtcatataagtataaaaaaacaaaataaaaacgttgacaaaaaaactgtaattaagcgtctattaattatcacacaccaaaaaccaaaaataccttttaatttatgtttgtctcgacattatattatacacgtggcaactggatttatgttaaaataagtcgtcggtgggcccggcccaatacaaacagttagaataagatgccaaatagtcagagctgatattatgaaacgtcatcgttctagaccgaatccaattctgtatatatattaatgtaaaagatttatacgtgtgctttgtgtttgaaagaaaacacacacacacacacatgttcttcgttgctgcttcgttgggttaaaaactttttttttgtttcttgctttttgcaaagtcaaagataacaaataaataaggtttgttccttctttcgatgctttctcgtttttgtttctcagatctgtatgttcttgatttgtttctatgtgtttgttatctaattctgtgttttgacttttgattactgggaattgaccaactctgattatgattcttgactc

SEQ ID NO: 54681 - DNA, 131 bp, Arabidopsis thaliana landsberg
aggtagaaggcaaaaccaaacatgaaaagaccagcacaaaaataagccccaaaaaaaaaaatttagtgatccccagaaaacagctaaagaaccgaggcggcgaaaaaaaagaaaaaaaaaccaaagccaca

SEQ ID NO: 54682 - DNA, 827 bp, Arabidopsis thaliana landsberg
gattcgtctctgcatcctccggtttcgattcacccggcgaagcaaagtcggagatttcctccgtctccgccgccgccgtgaaatcatgctcaacgccgaaatcgaggataaaatctccgttaatgtcggaaatctctcgaacttcttcactcggtttatagaattcaactggaatcaaatgacagtcttcttcatcaatatagaactcgaggtttttcggagctgattctgcagtttccacctctataggtagatccactctgttttcttcttccttctctgttgcaatttctttgttcttacaatcgaagcttgatacatagcatgaaaactcctcatcaacatcatcatcttcaagtttctcatgagattggggaacaatttcgactacagaagaaactttcttctcctctgtttcttcctgagaatcattcaaatttacagatcctactttctcttcttcaaagacgaagatcgatcgaggaaacttaagaccattgtaaatctgaccttcatctccaattggataatctaaattcccaaagtcagactcaatcggagcacatagtgacgaacttatcttctctacgcaacaaccacgattaaccaaatcattgtgaaattctccgaaaccacaattagattcttcaacaggttttgaatgtaattggagagcatgatcatcgcagagaagatctcgatgagaaggagatttaccagaagcatcgaagaaacgatcgagtctagagcagaagagacaaggacgtttaagaccgaaataatcagcgaatctgagtatgaaatagaaagagagagttggcaaatga

SEQ ID NO: 54683 - DNA, 610 bp, Arabidopsis thaliana landsberg
gttgctttttttagcaatacgtgactaaagggaccttgatcctgttctttttattgtatatcctctatacattattggaaacatccagtttgatgaaggtcgcaaaatctaaatcgcgttgatttccaggaaagaagtttcgttggatatattgtccggttacctgccggaaggtacttacgaaaaagtgcagcgatatctcattcgttacaaagtgcaactaacgatcacccgtaaacgaaacagcgtactgggcgattatcgcctgcccgataaaaccgaagggcatagaattaccattaacggcgatctgaaccgctatgcttttttacttaccctgttgcatgagctggcacaccttatggcatatatttattatggcaggcgcataacgcctcatggtccggaatggaaacaaaccttccgcgaaatattaaggggatttatcggtaaaggatatatgccggatgatgtggaagaagctatcaaaatgtatatgccggacccggctgccagaagctgtgtagatgaagatttaatacgggtattaaaaaaatatgacccacatttgcattatttttgctttgcgcagaattggaagaagagaatg

SEQ ID NO: 54684 - DNA, 556 bp, Arabidopsis thaliana landsberg
ggcggtattgccggattcggcttgcaactgggaacacgatgtcatttttgaatgttcgatccaatgttagtgcaggttgaaccatagcagagccatactatagatgccgaagggcaacctacgagataatcaggcctccgatatttccggggttgttttgggccaaggtacaaccatttgcagtgtaagtttgatatccagtctcatttgcaaaaccgatggaggtgatcacgcgcatcactcgagctagaatacattagtccaaagaccacatggaaacctctttagcaacgagtcctgatacgtaccaatgaggctaacattatacccagtagtcttcgacaagtcctcggcagtcaggctcttacccacgttggcagccagggtcttgaacaagcccatctcaagcgctactacaatgcaaacattgttcactgtctgttgtggtttaatattgctcgcaaggctttcaatagccgggaaagacgagtgagttgacatacttggagtcgctgtttcatcgtaaatatttgaggaggcaccaacttccgacgca

SEQ ID NO: 54685 - DNA, 597 bp, Arabidopsis thaliana landsberg
  unsure (1)..(597): unsure at all n locations
tgaatggtttcagtatttgtaaaaaccgaaaaaacaaatgaaaccatattgtaagcaagcaagattggtcaactatacaaagccgaaaattttcgtatttaaacagcttttgtaacatttatatggtttaaaggtggacaaagcttcgatgctagatgaagccatcgagtatctcaagtcactccaacttcaagtacaggtaacactctcattactctctagagtcgataaaaatcgtgcaaactaataatctaaacacaataatcgccaacagatcatgtcaatggcgtctggttactannnnnnnnnnnnnnnnnnnnnnnnnnnnnnnnnnnnnnnnnnnnnnnnnnnnncagctgcaatggcaatgggtatgggaatgccttatgcaatgggcttgcctgatttgagccgtggtggttcatcggttaaccacggaccacagttccaagtctcggggatgcaacaacaaccagtggcgatggctattccacgtgtctctggtggtggtactttgcgggttcttcgcgatcgacaatggttcgactagagatttatctggttctaaagatcaaacnacgaactgaatacaatagt

SEQ ID NO: 54686 - DNA, 555 bp, Arabidopsis thaliana landsberg
atgtataaattaatgtatagtttaagccttttgttgtggtggacgacggtgggattttaatcgctaattaatgattccacaaaaaaagaaaaattaatggcgaggaaaaccaaaatagttcatgaggggctccacctcacatgaaaaaatacgaccaattagtggaccgacgacgagtacagtgctccttaactaaccttcttcctaatttatcatttacgttcagactagtgtatacttttatttaagtataatttcgtttaaaaaaatgactagaagcttacagaaaaattgttatatacacaatacactatttaataagtctatgactcccatgcacttgacttacgtaacgagaacgcattcatcatcacctctcaattcattttcacgtctcctcttaattttcaactctttaagctcaccatatatacaaaactctgtttttgattttctctttgatcaatatataaaaacgccgatcacaagttcacaacatgccgggaaattctcaccgccggggatccgacgtcatattcaccgtgatgatgatcg

SEQ ID NO: 54687 - DNA, 917 bp, Arabidopsis thaliana landsberg
attgtgtgtatataggggcaaaggtaaagcttgagtgctttggttttgagaaccagacagtgaccctaaccaaagaagccgtgaccgacaacgccggtaactaccagatggaagtaatgggtgaccacgaagaggaagtgtgcgagatcgttctcctccaatcacctgacccagagtgtggagacgtgaacaaccaagaattcctaagaaacgcaggcagaatcagtctcacgggcaatgatggcattgtctgcaacgagactcgaaccattaacccacttgggttcatgaggaagactcctctcgctgaatgccctcaagttttaaggagcttggaatcgtccctgacgtcaccttctaagcttaatatacatatatacacacccatatacatcgatctctcaaagtctcaacacttttaatttttttgatgactctttttaatatataaaacatttatttatgttttttatgtgtctgtctgagtttactaattaaccatgtttttttttcgttgttattgttttatttttgggagttcttttttacgaatgatttgattaccttccaatatttatttgttacttttcgattgaacagatacatgcatgatgtagtgaaaaaccctactctaaaataaatttaaatcatttacatgcatagtgaaatttatgacagtttgagaaagctacatatgtaacatataatgtgaattatagtttgaggtaaatgactcaaactgaaataagcaaaagacaacaaataaaatcgaacccttacctaaagaaggcggatcagagttttgtatatattgggcctttagtctgagccactaggcctgaatcacaaaacgcgttttcacgacaagcgtttgcaccaggatcttttgcagcgtctggcggtggctgtcaaactct

SEQ ID NO: 54688 - DNA, 432 bp, Arabidopsis thaliana landsberg
gtcgggttgcattaagaatggcactgccccttcttgctggctggaattttgggacatccgacttctgatcggcctgggcaggcttatagatcactttaggatgacagaccgcaatccccagtggctagccctcgagcgagaaactatggggctgctcgagccgcacaggcccctatgggttggtgatgaccgtgctagtgagcgaatgtgaacgttaagcggcactcaaggggacagagaaacaaaggcttgtgactttgcgcgttccggtctgtctaaagaggctagcggggagggcgtgattgctgatgggtggaacttatatcggtgtagagccttggaaattggaaagggataatgtaaccggaattgcattgaaagctagggaactcactgtgcgaaggtaacatgtccgttgactaggctggacac

SEQ ID NO: 54689 - DNA, 784 bp, Arabidopsis thaliana landsberg
tcgctgaaaccttttacttaatatttgtttactgaaaaatagtggttgtaaatttcaaacaaataaaatgtacatctttgtaattttagaaacaaatataacaaaagtaaacattagtttgttagaaatttttaaaaatataaaaatatttaatttttgattagactattcactttttctttaaataagatatattttaatatgattggattatactttgcttaaaatcttgggatgtttatgaaatgacttaaaaattcttaaaatagtgtataaaattcgatcatgaccgcaccaatcgtagcaaaacggtaggagcgttcattagacacctaattggctaatttatatggcttgtgaagaatttgggaaccttcccgatattcaccaatattgaatcataatttgttgttttctttagaattttaattaggaacggcttttgtgttaaaattacggtggccactaaagcatacacgttttggagtataaaactataaattatacattcataacaattttttccggttttccaagtttcttcctctctcggtcctcttttagcatctctacagtttctctctcctctaccgccggaaaaaaaaaaacgatttctccggccggttttcgtttctccgttccgttaatagccttcgttttctcgtccttggaatcgtcctctggttgatttctgaatgttcgtttgactcggctacgcggcgattcggatctccgtgtttgactcggtccctggctcgttaacggcgttttcgtagaatgtggt

SEQ ID NO: 54690 - DNA, 505 bp, Arabidopsis thaliana landsberg
gaccagaaagtcatggaaataagtctgacgccttattaatgctacacgcataccttcgtgaacatgtttattgtgatagattattactgatgtagttgaccaccctctggatgatatcatagcatattttcacctactacctgacttcagaactcagattactcttacagcctctgacgcatttagtttttactgcgaactatggggatctattgatcgctccttgaagaggaattgatatcttgacagctcacatataagtatcgatttgcctatacatgtgccgtgtgtgggtacttgaaccacaaaatgtggaccactagacgaattaagctctagtgaggtggcaatcttgatttagatgagtgggtgtttacttaccaaaaaagagattgtttggtttgactatgcgagtggagtcagagaattagtgacttacaagttacatcttagtgctaatattggtagatgcagatcttaggattagtgtaacctttgcatcatc

SEQ ID NO: 54691 - DNA, 1079 bp, Arabidopsis thaliana landsberg
gaacattctcacgttcaataactccataattagcagggttgtttggatcaattgcctctttccactcaaccaacctgatagctgtgttcaatttctgctgcagaacaaacttctctttcccttcagctaccttcaaacgattcatcagctcaccaataaccctatactcaggtctaagcttgaaatgcttctcctcaaatttgtctaatttgttcatccatctaaatgcctcatcaagtgtctctgccaaacaataacacaacaacttagaactaatcagaaacaaaccataaaccatttctaagccataaacaaatgttcatatacctgacttggtaagagtctgaagaagctccttatgtctctgaaacttcttattaaagatatcttctttcttcctctcttcatccaaatcaatctcatcatattcactatccgaatcagaagactcttcacgcctatttaattcaccatcatctttcaaattctgcttcttaagcttctcgataaacggctcaatccctaagtaatcttcttcgtcttcggcatcaatgtctttgtaatcaagtccttgtctttgtctctcctctctctcacgctgcttctctttctcaacctctgctataagttctctcactactctatcagcttccgatggtgacattgtgcttgaggagaagaaacggtacctctgagatgagatccatggcgtttgatttacgggaaagaaggaggaggagtagtaaccggagattcttctgggaaatgttgatgttgaggaatcgagagtagatatctgacgagaaaatgaagatctagggttccggcgaagtagaagaccaggccatgacgatgcttgagttctcaaagacatcgtcagagattcatcagatggaaatggaagatagaaatttcaaaaaccttgagaagactgaaatgatttttagggtttttgtgtgtagtgtgacatttattttacgaatgggcttcactttcactcatgggcccaatttagtcatgtgagtaaatcctcccaaaaatcacctacaagcttattttcaaaacttcatatggttgca

SEQ ID NO: 54692 - DNA, 710 bp, Arabidopsis thaliana landsberg
ccatatttaagcttgcagacgaacctcaattaacgcgccaaaatatccaaaaaaaaaaacctaaaattaaaactttttttccccaaatgaattttcaaataaagattgaatttttatactctataactaccgtattgtcagatccgtcaattttccggcggttgcgtgcatcggagtccaaatcgccgccgccagatttggaattagaagaatcacgaccctcgtgtgaattcaatccgtgtaaaagccgatgctttttgtctctcctctcatcgtcgtcgtcttcagaatttgaattcctccggcgatttgatcggttgctgaaattagggtttctggaactggatctaagctcttcttcgttttcttcattgggatttcttctctgaagcaattgttgctgtttgagagctcgcttttggaggtcaagaagtgatggcctacctttcttcttcctcttcatcaatgtattattatcagctacctcacccattctctctcttctcttgtctctctctctctctattgttctccgcctttctcttctttctaataaacagtcgtttcgtgtttattcattttttgcttacacatgtgtgagtgagttcgtacgtgcagaccaaaattggacacgggttactcgtgcgtgactgcaatacacgtggtttacattctatggatcattttggataacgtttttgagttggcaa

SEQ ID NO: 54693 - DNA, 368 bp, Arabidopsis thaliana landsberg
ttctggatagctcttctctgttctgatccaagcgaggaatatttctcctagtctgatgatagaaggatcgacacccacggatactaatctagatgaacccggacttggtaggataacctatctcaaggagttcagaaacggacaactacattatgaggctcgcgatctacgccagggatcacaatcaggtcagactcatcgacgaattatctacatgcaaggcaaggccgaggtgtacctatgacgagagattaccagcctgacctgcctagacactgcacggttgctgctgaatgacgtattatacttctacgggctcggttgcatagggagacctggtcagacgctggttatagtgagtgaccaaa

SEQ ID NO: 54694 - DNA, 1263 bp, Arabidopsis thaliana landsberg
  unsure (1)..(1263): unsure at all n locations
tagaaaaggattcaaaagatggaacattttgatcacctcccaccagttttctccttctccggtcgtttccaaacattgatatacctcagtaggtacatccctgaaaattgaatctcaaatcaatataaacagtcgtgtaaacaaagactttgcagctcatatacaatgagatctcgtgaccaggtaataggatcaaaacttctaacatcgaagattcaatgataatttagaaaagacgaaaacttactgagccccgatcaaaagatgatagatgattcacatttctaacacaattcgaaaaactaaaacaatctaatcccacaaaaatctgaaatccaaagaagactaaaaaatggatcttacttgagagaacgattggaaagattcagcgaaccagatgttcgagctgctttcagaatccgatccattaaatatttctctctctctcgatctctcgcgttcgttcgttcttctccgtcgttattacagtgccaccactctcctttcggaaagtttaatgctttaagaaaaattcacctctttttatgtcatttcaaattaagaaattatataagctaaagttcgtattttccattaaagtagagagcttaacttgatttgtgtgccggtctatttaaactcatttgtcagtcatacagatacacagccatggaaatgcaattaccagctgcctaattcttaatcaatctttttctgtctctgagtacttctcacttattcttatatgcatttcccttatatatctttttacttgagcaagaaagttgtattattcaactttctgtgaagcttttataaaccaaaatagatttcattatgagtgatttattagactggtgtttcatggactcttaaagcttaaacatnnnnnnnnnnnnnnnnnngtgcaagagcttcggtcatggctcctttgtctgacatgtgtttgtcttgtcctgatgtgaaaggtggacaatggggacagcttggtgggatatagtagtgtggtgggttcggattgcagccacctgtttggcatccagtaccgtagccaggaactgtgatacctggaatcacaaaaccgggaatctgtgcgcctggaaccactatcggagggattcttgtgcctgggactactacactaggtccaccctgtcctataccgataccaatccctatccctggaccactaccttgtcctatgccttcaccgaatctgctacctggagctcccgtgacagggccgcaattgggttgggcaga

SEQ ID NO: 54695 - DNA, 729 bp, Arabidopsis thaliana landsberg
gttgaaggagttagccaaatgttgtttccagcaaatgcagccgcgtatcacaaaagctattttgctgtttccactctctaaactttgatgctctcaatcgcaatatatatggagcacgaatctatgtgattgtgcatttggtaaacttgtattgcagtgcttataattattagtatgtaacggggaaaagttctaaacacaaaaaaataaacttttgaatgttatatgtgtgaattatttttgttgttacaagtaatgctctttttttttagcttcacacatgtattattggagctaattttttttttctctgttcttttatttttgttttcttactgtatttactttgaaaagtttcgttttatacatatcggacattttttagtcatccggtcttcatatacattagcacgactctggctaaacgtgtaaatgaaactgaaacagaaaattacatggttaatctgatatatatatatctgtttttaattgcttatttaaaactttgatataatacgatgacaacgttcgcgcctactgaaactatttctgatcaattctctctatatatataccacttcacttttctgaattcagttataaactatatcagtttttctttttttgtctaaaacttataaactatatcatagagtaatttatcacgcaattaatcactagaccgcaatggatatggtttttctgtacttgtggttatggatgctactc

SEQ ID NO: 54696 - DNA, 550 bp, Arabidopsis thaliana landsberg
gtatataaacatggaaaataatatagtaaaatactaattatgaaaatgaaatgaatcacatgttatatttttttttgtatataatctaattgtataagctagatttttcaaagttagtacttaaattgtttctgacacctatgtcaatcaattcactagattccgacacgtataaacaagtttttctaatttaacttggatttatggaacattattgattgtggtaaagtagatacatttctaaatagatgtgccttttgtggttgcattctacgcaaattctattctattttgaaaatataaaactcgcataaatctgacggctccaagattaatcacaaataaagctaaagtcaattgagtagcaactgctcaaaggcatgtaatattcctgtcccagcccatcaaaccgaattaatttgttttgggaaaaaaaaccttatacttatgaaaaatactaaatttttgaaagtcctacaaagcccactaaacccagtaaaccgcaatgctaagcataaattatgaagatgtataaatacggatcctaggg

SEQ ID NO: 54697 - DNA, 619 bp, Arabidopsis thaliana landsberg
ctaaatggctctctgattgaagtgctcgaaccataaactaaccgagtcaatgaggtagatgggtatgtactatgctatgaagttggtgtcgagagcacctagaaccttcaaagctagttggtagtcctctagacaattctttgggtttgagttcccatcatatcagagtcgaccaagtgtccctcccaaaagctctgagttcaattagtgttagcgagtgtccttgcctaatatgggtcttagaacgatatctcttggaggtcttcaccttcatgtttcttggatttcatctgccatcagtcaacaaagtgcaagcgctcatcatcctagggtgggggtgaggtggtgtgcggttgctacacttgttcttatccttatcccctagatgcattcatgattgttgttctcattcatgtgttcctacatgtcaatggttccatgaacaactttgttgtcacccatcatggactaagtgtggtgggagtcgttatggttgcacttcttcactcaggggtctcgagctccgagtgccacaaagtgtcactaccacataaaaatgaccgctcatgacaatgtactaaggtactaagtccatagcttgacatgcctagatctatag

SEQ ID NO: 54698 - DNA, 918 bp, Arabidopsis thaliana landsberg
  unsure (1)..(918): unsure at all n locations
ttaacataaaacagtagtggaactcaattgcatatggggacataaatctaatgaaagactcttcaactaatatacgttgccatcaaaatgtactcatatgtgttcaaatactattattatactcttagccatcagagtaacagtgcgtatccgtgaattacacgttttctttgacatctattttgtagaataatatttttattccgatggtttcgatttggctttacgttttttttttggcacttgtctgttttgttttggtgaaatagttttgttttctttatggtagtctactactagtcttgctagatggccgaccaaaacaaaaaggactgtccaagaattattcgcctgatgaattcattagataactcagcgcacgaacgtgtatctaataaaatattacacgtagtttcatactactattcctatcaattttttttccttccacatgatgtaattgaagtctaaactttgacgaatatattacttccacgtgcttggagactgaacttacatgaaagaaaagaaaattgtatgatcccattgcattgttatagcatggtcccttggatctaaacctacaaaaactcgtataattgcatatgaatggtaaaaaatccaaacatgtaagtatattctttcggccagttgtcttccccgatcaaaattatgaacatgtatttcattcttaccctttagccttaggcttgcacacttgaaaaaagtagcatatattcacacgtgaaactcctatcctttacaattattgtatctctatacacgtctcacaaaactgtgataagattatcaactatttcatattcagtagttaagaagaaaanaacatttatctaactatcgagattgttttttctttttgttatctagttctcttggtttccaactaaataatca

SEQ ID NO: 54699 - DNA, 1484 bp, Arabidopsis thaliana landsberg
ctaagggctaccagaatctttataccaaagaagaccatcacatcgaccattagcgtctctagtagaatgatctcctttaacagaaggtcgcctccaacatggtgctaccatccgcaatatggttgccgatgataccataactcacataatcccctcaataatcaaaatttctttacttcatctaaaagatcactaacacccccaaaaaaacggaatcaaatcaaaatttgcttattcctccttccctaaacaatacaccaatacgaatgcatcaatacacatttgtcgcgcatatacaattacgaattttcttcaaggatcgagatcaattaccttaaaaaaaaaaagccgcgaaatgatttaccgttcggacaaaacaaaagtgaaaattggatcgagatcggaagcaggagttacgataagaaggaatcgtaactccggttgggattacagagaggaagagagatgacgagagagaaagaaaacaaatctagcaggcgactctgtcagaattccttatttgggggttcgatttctctttttttctctctttttttttttcttttttttttgatgctttttttttgtcatttggttttcgagtttagctgtttaggcattgacctcagaaacaacccgacgttttaggcagctttttctcccatagttagctacgtttctccatttttcaagattactaattttattaaaatattactataataaatagatttttatttacattttccataatctgaatgaaatcaaatatatgcaaatatcaaaagtatcacctgatcaccaattcctagttttgtccaatgatactgatgattcatcagccgattgattgaaggaacaaatttgaagttttccactgctagttgaattatggttagttcatttgacttatcaaaatcaaatgactaaaatattcgaattttcttacatgctgtagagattaatttcaattttaattcatcatcccattatctatataagaaaaaagtagaaacatttcgcgaaatacaatccaccttctgggttgttgtcttgttgaatatggtcaggaaaataagaccattaaagcttcaacctccaagccaaagagcaaataaaatactacaattaacgcaaaaacatggaaaaaaaataaagtctgcaaattggcatgttgacatgttgtacgcgtagctttacaacctcacaggtcgttttttttgtgtgacagttttaaaccccaaaatctctttctttttgtttttccctaaagtaaaaaataaaaatctaacatgtccgaagtcgaaccaaacataaacatacaggtgttcgaaactagttaacacaataacaccctctagatatatatatgattatggtatttactttttcttttggtgaatttttttgtttggggagagaaaccattaattaaaccaaggttgggccccatatttcccagcggaatttttccttcaacccct

SEQ ID NO: 54700 - DNA, 739 bp, Arabidopsis thaliana landsberg
atatttattactatgtcctatacatgagattttacattgattttgaatcttttttatttataatataattaatgtttttttgtaggatatttacacaaagagttgttgcatcatcgagaataactaatgactacgaagatgttttcatatgttttgttacattcattgatgatgtttgctatcatcctttcttccatgggttcaccaggtgacacatttattggttaaattatatattatatcttaaacatttaaattttttaacttgaaattctttgaaacattcaaactgagatttgttttcaatggttgagtcaaattcactaaaaaaaactcatttaataaacatgttaaaacatattttgtacttaaagtaatattcatatgtttattatgaaccaaatagaaaaatattatgactgtaagcaagacggatgtataaccacaccaccatgctggagaaaatgcgtgtctatgggatacccgaaaggaggagaatgtcgaatatacagttatgcggtgtttgttgttgtgacctcacttctaagcctcctaattaaaaaaaatttcattataaatgtactcccaataatatatgaaaagattatattcaataatgtttcttgttaaaaaaattatttagttttacctgcattaatgatgtttcctttcatctttttacccattatttcaaataattcattaattatcaaggttacgttttctcaaatttttgatc

SEQ ID NO: 54701 - DNA, 517 bp, Arabidopsis thaliana landsberg
atggtaattagtcacttttgctaaaactaagaatatttagcgggaagatgaacatgcatgaaacttattttatcttgtggcgcccacagcggaagagcatgattgcaagaaccgactggcgaactgaggttctgttgttacctaaccaccttagggggatgcaatctccaatctgtctttctattctccaagacatcacaccggataaactcaatcatgcggctgacatctgcttcaaaacaacactttgcttttacatgtccaatccgccttacctttcttggctggcaagttagccgcatctaggatcacttgcaacctcaaaagctctctttttcaccctatattagggtaagatcaagggaactcaactgctaccgaattcaacttctcttagctgtcgaaattggacataggtgtctcaggacatgtaggaacctccgtttgtgtctcttcatgtatgcactcagggaacatgtgttgccatttgaagagcttccatacacgctcaaaatgt

SEQ ID NO: 54702 - DNA, 462 bp, Arabidopsis thaliana landsberg
ggctgtcttgcagcatcagccccggccgggtcaggccgagcgcgaggaacgcgagccgggtcgtgccgtgctttagctgggcaggggacaccacacagatcccgctggcgatgccgaccacgatggcggtcccggtggagcggtcgatggcgtgcttgcactccggtaccgggacgtcggtgaaccggaccagcattgggtgggtcgacaggccggggcatccgttcaggataaaggcgtacgttacgtacgccaggctgaaagcgccgtactggtcagcgcccagcgtgcgggcgatgtatatgttgactgataagttggtgatgctagacatcccctgggcggggatgccccagccgatgcgggggttggtcttcctggtcaggtggcatggcatgggcgtcgtccgcttgagcgggaccgtgtgctgcagaccggtcgtcgttatcgtgttggggcgac

SEQ ID NO: 54703 - DNA, 872 bp, Arabidopsis thaliana landsberg
  unsure (1)..(872): unsure at all n locations
tgttcaatgtttatcttactgtatttgatccatttatttcacttactaagcagtacttgtttcgtttattttgctgttttgagaacctggttttcataaagtaaaacattgttctcaataataataaaaatctagtaatggagagagcaataattatgaaagaaagaaaattataagataaggacaaagaagatccaaaaaaattcaaactatggaaaaaagttacgtgactaagggtataaccgtcatttaaataaaaacgggtcccatctatctctgtctttattaaacaccagtcaaccattcaggtcaatcgcgtgttctgtaattaccaaaagtacccctccggttaaatccaaacaaaaaaaccggttctgtttttgcataacgcatatagtttcagtacaatgctgacatggcttcttctaattggtcccnnnnnnnnnnnnnnnnnnnntatcatcctctctttccctcctcctctaccttctctttactctgcttcttcttctctcatctctcttcttctctctctgcttcttcttgtgggacaaaccctaattattttacttcgatctctctccacttttcccgctcaatcatctgatctttccctctctcagcaatgcatgatcttcgattttctatcagtgttcaaagctgaaaaaaatcgaactgggtctgttgatttcttcaggtctaaaatcagattagattagagaagaagaagaagaatgctggaagctgtagatagctcaggagtggtgaatggaggattcccgcagattcagagcttatacggcgattgcagtagtgaagaagagttatcggtattgccacgtcatacaaaagtggtggtcaccctgagtgca

SEQ ID NO: 54704 - DNA, 425 bp, Arabidopsis thaliana landsberg
tttggcgtaaaaaaaggggaatagcttgaattcctgaaacaaaagaacaaaatcacgaaatcggtcttgatagttcatattcttggccaatataggtcttttatatatcatcaaatacgccttgtgttgatattttccacaaagacatttaatagtaatataccctctctattaacaaacatacgacctacaacatctgtggaagtagaagaggatcacagtgacgctgtggtttaatatggcacatgcaataactgggtggactatggggaaatatacaccagccgcagattgtcttgtgaacgcgaggtggtactagatccagatccttgcaaggtagagtatgatagtcttgtggtcttggagatgctccagtgcatagtctcaggatatcgttccctgttagaacatagtgtgagaatgcc

SEQ ID NO: 54705 - DNA, 337 bp, Arabidopsis thaliana landsberg
  unsure (1)..(337): unsure at all n locations
agaagaaggagacggaggagaagcaagcgagaagcagagaccaagtggaaaggcaagggcaggaaagcgagagctacggggggcgcaagacgcgggaaagaaaaggggctaggaaacaagaagannnnnnnnnnnnnnnnnnnnnnnnnnnnnnnnnnnnnnnnnnnnnnnnnnnnnnnnnnnnnnnnnnnnnnnnnnnnnnnnnnnnnnnnnnnnnnnnnnnnnnnnnnnnnnnnnnnnnnnnnnnnnnnnnnnnnnnnnnnnnnnnnnnnnnnnnnnnnnnnnnnnnnnnnnnnnnnnnnnnnnnnnnnnnnnnnnnnnnnnnnnnnnnnnnnnn

SEQ ID NO: 54706 - DNA, 1132 bp, Arabidopsis thaliana landsberg
  unsure (1)..(1132): unsure at all n locations
tgtagagattgattggtccttgattcgtctctctagagtttgaaaaaaccattgctttatgtacttcttcgatgcataaaccaatgctttcatataattccgctgatattaacaaaaatcttctctctttgaagcttcaaaacagatcacatcatgttatacagttaaagccttcgccttttgcgtcatacatatctctaaacagttcaagaaggtcactgttatgcaaaagaagattggttgtatcttgtttggatacaaatgacaattctgtcacaactacatcnnnnnnnnnnnnnnnnnnnnnnnnnnnnnntaaaccagtaagtgaatcagtgaaatcaagcaatggcactgccaaaaaagcaccattgacagcacgagagagactaagagcggctcgtgttcttagccgatacactgaagcaacaccgaaaccgtcaaaacctaaaatggggagccaacttcttgatgtgctcaaggaaagtgataagaaatcaaagaggaaaccgggtctacccgaagcaccaactaacatgcttgatgatagcaggagagggatgccaaagagcggtcttacgtttgattttccggaaggctcggatattctcatcattgctttctcctttgtgttcataagcacagtcatgtttgctcctacttttcttgtttggaagactcggtgcgatacacttcaacgaatagtaaagttgagatttggagaagtttaatggagtttggaaaccatcaagcagggaacgagagagagagagtgttttgttacaatgttagttaacaatgcatacttggggatgtgatggggatcttcatcacttggcaaatccggcctgagtgtatatacatatactctgtagtacacataattttgctatgaactctcttcatgcttgatttgtaattttaatctttacattgtaatttcttttcatatggaaatggatgcttaaagaccaacaacagccaatgtaaatatgtatcagatgttagagagcacaatatcacatgtttattttaagaagagaatgagagataggagggtttgggacatggtaagttaagaatgcactatgcattacttggaatgtccatcatctagctaggcctgttttgt

SEQ ID NO: 54707 - DNA, 640 bp, Arabidopsis thaliana landsberg
aggctatagtgcgaagttgaggggatgtaggggtgagcggcaaagatgaggcggggtggcaacaccaagagcagtggcatggagggtggagtgggcaagtgaggcatcattttgggagtcaccagggttgtggacatccgtaggggagcacagtagatctaaaagtgattactccgagcctggggagagctcatcaaacggaaccgtgtggatagggacccacattccccccgatgtggatgttgggtagcgatggtggaagggagtgagcactcgactaatcgacatggtgtaggcagaacgatgatggccataggagcaatagttgcagcaccagttggggtcatggtagttgcaaactaggttattcagagcgaggcaacgaaagcacttaaagggcaaagcaatggggtgtgggtttgttggtttttgctggtttttgcagcgagcggtggcttggatggggagagaagggcgaggtagtatgagactttaagatggtcgtgtgtatgtgaggttacatgcacgtttaaggcggtagatggagtacagttgggcgagcggaaggggtgatgaccaacatgcattaaagaggcctacagagtgttgtatagtgttacatggggcgggataatttgac

SEQ ID NO: 54708 - DNA, 133 bp, Arabidopsis thaliana landsberg
  unsure (1)..(133): unsure at all n locations
cataagaatatagaagataatacaagatacaatataagatacacacaaaaaagagataaaatataacacaatatacaacagagataccacangnaaaaacagataagaganaacattagacatagaagataga

SEQ ID NO: 54709 - DNA, 438 bp, Arabidopsis thaliana landsberg
ccggacgattgccgttcttcgacgtacgggctcccgcctctttttccatgactgccgttctccattgcaagacgcaaccttaacggcgccgcccgcacctggttccatggcggcgtggttctggaaacctgcaggtcagcgggcggcggagagcagcgtctccatcttgccgaggagccgcgggagatcgacgggcttggtatcgaagtcgttgcagcccgcgtcccgggcgcgggcctcgtcgacgctcatggcatgggcggtgagcgcgatgatggggagggtggcgccggaaggcgtctgccggatgcggcgggtcgcctcgcagccgtcgatgcccggcaggccgatatccatgagcacgaggtcgggcgcttccgagatcgcgcgggcgacggcttcctcgccgtcgacggcaagaagcacctcgtagccctt

SEQ ID NO: 54710 - DNA, 170 bp, Arabidopsis thaliana landsberg
gatctgatttcgatgatttggatttagattgctgacgggtcaggtttgaatcgggtggcttgtcgggcaaaaggtggatgacccggattcatagtggcgatacttggagcagctggtggaattggccaacctcttgcgatgtcgatgaggataatgccctgtggtttcgg

SEQ ID NO: 54711 - DNA, 134 bp, Arabidopsis thaliana landsberg
  unsure (1)..(134): unsure at all n locations
ccccccccccnccccccccccccccccccccccccccccccccccccccccccccccccccccccccccccccccccccccacccccccccccccccccccatttttttttttccggttgttttcccccccccc

SEQ ID NO: 54712 - DNA, 569 bp, Arabidopsis thaliana landsberg
acaccgacgtgcatgccagactgcacctcaagcgtgacggcgaaggcccgctggtgctggatggcgaaaaccttgacctggccaaggtagcactggatggccgcgagctgggcaatgacgactacgactacgacggcaccgtacttaccgttcccgccgccgaagacggcaacgtgctggaaacgcacgtgcgcctggacccgtcggtcaacaccgcgctggaaggcctgtacctttccggtcagccggaaaccggcttcctgctgacccagtgcgaggcacagggtttccgccacatcaccttcatgcccgaccgcccggacgtgcagtcgcgctacaccgtcaccctgcgcgcggacaagacgcgctttccggtgctgctggccggcggcaatcccgacggtgccggcgagctggaggacggccgccactgggcgcgtttcgtcgatccgcatcccaagccgacctacctgttcgcgctggttgccggctcgctggaaaagatcagtcgcgactacaccaccgtcgagggtcgctaggtcacgctgaacctgtgggccgaggccgat

SEQ ID NO: 54713 - DNA, 1106 bp, Arabidopsis thaliana landsberg
ggcacaattcttctgcaaccagacttgccaaaagtctcctggtgaactttatcgaacacatttttctccttgttgtactcaagtataacaattctacccgaatctgagcctactacgatataatccttctgcgcaccagtcaacctaaactgagctagggatctaattgcaccaaatacttctacagagtgtatcgtctggatcttaccgttctcgtcgggacggagaagatccaaaatcttgccacgagctaccgcaatctcctgtgtcttgccgccggaaaagttcccgttgattgcgcagacgattcccgtcgcctgctgcagagtaagactgtacagatacatctctcaaactagcaagctacaaccaccagcaacggctagggtttagagtttagccttcaatttacgtttttcgcagggcgtccgagtttaggtgaactcctagagcatatttcaactttggatttgacagattatggtgaataaaccctaagtattaccgccatagctcgctcgaaggtcgactatgagagtggagtggtgttctctaacggcggagattcaatcatgggcctatttttttagaacgaaaccggcccaaaacaagtttactctaagcccatatagaaacagtgaggaactgtaatcatgacaagtttgtaaaaaaaaaacttatctagaaactattgaactacaattttgatttattttttcctcacttgtaaatcattcttttttattaattgatatttttcaaaaataattcaaattgtatttagttaaatcagtagtgctttagaagagacaatcacaagaacatccaaaaaattaaaaatacaaatcttgtttacaaaaaaaaaaaaaaatggtttccaaaaaccatctataatctgataagctatcatgcagcctttatctattcagaccttggaaagaaaaaaatatagtttcacttggagcaaaaaacatgaagtggttatagtctaaaccgaatctgaggttatcagaattgaggttttgcttatgattattagcctttacttgaagaagagagattcttgtctgatccatttgacaatgcaatgaacacaatttttgatt

SEQ ID NO: 54714 - DNA, 1032 bp, Arabidopsis thaliana landsberg
aacgtataaataaaaataacaaaccgtaaaaataggtatcatgttttaatagacgtccaaatgtttttcttaaaaactggggtttaattcgggtttttaattcaactttatatttatatcaaataaaagaaatattttaacttcaataaaaaaacatgataaaaataatttgatactaaaaacagtttaacttaatcaaaagttacaagaatataactggatttatgagttaaaatattaaatattaacttgatcaaatgtaaaaaaatattttacttgaccaaaaagttaaaatatgaaaattgtgactaaacgttatgaaacacaaaaggtggataaaattggaaagttaaaacaggttcgcaaaggctatgatctcttcgttaatcttaaaatcactcatagtgtacatgttatgatacgattaagaattccaaaacacaaatttatgaactgtctcaaaatttactttatagaagagaacagatgaatgagattggttcgctctcaaaacttttagaatgatatgtgagaatgagacattgagaagtctcgctattttcttcactaaaacgcaaaaatgttgagagttactaaaaggaaaataagtttttgacttttctgaataaaaattgtcggtaatattgttatacacacttctttcttccttctaattatattcgtggattagagatcactcaatcccaaaacaaacacacatttctctctctctcgcgatcaaaattgttaaacaatctcttagaagaaattcaaattctctctgtttcaattgcgattcaaatttcaaaaactgacaatggggaaaccaacggggaagaagaagaataataattataccgagatgccaccgacggaatcttccaccaccggcggaggtaagaccggcaaaagcttcgatcgatcagcaaccaaatcattcgacgacgacatgacgatcttcataaatcgagcattggagctaaaagaagaaggcaacaaattatttcagaaacgcgattacgaaaggagcat

SEQ ID NO: 54715 - DNA, 570 bp, Arabidopsis thaliana landsberg
acggtttaccgtcttttttaaataaaaattaacctgttttgttacgggattacaatattgaccgttgatatttgcctgcaaatacgtttttagttcatatgcatttacctcagtggttatttcattttgctcaggtataacagctgcataatcaggatacttcgcatctatattttgccctacagtataaccaactactttttgagcactggaattgacaaaataaatacccctttctttaatgcctttattgggtaaacaaatcaaaacatgagcattggttgcaacgatatgtttaccgcttacatacatacccgtcatagctggtcgtaaactatcccggctaaaataatcgccaagcacttttgccaggtttttatccaatagttcatatttaatatccaaagcagctacttttttgaccactttccatggattagctatctggttccaattagaaaccattctgttattgatggatactttttgcatgttcatattagcattaatatttttattggcctttttttcctcttcaaccaaattatctacctgctcttcactaatatc

SEQ ID NO: 54716 - DNA, 795 bp, Arabidopsis thaliana landsberg
gaacggttcccaaacgaaagacaacctaatgcaaacatatattcacaactaacatttctacatgcataaaatagtaaaccttactcaaatcccaccaatcgagaaattatttatacaaggttggaattatgtttctaaattctcggttgaaattttgattatttttgttcaggccattatatacaatagaaaagacctagaacaaaggaatttaatgcttacactgatctttttaggagaaaaatcatacaacttgagagtaggaacgaagggaaggcattgtcggtgactcaaccacttgagcaaaactccacactcctttcctttttgttttggatttttgcgctgttcggattaacacggacttgccaacgtacaataaacattcaaatacattagtttttaaataagccagaataaaatgtgataactaaacaatcataccgtacgtgtctcgtttttttttgttaccaagatgccaaatagaacaagtaaatattattttaaagaacgatgaatgaatctatttgtttttatataattattactccatatatcttaagtttatttttttaaggtataaacacacagtttttttttcccaagttgttctttattataaatcacaacacatcttacaaaacaaacatattggataatttcttattagttctttcaaaaatattatttttatttaaccaatcatggaaaaaactggagaatataaattgtaacaagttatcaaatacattttaaattgtatagaaactagcaaaacatcttataaatgaaaca

SEQ ID NO: 54717 - DNA, 512 bp, Arabidopsis thaliana landsberg
gggccgaggacctgatcgacacggctgaccttgccaacccgcgcgagcggatagacgtggctcgcgaacgcatcaactgtgccgatgcagggctctactggggccggtacgacgagacagagaggtccctgctccgctctgcggagctcgacctctcagatctcttcccccatcatcagccgatgctggcacgcacccgcatgcacctcgactggctgcgtgggcagtggcaggggatcgtcgagacgtcagacgtcccggagcggccggtcggtccgggagggtcggagtggatcgaggccctgctcgtctggggttcgctccgagcggtgcgcgacgacccgagtggcgggcacgccatgctgctgcaagcgctctcgcaggcgtgggagaccggctccttgcagtactgcagcgagatctccgggatgctcgcgtggatgagcctcgacgcgggcgcgcccgaagcggtcctgacgaccgctcacgacacgatcgagatgatcgagcgc

SEQ ID NO: 54718 - DNA, 138 bp, Arabidopsis thaliana landsberg
cgctaaattcggtgtggctaccatcagttacttcgctaggtggagataaattcattgactctaattgactttgaacacgctccgaattcgtctttggatcggagcttgggtttggatcggccaattccgtgtcggatg

SEQ ID NO: 54719 - DNA, 948 bp, Arabidopsis thaliana landsberg
gataaataattggaaaatatatagtttgataactagcgagactctttcatcaccattcttcacccatgtgagcctttgataatgactcaatcaaacacccaaaaccatcttcgattatcatcttctcttttcccttctttaatattattttgtattgttattattgaaacaaaccttaatgtattgtcatcatacccatgatttctgagtgtacagtttacctacgagtctgcgacctattaaaaaaaaaactctaatacattatttttcaattaaaaacataggtttaataattaataaatatgtgattatgcccattactgaaacttggagagggaattagtataatattgcataaacttatctacaatttttagatagtagtatatgttaattgtatagggaatgtcacatagtaaccacttcttatttgggtttatatatggatgtttttgtttgccaatttatcttttgttcgacaaagtttcatcaaataaaagtaaaggttatgtcgatcatattcagtcgcacgcatatttaaaaaaaaaataatctccaattgagactatatccttttagagtcaattataattggaataagaggtaatagaagaatatgttgggcaaaagagtgtgtaggtagaatggatacatcaaaataacaagtgccaaatattattagttcaatccagtatcaaattgatgaaagaatcctagaccgcaattatgacgacaagaaaaacaactagagaaggtcattaactttttatcaaataattgatcattttcaccctactaataatcattcttaaccctaataattattcaacatatgcttttttttgtctgtatatttgcatccatgtccataagaaaacgaaaaaaaagaaagtaacttatctctctgggtgtgtagtaaaagaaggatggtactgaatgctaatatca

SEQ ID NO: 54720 - DNA, 397 bp, Arabidopsis thaliana landsberg
atatatatatatatatagatatatatatatatatatatatatatatatatataaaaaaaaataccgatactagtttatcgagatcgagtatatagaggtagagggtatgcggaagctgtaacgagaacaactacaccatccaatacatgaatgcgcgggctcaggcggatgcagcaacacactcacaccttaaacctatacctaaaagttaacagtcactatccagtgcctgagctgaaaaataaagatatcatcctccttcatccaaacactaccattccaataaaatcgtagaacacaataacaatgtcgaaatctattgatcgggtaaacggaaataaataacaatagccggcggcggccgcgggcactgacccaatacagctgaagactgaaa

SEQ ID NO: 54721 - DNA, 670 bp, Arabidopsis thaliana landsberg
ttttccttttcggcgcagtatgtggaaacaagcttatgcttaattattgcagctggacttaatggagctaaacaagctttgttggagatggtaattttaccggcaaaacgaagagatttgttcactggtctccgaagaccagcgagaggtaacatttcaagcttggtttcttctttatcttctccattgccgtccttggtaaagtaacttctttgttaggtctgcttctctttgggccacctggcaatgggaaaacaatgcttgccaaggcagtcgcttctgagtcacaggcaacatttttcaatgtctcagcatcttctttgacatcaaaatgggtgtgtgcttattctgtcactgtactgtcttttgtaataactaacaaggcttgttgaatttatttgtcaattcgaatagacaaactgactttactgtattgattcaggtgggtgaggctgaaaagctagttaaaacgctgtttcaagttgcaatatccagacaaccgtctgttatattttatggatgaagtatgcacactttttcctttttctgtcttatatgggaagaactactcttaccagagttctagataataccatataagttgtatttgactgaagacctaaagatcccttgaaaaagatctttttcatatcacatattgtcacttgga

SEQ ID NO: 54722 - DNA, 830 bp, Arabidopsis thaliana landsberg
atctggactatcatcattaggacatcatgaacttattatctatggtgggtttgtggaattctatttgattagagttactgttgcttaataaggttaactttacaaaataatcaaaatatgtttgttgttcctataatacttttccacgaaagacttgggattcttttgatttaaggggtccatacactttatgactcgtcgtccttatccatatctccagctctatacccaccttgcattgtttttatttccacacttctacctcactgctcacgcttctcatgatcaatggttcgatctatattataacattaatgttatatattaaggtcctttaaagtaggcttatccacatcctaatttccaaagatggcgtgtattttagctctaaaccctggaagttgcatgttatattaaaatgttgtaaaatgacatattaatacataacacacaatttacaattatattatatattcatgttgtttattgacagagaataataacattttggctaaacgtatcaaattttaacgaaaattctatgtgcaagtatataaacttcatttggtaattaagttatcaattacttgtcaattatttctagtctattatagtatttctctagatattttgtgggtcaaataaaaaatgagagaactagtcgacaaaggaaaagagatatttttacgaatagtttaaaatgagtctataaattagatgaaggaagccctttagtaagtacttcacacttgacacaattctatccaaaatcaacccaaaaaaagaaagaaatatgtgggatgaactgtagccggacctaaccggagcat

SEQ ID NO: 54723 - DNA, 1302 bp, Arabidopsis thaliana landsberg
  unsure (1)..(1302): unsure at all n locations
ggggacaacaacacaagaaaatgggtgaagacaccaagtggaagcttctggtgacaagggttgtgtctgcaaaagctatgacgtcgttgtttcagtcaaagaagaacaaatgtgaacaagcacaaggggtttaatcaaaaccaggaaggagttagttaggtttgaagaagattaagtaagaagctttcttataatttgatatccattctttttgtagtataatagtatttgttagttcgattctttattagaggggttttagtttgtataggagtaaacccttttaaattggctgtataagtaggtcatattcaattgtttgttctatttatctgaaaaatgtcagcatgtaatacaaaacaaataaatgttcaaattaaagggaggattacaagaggtgtttttaatgttattgactttggccaaaattttgaaatttagataattctatccgttgtttcgcgattacaaaaaagttgaattcaaacgtgtgttgaaaataaaaaaaatatcgtgtttagcgtgattagtgattacaaagattcaaattttttactcccaaatatgttcaataatattggtagaccttaagaacatgaaccaataatcgaccgtaaaacatctttggcgatgttttggtaaaacctaattttggttttggtgtggcttcataggcttggtgcgccgttttacccttctaagcctatgagcttctctcccgttgggtttgtttacccttttgatttggacgtgttggtttttgtgttttaatttatgtctttaatttttgtaatctttaacaagggttaagtccaatgtgtttgttcccagttatgatcctaaaaatgtcaataaatatgaaaataatttgaaaaaaaaacatctttacaattacaaaacgtccatcttggagaattgaattgcactttttgtaatagtaaagatgttttactgtccattattgttttatgatcttaataattacaaacactatcctcaaaagttacaattcttggccattttgtatgtcaattaaacttgcacatagtaaagtatttaacgccatttttccgcaaagcaaatgctggccaatattacaaggagataaaaatcgtctcaatttaagatgaatacacgataaatgtgtaaactgaaacccatgaacctcaatccataaaataataaactcagtgtaagctcactagaagaatggttcgaaattcagttntcaatgacttaaagtctctagagctcgtctttaacatcattacgaactactgactcatgagtagaaggagtcga

SEQ ID NO: 54724 - DNA, 465 bp, Arabidopsis thaliana landsberg
ctccgctcccatattctcgaatttgtccttgagggtgatctcctttgcgatcgagacgctttcgttcgtgatggtggggctgccatagcccttatccaggatgacattgcgtccgcgcggacccaacgtcaccttcacggtatctgccaccgcatctacacccttcttgagcttgtgcttcagatcttcgcgatataccaattcctttgccatatagtagttttcttctagtgagctgagcgctcgtcggataatgactgattacgagatgatgccgaggatggatgatgcctgtacgatatagaactcctcgccgccaaacttgacctcatcgaagccgtatttcgagaagatgacccggtcgcctactcttacgtacataggcagctcgtttctcgccatcctcatcccatctgccttcgccgactgccaccacgatgccctgttccggcttctccttattga

SEQ ID NO: 54725 - DNA, 904 bp, Arabidopsis thaliana landsberg
accatattgttctacatatattcttctttttaagttctttttaatataaatgttctttgtttttgtttatgattgttagaaccaccagatttgcagtttcggagaaatggaatttgtgaacagctctccaccaagatatgaatgtctcctctttggtaataattgataagaaattgttttttcttttctttatcattgaaacattagaagcaattaacaaatttgttgatctatcgtctctatatatctatgtttgttttcaacagatttggatgatactctttatcctttaagctctggcttatcagatgcatgctccaacaacattataggtattgctatgtttttttcttaaagatttttattgtgattacttcttaatatgtttagtattttatataaaatcaccatattacccttgtgcagaatatatggttgaaaagcttggaatagatgaagatggagtttttgaactaaaccaaattctttataagaaatatggaacttcaatggccggtcttaaggtaaattataactaccttcataaaatatatgttgatcagacacaataactgagtctgatttcttccattacacaaatatgaaatttgtttatgattaaatcgaaacttaaatttacaagatcatttatgcaggcggtaggttatgaattcgataatgacgagtaccaccggtatgttcatggtagattaccttatgaaaaccttaaaccggacccggttctaaggagtctcctccttggtctacctttgcgaaaattggtattatatattcgctttatcttttttttaagttttggcttagcttcagtttttatattaactgtgttctattgttaaggtattctcgaatggagatgaggttcatgtgatgaaggctctca

SEQ ID NO: 54726 - DNA, 500 bp, Arabidopsis thaliana landsberg
cgctggcagtgatcgaacaggccggtgtacggcttgtgcttcccgttctccatgcgcgccgagtggatcgtctcgaccgcgttctcgcccacgcccttgatggcgccgaggccgaagcggatgggccgctccttcttcttcttgccgcgaccgcccggctccgccttcgtgccgagcggcacgttgaagtcgagctcggactcgttgatgtccggctgcaacacctcgatgcccatctccttcgcttcggcgatgtgcatcacgaccttgtcggtgttgtcgcgctcggaggagagcagcgcggccatgaactccgacgggtagtgcgccttcagccacgcggtctggacggtgacgaggccgtacgcggcggagtgcgacttgttgaagccgtactccgcgaacttctccatggtgtcgaagatctcgttcgcgaccttctcatccacgttctggttgatggcgccctcgaggaagccgacgcgctccttcgccatgac

SEQ ID NO: 54727 - DNA, 565 bp, Arabidopsis thaliana landsberg
cagcagactctattaaacctgcatccgtctcagggtctactaactgagtccatattttgcggagcgatgtcggtgccgccataggcggttccatctcaaagcattttcgagtgagaaatttgatacaattatttaacggctcttcgttgttgccttttgcttgaaatacttcagaaaatgcggtagcgagtttgtcaaagagcactgacagggcttgatggctcaattgaaccagcgctgtttgaagcaacaacttggtcaattcaaacactgtcgcacaagtagcagtatcatactttgccggtgtaatgttgctggtgattgtggtttgagcaatatcggcaataaggctccctacatcgtcgattcctgtccacacgatatcacccaaatctagcaagtgaatcataattttaaggccatggaaagccggaataaatctacgatctagtaaaataaatattcttctcaagaggtcaatgttgcgaaatagtggaacaacagagtccagctgtgaaattcgtcgaaaactgtcaccatggaatcaaagaatggagtctctgga

SEQ ID NO: 54728 - DNA, 904 bp, Arabidopsis thaliana landsberg
gatggagtctgatgaaacataatccaagaggtggagaaaaatttttatttccagatcataatctctccggaaatggccggattcgttatattccgtcgccatcaaaactgtacggacgaagactcttgtcatggcttagtagtttctaaattggatgtgggggttaataaacaaagagagagagacagagaacagagaagccaattgttggttgtgaagtttttgttttctctacctatatttttgattatggtcttttaccacgagaaaatggataaactctgtttgtgtttcttgattcggtttcatgagaagaaaacaatgaaaaatattctgttcttttacaattcaaatggggttcttcttaaatacttgagcccaatatcgccctttgtggcccatttaccaaatcccaaacattgacccgtttgtcgaacgtcccctcggacaacaaatgtccagttcatttgtctgtagctggtgacttaaattagtgacaatcatcggcgagtagcaaccacaattttcagtcgctaaactttttagcgatcagtcgctgaattcatcgataagtaaacgaataatttaacgatcataaattataattactaatgattaaaataaaaattaatttaattatttaaattaaacttaattaaataaatctgaattaaattcaaataaatcttataaaattaagtttcaataaaatataattataatttaatttaactgaaatcttatttaattaaaatgaaaataatttacaattaaatcaaaaataagttattggtccaaattaaaattttgaaagaaaaaattaaaggcgaaattaaaatgttatttaaatttttccttttttggatgggggggtgttaatttaattaataatttttaccaattt

SEQ ID NO: 54729 - DNA, 565 bp, Arabidopsis thaliana landsberg
gtctccgaagcgttccgaggttcgccggcggcgcgcgaggtcgcacgctccgaggccatcaagctcgtctgggcccacatcaaggcccacggccccaggtaccgcgcgtcgctctcaccaccatccgctcgcccacggcctcctcctcctcctcctcctctcggtcggttctatagcctctcgcttgtcgttccgtgatgtgctagaaacagaaactgatgtagtttcgttgacctcttccaacgcttcacggaagcgttccccgcgcctccgtgtgcggcagacatcgaggccgtccatcggcttccgctcgggggcaccctgcatagagggagagggagggagctctaatttcctctttcgttaaacagtctttctaaccgtgtcaaaaaactcagataaacatcagtacatatccgtgtcaaaaaactgttttttcgccctgaactcataagcaaagctcttcatggtccgtctgcagaacccgtccaacaaaactgagatcaactgtgacgcgacgctcaagagcttgtttggtgggagggacaagatcgggatgatggag

SEQ ID NO: 54730 - DNA, 786 bp, Arabidopsis thaliana landsberg
  unsure (1)..(786): unsure at all n locations
aacggttgacaaaaaaaaaagaactagctaaacaatcaatcttaacaaataaaacgcgagacataataggctcttaagcaatataaattgttatcaatttgatgaacttcacataattcgtttcgaagtctagattaactatcctttggtaatttctcatcttgcaatacaaataatattgattcgccaatcaaaacaacaattttgaagagaaacttctacgatgatgagaagattgttgaagaccatattgttttggtcgttccataacgcatagatgactgtatagactgcgattaacagtcaagacccggaggtactgcttaactgttgtctgcttgcaatgacattttacccaaatatttttgtttgttcaccacggatttcagaaaccttagtcatgtctttaacttttttaattatacttttaaggttattggttcacaaaaaaaaattgtcactgattaacgggaaaaaaacggttaaactgccagtgccagtgatgggaatgaaaaaaaaattactttcatcatttcatggtgataattaattttgaccaaactttagtaagaatctttgggagcttcaagatcaagtaacaaatctataaagcatatatagtcggtggtattaacaacccgtgaatatggtaaaataaagttacaaatttattcgtagttctctttaataagtacaatatatntaaggttgatttaaaggtattttcattgacatatttgattttcatttgtgtgctgtattaatattaacctgttttgataaaat

SEQ ID NO: 54731 - DNA, 440 bp, Arabidopsis thaliana landsberg
ggaccatgtcggtggattaatgagcatcatttgatgaattaaatttagtagacgatgcgctgcaccagtgtaacataagagcaggaagcgcagtgtttggtgcaagaagatttgaaataatcaatgtacatgtgtatgtaaccacagataaaaacaaaattgtgacaattactataagtgctattttcggcgccgtttctgccattgccctggagcttgcttcttccctggggctttaccacggcgttttgtgcctttgggttttgcttttgaagcgcgttgcttgcttgcagctgcagctttggtttctcgcttctttttgcgttcttcgtatttgcaatccacttgcctaatacgcaaacaattactctggaaaaggaacaaacgcacagcacatacctgcgttgatctaaaaacatggaatggaaaggaaccgagca

SEQ ID NO: 54732 - DNA, 558 bp, Arabidopsis thaliana landsberg
tgctgcaatacacgcacaacttgcgcaccctgctgaatgccccacaaaatgaataggatgatcctcatcccattcaagggtattgccctaaaacacataccaaaatcagacttgcattcaacatgaaacatttgcgggtatattagtagtctcttccaatgagcattcatatcaaaatctaaccttgttcgtatcttcttccaaaccgagaatgtccacaagcctcgctatgctcttcgccaaaatcaactacccctcctttcaaataatagaacaattcccttgccctggaaaccaatgttatcatcagcacaatgcacacatggtatatcaagatctagatcaaaacaactaaatcctaggaggtgcaaaaaatgaatccaatacctgtcatagatgcttgttaaggacccaaatcaggaacaagaaccctctcatctttcttctcagcaccgccaaagtaagataagctcctaatctctgctcaatcaaagcaatgagatcagacctcaaaacgacaatcgcataatcacaagagacgaatttgaggggtttgtt

SEQ ID NO: 54733 - DNA, 145 bp, Arabidopsis thaliana landsberg
tcatccgcacttgtcacaagctccggttccgtgctatgtatagcttgatgagttcccactgacgattccgtcgagcggactttgtcgtcgacacgttgctttgggagcctaagcaccgactgtgtgtctacgatcgggcggcgtg

SEQ ID NO: 54734 - DNA, 1227 bp, Arabidopsis thaliana landsberg
tacatgacaacttgcttttccagtagagagactggactgtatcattgttttcaaagctatccaggtatacctatgacaaaagtggtctgatcaagtttaaaattgataaaaggctcggatctgtgggttataagttgatgcggctagaccgtaaagtggtattgtcttgtgtttaaatactctatatgaggtgagattctcttgcggttcattacatgagcgtgcatccagcagatgaaagcacatacctagaaggggttaattctagagttctggaacatgaatgttttctaatacagaatgtgatcataatctgctttctattgtttgcccgaccaaaacatgatctaaactctttgaacaatttctatcaatttagccaccatttttaatattttccattgttttcaccagaggactctatgaagataatagactcaaaaacaaagcaaaacatcatgtaagactcttaaggctctcgataggaatgcatgaaaacaacagactaatgtctgtgaaatagtctagaaagtatgcacatcaactcctccaaagttaacccttagcatgtcatcaagcaaaatcaatcaaaggttaggccaagagtagaggtttgaaggttcaactcatagaagaaaagaccaatcaaacttgcaaattaaaggccaagatagagcatattatgcaaaatgagaaaatattctaacaaaattatccaaactcatcaaaatatatttactcataatcaaattcttagtgatcccttttcatgccaaatacacaaacaagctttttcgcgagaaggggaagattgtaagtacacacaaacaagatttgatattccttattcattaatgatcaagtccactattataaaactctaaagacatgaattatgatcctaaattctagtagtttgttctttaagcgaactctagtggaaaagaggacttgttattttattccaaatttcaagaaatcttgtctataagtacacaaaaagatctcactcatcaaataacgaggtaaaaaaagaggtgaaaccatttttttaaaaaagaaattattattcaggtatgcaaagagaggaaaaacagcgtaaagaaaaccaaaatgttttattttaaaatctatgagcatgggtttcaaaactcttaatgaaatgaatatgtttatgttcaaggtttaataaaaataggagaattggagtttacattaaaatggcca

SEQ ID NO: 54735 - DNA, 746 bp, Arabidopsis thaliana landsberg
atgaaaatgcaatatcaggtttacactgatcgttgcaaagccaaagggatatatagtgatgcattaatgatcttattaattatggttcgtatcatctatcaagtttacgtcatcatcattcaggttttaatttcttggtcatttttggtttttgtattataatttaatttaattccttttaactttttcttcatttttgtttctgtaattagtgagtgtatttgaattcattaatgagaaaataggagaatgaagtatatctactaaattctatttgtgtttgtggggaatgttaaatttggtttgcagattaaagatctcgttaaatattttatgttcaatgttttcaatcggaaattggtcatattaatagcacatttgaccaattcattgaatcgagttcttttcgaaaattgaagactttgataataccaaccgtttatattatgcatggacatatgcgtaagtgaaaaatcatactgagcgatggtaacaattacacagttgattccatttcgtgaaaaactcatagaaacaacggtgacaaatgaagtttccatagccaagaattggatcctcgccatacgattacctaccgagatgaaccaacggtgatcatttatttaaactccaagaccaatccttaagatgatgcaaaaactcgactcttcaactatgcatcaaaaccaaatgcctcatacttcaactacttcattatgaaaaaaaaaccaatctcggcgaatgcc

SEQ ID NO: 54736 - DNA, 1086 bp, Arabidopsis thaliana landsberg
  unsure (1)..(1086): unsure at all n locations
ctttgaaaacaactaacaacatctttttttctcatgttaatgttatcggtttggattaatgtccataataaatacaaattgctctcttcatgcctgcatttacggctacatctttgccacacctgttaaatattctcggtcgataatatttgattcattttttgatccctttcatattttgtttccatgacgtctaaatacatatgtaatcgaacataagaaaattccatttcttaactataaaatcctttacatattttgtgtagctaatttagtaggtaaattaaaagttaatgtaggcatgtttaatatgttttcgattaaaaaataaacgtaagaaaattctattttatatgtttgacggtggaaaataaattgcgaaaaggcgaattaatttaatttattccgtcggcaaagttgaaattatgaataacatttaatatttacagattagagaaacgcgtcaacacaaaagattatattcggacgaaataatttaatttatttgacctttattgggcctaaaccgaagcccattatccaaacatataagtgtagagggaaacatgaagcatccgttgtatttttgatagggaagaaaaaaaaacacaaaagcggcgttgatttttttagattttcnnnnnnnnnnnnnnnnnnnaagatttgtctgaatctttcattcgaagaggttttgagttaatttcaaaatggttttggagaaaaaatctgcattgttggaagatttgataaagaaatgcggcggttgtgcggtggtcgacggtggtttcgctacccagcttgagattcacggcgccgccattaacgaccctttgtggagtgctgtttctctcatcaaaaatcctgagctcatcaaaagggtttgtgaaaatttgtgtttcttttccttatttctgattttgattttatccctaattttgaaaatttccatgataccatctttaggatttgctatgaacatcataagttattaagcataaaaatttgttttttcttatattntgatcgatattttgggaatacacacatctttaagggttttattgtaaatggaaaattttaatttct

SEQ ID NO: 54737 - DNA, 559 bp, Arabidopsis thaliana landsberg
gctctaacgacataagatcattatgctcctcggcgataacctcaacgattttacaaaggcatttgaaaagggcagcatatagcagcgtttccaggaaacagacaatgcccgcaccgaatggggcaaacggtttattgtacttcccaacgccacctatggcgaatgggaaagcgccctcaccggctatcgccgcggactcaccgctccccggaaagattccgtttattaccagcttttgaaagggttttagcccgggcaggttctcacatgccattctcaggagcatccctggaggaacttacatcgcaccagatacgcaccagaatcgcaccagatcactttcgatgagtcgtctatcattgatagtaaattaattaacgccaaatgaatgggctcataatgggctcacgtgagcccattcaaccggtttgatttgcatccccttctcttagtcaaccgggttcgcttcagaatatatcctcataaaaaactgttgctggctcttccctgattgggaatcagtccttttatggctaactgaacagtatgtacacctact

SEQ ID NO: 54738 - DNA, 605 bp, Arabidopsis thaliana landsberg
ttttgattcgttacaaacaaacaattgaatcgaaatcgatggtcaaataacaaaaacggtgaaacctaaaaaaaatctcaagcataactaaacccacttactagttttggttccaatctcgatccaaattatatatttttttccttgtgtggtatagaaacaaccgtctgattgatcggtctccacaattgcgttaggttggaaaaaagaagaatatgaatgttattgacaaagtccctttattgaggtcaaaatattcatgctcatgttttaaatacgaacgactcttcttctctcaccagccgttagttgttttcttttttccatgtgactttaacttccaaattttcttttgtcagagctcatcacatcacatgggcctcatattaaaccaatactagggtttgaaccaggtacacgaatgattccgacaagggtgacatagctaaacttgaacagagagggaataatgcaatttcgagtgatgtatattggactaaaaggcctaaaacttaaggaatagattggcctaaaaggcccaaaacgtacaggcccaatttagaagagtgttccagagaaaaagaaaaatctgagagtcgattgag

SEQ ID NO: 54739 - DNA, 902 bp, Arabidopsis thaliana landsberg
gacttgaaccaaaaattcatacttcaatcattacaacttttgtatttttgagtcgtgataacaggacaaaggctatcaacaattcttatttagttgtaaagagatatattgattatagagttacagcttacgtttgttttggagtacaatgagattgacattcgcaataatgtttgtacttgtgtaacataacaacgttattacatgtgcagctaagaaacttttttttagattgatcagtcatgtatctcatgcacaacttttctccgtcttggctacatttaccgtccaagtctcctatcgttgtacacagtttctcagcttccacttctattgttttctcaaccacacaaaccaaaaaaaaaaaaaaaaacgttaattttagttcgattaataaacaaatgacaatccaaataagttcactattaaaccatatgttaacgttgtaacaatgctttttatttcctttaatcacaacaccgtttttgcaattagaaagaacatccttgttttatatcttattatatacgagttacgtccatacaaaaaaaactcaacatattacctttaccacctctcagaacgagtaacatgagagtataagaaactataaaccaaataacagatctcatgattgaaaagctgataagaattattaattatctctatagttgcagaaaactattgtttgcctctcgaattttttatctttcttatcaacaacactcataataaatatactcgagatatcgtaaaattagatgcatctttttttagaattatgctttgtaaaattcaacgagccttcttaattaacgagttcgacggatcaactctttcttttttggaaaaattcttctttgtaaatctacttactagtattatatatttttcactttttt

SEQ ID NO: 54740 - DNA, 1711 bp, Arabidopsis thaliana landsberg
  unsure (1)..(1711): unsure at all n locations
aattaaaaaatctgtgaaatgaatcaataattttttctattaatgggtttaagaaaagtcctcgaaatgaataccatctttgactccctctttctttctcattagggctacagatttttgtctttaaaaagccattcaagtttcaatggtttttcacttttgttctcctcctccctttttttcttttcaggattcttcttttctatgttttatctttcataatagatctgataattttgatttttcactatatatattatggttaatactagtagctttttcatttcaagttttatccttccattggttctttctgagtcaaattgtctcctgtttcgaaccatatataagttttcaatggttttgtattaactcaagtattcaacattatgtctctctttttcttgcttggatctctaatgctgttcatattttaaagcataggtttaggttagatgcatgtaactgccaattaaaagaaggtcaagagttttttgattgtatgaatatatgagttagtcaaagcagatccacacgattatatagaaaaacaaaggaagaagaagaggaagagctccttgaagttcaatggagggtttagcagggtgaagtaaagctgctaagctatggatcccataagccttatcaaattcaatataattgatgataaggttttttttatggatgccatatctcaggagctttcacttacccctttaatggcttcactcttctttggattgaagggagctcttcatctctccatccctatctctctctctctctatctttagttcttttgaggctgactgtgcattatttgtgttgtctgttgcaggtgtataaacatggatgatggatcttgagtaggattttttattttattttcttgtgacatatatgcaatttttatggtttgtactttgtatttccattagtttcgtacttttcagttatgtatcattgttaattctaatgtttgaagacatttagagtttatacttctctaaattactttttcgactcaataaagtcgtttaagtgtctacaagtatataccgtgttaatacttttcaattcatatccaccattgtataaagatatgatccgcttttatttaagtgaatcaattaatttacagtattcctctatatctctctcacactgttcgaataaatttaatactcaacagatctagtttgaactttttaaataagtttagccgaagaaaattatcattgttgaacaaacttattaaattcggattggcttatttgatgcatccagattgcaaaactatatttttgaatacagctggaaatgtttttaaagtgtaaaacaacggtatatatataagtcaaactggttttttttgtagatttctctccctttagcaagttttattgctttcctataatccataatatttacatccaaaacagcaattatataagattttctgctatttcaatacgatgttatactatttcggcagatgtacgtactacattacatctaaacaatccagattgataactatatttgatgtaatctcgaattagtcaatctctgtaccacatataagaaattttgcttttttcacaaagagttgttagaaatttgacctatacaaaaataatgaccacgatanatgagtatatacatgtacgtaagataaatgtaaaagtgtatatttgtgcgccatcatgat

SEQ ID NO: 54741 - DNA, 781 bp, Arabidopsis thaliana landsberg
aatatttttgtaaattagattttattttccgaaaagattcatgtatttgatttttggatttcttatttttattttttttcgttccttatcatttttttgaaaatgcaaatctataaaatacaaatgtcaacaaaaaatcaaattgaaatgttcggaattcaaaaataattgttttcttttgttttttgtttctgatgcgaaatgtgaatatattagagggaaaatatcccgccattaggaaaccggataatcttctacggccttgagctcaagtcggtggtggccattttatcctgtgcttcgtctcgccgacttccctgattgtttcgccgccggagtgttaaaagcaacgttacagaagcaagagactccactgaatcgaaaatgtatttcctggctttcgtttcaaagtcatttttagggttttcgttttgttctttctcacaccgattgcgtttcttcgtcctacgagtgttaatatttagttgtcgattagggatttcgtttcgcatgggtaaagattaatcctttagactcatgactgatcgattcacttcaatttcctgtttttttttttgggagtattttattgacttccaagttctgaaataggtgggtaataactaaccgattcgctgtgtctcactggattagataattgtgtatgtatagtctcagtgataatgtgcaggttttttctgttcgggtttcattatcaacagcacccactaatctgaatgcgatctctttttttatttggatgccaagtgactgaattgcg

SEQ ID NO: 54742 - DNA, 1194 bp, Arabidopsis thaliana landsberg
gataatgtgattgatcaataggtacttaacaactaactccccccaaattgtatatcaattaattagttgtacataattatttcaaattaatatagctatatattatattcatgttgttcataacaagcttaaaagattatggaaaaactgtacattgattgagttaggttcgtgcgatgtatgtctcttactaaaagaagtattaagcgttgtatatcatatcgatatatccacaaaacattattaatatcatgattaaagaaattatcatatcgattaatatctaataagcattaaaatatatgtgtctgtgtgtctagaatgattaggaatttatgatattttaaacccataaacaagacaaaaactaagaaatggacgaagagagtcatcatagtctcaccaactatatatgatccaaccatatatgttttaaactttaatctttaacctaaatatatttactgggtgacagaaaacaagattatgtgtattggacacgtttttatattttatctttgcttaacacaaaattatcacgcttagatacaacaaagttgaatacaaaccggaaacaccaagggattgtttataaaatttcgcagaagaaatatctcttttttggatgaatggttcataaaaatattaatgggtagttttatacttttattatattttgaaaaaggatcttggaaaaacattagctcaaatgattcctttgaaaatagaaggtattgggccgcacattttaatgctactactggcctatcccagacggaccaaaatgatgatgggcctaaaataaacaaaattatcttatggcccattgaccacattcgaaccccaaaagttcaaatcacaaagcaaaaggggctgacgttaaaactcaaaagttaaggggctaaacttaaaatagaaagctaaaatggactaattttaaatctaacagaacatgactaaaaatcaaaaccacaaaattcactaattcaggaactaaagctaaaatcacaagtttagggactaaaattattatctaatctgatagacacatgtgatatacattggttgtgtaatttaattaactttcaaatggtgatctcggtgatgatgtatttgcttgaatactttatatgtattagaatttagagtgtaaataactgaaactatcatttttaaatgaaactaaaataattt

SEQ ID NO: 54743 - DNA, 700 bp, Arabidopsis thaliana landsberg
atccattagagtggtccatttctttttgattatgtagtgttaacccattaaatattaatatatcttttataacaatctattggaaaatctatatctttggtaaccaaaaacttgttataaatataaaacgttacgttgaaatatttgacccggcctatttatagaaatttaaacaaataagatgcgaatcaaagatactttacgttggatttgtacactaattttgatagtcccgtcaagcagtcaccgtatagctaggtcaaaaccattaaactagcacatataatataattccatcacaaaaggttttccatattaattagagcttcatccatcaaatcaacatatatatatatatatatatatatatatataaaattattgaatatgtaaagttgaatatatatgatgatcacacatttttagatattctgaatattgtttctatattaacctagatttaaatattattaggtagatagaacttttttgtttttgaacaataggtagatagaacataactactagatatgatatatcaagctattggggtcattaacttggagtagatcctcgtttattacaagtctgttttataacaactctgaaacagtaacacacaccaagattgattacaaagagtaaaaacagaaatttgtagacttttcacatttagtttttggaatcaatgcgactctct

SEQ ID NO: 54744 - DNA, 1315 bp, Arabidopsis thaliana landsberg
atttgagtttggagagccaaacattcttaaatcgaaagggatcaagagattttccacgagcctgcacctctaagaaatgaggtttgaagggatgctaatgttactgttgttgatagaggaggagatgagagttttacggtagagagtttcgtgggggcggaaaaggttgtgcttgaggatggaaatgatgatgctgaaagattagtggataaccaattcagtgaggttgaggacgatggtcgcccatttgattataggcctttagttgatgagactcttgatgagattaaacgggatactcatgtaaggtttgaggagaaagcatttattttggatgtggaaaacaagggagacagagaagatgagaaactgattgaaaatgatgggacgtgtgcagagcagtcgaggacaaatggatctttatatgaaaggatggatgatcagatggatgtttgtccagtttcaccttggagaccaatgaggcatgaagaggatgaggatgatgatgcggaccgtgatgactccttagattctgggtctgatggtgcagaaagttcttcacctgatgcttctatgacagacatcattcccatgcttgacgagcttcacccgcttttactctcagaagctcctactcgtggtattgtagatggtgaaggatctgatgcagcttcagaggggccacataggagtagtagtgatgaaggtatgagtagtagtgatgaaggagtggagtctgatgttgacagtgaaagtcatggagaagaaggcgataacgagaatgaagatgaggaagaggatgaagaagaagaagaagatgaggaagagaaacaggaaaagaaggaagataaggacgacgaaagtaaatctgcaatcaaatggacagaggctgaccaaagaaatgttatggatctaggaagtcttgaacttgaaagaaaccagcggttggagaatcttattgccaggagaagggctcgtcacaatatgagactaatggcagaaagaaatcttattgattttgatagtgctgatattccctttaatatgccgccaatctcaactgcaaggcataatccatttgatgtttcatatgattcgtatgatgatatgcctatccctggttctgccccgtccattatgtttgcgaggagaaatccatttgaccttccatatgagccaaatgaagaaaagccagacctcaaaggtgacggttttcaggaagagttctcttctcaacaaccaaaggatccaatgttcagaaacatgaaagttttagtgtaggcccatcaatgcttggaggtcctagacatgatag

SEQ ID NO: 54745 - DNA, 1464 bp, Arabidopsis thaliana landsberg
tatataaactaatgtattagcttgtttttttctttatattgtgtacctttttctataaatgaaagaaataaacaagtaatgtcaagtcacgaaatattagatggtggtttcatcatccgaccatttttaggaaatttcttctggaatccaacacataccaaacatcaaagtttctgcataattgttcttatatatataacaaaatttacttaattgttaccctccaaaaatatgtctcaccgtgtaattgcttgctcatctaaaatctaaatagaattctatatttaaaatcaaaatcgaaaaaaacgaaaatagaaactaaaattgaaatttttgttaattaaattagaaagaattatttaaacagttgcatgtatttaacgtagataaattctttaatatcacgtgcacatataatttagattaggtaaatcatgtagtaccaaatatttgtttaattttatgggttttggattgtttagagatgtttagatcgttcctacaaatgttcgaacagcttgataaaacaaatgtcatattctacatgaactctaggtaacatttcgatatgatctattataagatacacttaaagataagaaggctcatagctgttaagttactaaacgttaagttcactcgtaaaaacgagtatttagttcttgatcacgtttcagagaaaataatcttattagaaaaccattaaaaaccaagaccgtaaatctgaagatatatcgttcataataatatgaccatataatctatcattttattttggaccaactccggtgatctaatattaatttgaggatcatcatctagtcatcgtaaagcattatactaggataaatatcttttcctctaacttgataacactggatattgaaggtccaattactggcagaaaacattaataggtaaataacaactggctaaagataaaaaaagaagacctttaacaagaaaaagatgaaaaaaagaagagtggaagagaccaatagaagtaaagcaaagaaaagatgtggtcgtcgtcaaacacgtgagaggtaattcttaactagtaaagtcacgtgtcgttggttagatcaggggaaagaaatctctcaaatcccccaaatgacaccccttggtaacctaaataaaacccccaatttcaccgcttctttcttcttcactctcttcctataaatctctctctgcgctgtaagaaaaatatcttacaccaaacacaaacacaaaacacagattccttcttgctcttcttcttcctttgattgctttcaaagatggttggttctaagaagcgtccatcatccaagaacagacttgtttcttcttcaactcgctcttatgggaaggataagggtttgcaactatcgcttctccttctttggttagaatcacttgatgaatctatgcgaatttgctctataaggttgaactttactaggtatctgatgctca

SEQ ID NO: 54746 - DNA, 386 bp, Arabidopsis thaliana landsberg
aatgctgcaccgcccaggtgtgggggtcaaaaacaggaaggcccatgtgccccatggaaaagaatataattgggatctgtccccttgatgcacgctccacttggtttgcaggaggtaaataagatggatgagcatcactcttgctatggggccttagggagcaccggctgcgcgcgtcaacgcccaagatgtgatgaaccgaacttgaccctgaaccgggggtttactggctatcaagaatggggaaaaggaccctgacatgccactgaaagactgtcctggcccaacacatggctgctaggaacagacaggaaggcggacatatcagcggacaagatcttatgcgacgtctgtcattgacagcctgatggtgtggcgacgctgat

SEQ ID NO: 54747 - DNA, 961 bp, Arabidopsis thaliana landsberg
aaattcttaaaaaatattgttttatggttaatttgctaacatatttgctaaatgctaattatttaacagattatatatgatcagcatatccaccaagaaaaaagattatatgtcagcatcattcttcatgtttaagcgtataatttggcttattccccacaaatgatttcaccggttagagcctataaattagtacatcttattgttacctagtcacttcataatcttatcaaattcgaaataaagttaggtgaatgaatttattagtaattattagacgaaaattgtgccttacgttgcatatatatccggaaagctacactaaaagaagttgacctataaatacctatagcaagtctataaaatctaaatttccacgaacttccacatatctactctatcttatgattctcatttgcatctctgtcagataatgcagagtcatgtgcgtgacatgatactcggtgacctcataacacatcttaccaatctttcattaaatgaaaaaatgattagcggtacttaattttttggtccagagctagtaattgtcattggaaattttgaatgcactgatgcagtgtactgtgtatcccagttgacatttaatggtctataatttggaaaaatggaaagaaacaacagttgcatcgtatcacaggataaacttggacatatcatatgatttagtcaatgatgatcatttttgttattaataggaaaaaaattgttctcttttctttcataaaattttggatattagccttgacatgacatataatttatgtcatgtgatttaatcacaaaatgatcaaaaagtgttatatatcgtctataactcgtacatatatcacactatcgaaattaaacatggatacgactaagacaaaacaatggtatacaggtcaaggttgactcttggtttgtatgtgttttacagggcaagacagcaattatgagg

SEQ ID NO: 54748 - DNA, 614 bp, Arabidopsis thaliana landsberg
atgaactgtccgatgaaaacattgcgcaataccacaggtccaaacgtaccggcccaatcctgtccaattgccggacaggacgtcatagtagaaaagatctcgggaaatataccaggcaccgatacaaaactgaactcttcattcatacctccggcaaggatagggaaaccatcatcagataacgaaattccactacaaaggtcgtctttgggtccacctgcattttttgaccacacataattccccgtattgtcatacttggctgcaaaaacatcgcggcaaccgatgctgtaatacatgccagggccgaaatggtcaccgtaatcatcgaacctgcatctgaacatcccggcaatgaaaacatttccatcggtgtcggtagtaatgctgcgtgccgttacttcagaaccggaacccgcatgagcagtccagatcacctgcagcaaaggatcaaaacgtacaatgaaaatatttcttgaagccggtgaaggcacaaatacaggagttggtccatcaataaacatagtgccgctataatccccgcagatattgatgtgaccggcctggtccacgtgaatggatgtagcgatggtttgtctgatgagacctgcaaa

SEQ ID NO: 54749 - DNA, 525 bp, Arabidopsis thaliana landsberg
tcgtcgatccggcgccgatgctgctccatgatctcgaaatcgagcctttcggcgttgagcaggaactcggctatgtcagcacccgggatccgcggtggattctgcaccgcggcatagtgtttcgtccatccgtcgccggtcaggtccgtatccaccggccggcccagcatgattgattgaaaattgtccatccgccgcttctgccaaccgggcgccagaccgtgccgaaaatcggggtcggtcggccgattgtctcgtgctccgatcgccgagggggtgcgctggaacacgaatacctgccgcgcagcctcggccagcggggggaggacctgcagtccgctggcgccggtgccgatcagtgcgacagccttgtcggcgagcgcggtgagaggggcgccgggagcgccgccggtgtatccgtagtcccaacgtgccgtgtggaaggcctttccggcgaaagtcgccattcccggaatctccggcagtttcagcaggttcaatatgccggcggccaccacgtagtga

SEQ ID NO: 54750 - DNA, 166 bp, Arabidopsis thaliana landsberg
actcagaacgatttttacaagcgaacaattactagtcttgtacatatagtaaagcctttgtatcatgagtttttgactagaaatttttttgcattgatagattgtgattgaacaaatgctaatataaatttcaagcttagatttacatttactaatgaagttatat

SEQ ID NO: 54751 - DNA, 673 bp, Arabidopsis thaliana landsberg
gatagttgtcttggggttacaagaccccaaaaacctctaaatgctatcatcactaatgctccaatgcagcctgaaataatacccacaatgagtgtagtgtaagctgctctataagctcccttaggattatttgcgccgagctcattggacactcttgttgccacacacgtgcctaaagagagcatcaccgcgtaaagcaagtagtcgaagttgaaaactataatcaagattgatacagcttgcaccgggtttggtaacctcccggttaaaaggaccaagatctcgtagcaccaccattcaaggcacacggtgagacaacatggtccactaagcttgatcagtgtgagccagtcttgagcactttggtttaaccagccaccttgtttccatttgttctctttcattcgctctacgactatcacatatccagttagaagaatcacaacaataaaatcagttatccaaaccgccattgcaactccttcaattcctcttgctttagagaggactatgttgatggggatatgaagagaagtggctgcagctgttgtgaacatgatgggaagagtaacaccttgtgagcttaaataagccttaagtggacaaagaaaagagaggattggcaactctggaagaaggtagagaagatatttcttggctatgaaggaaatat

SEQ ID NO: 54752 - DNA, 590 bp, Arabidopsis thaliana landsberg
  unsure (1)..(590): unsure at all n locations
gtgctctacagcagccgccacacccttgagcttctgaaaggttgaatttttcgcttaagaatactagaaagactattatagagactgatttcatatttaggggctaaaaaaatttgaaaaaacgagtaccataacatggggttttccatcctgagcccatggctgacaagggtatctcaacatagacaatacctaagcaccaaaagtcatataccatttgaaagtacacgataaaaaatatcttagaggccaagatagatatataaaaacatttttatggaattttggcaactttaaattcgaaacgtgactcgaaccctagcctataaaaaatggaattctgtaactttagccactcggccatgggcttgggatggaaaacccatgttatggtactcgatttactcgtctcggcgaactgagtcgaatagcatgactcgttttaaaatttcgaatttcttcaaattttaaacacgccgtgtaaatggataaaaatgtggacaacatgaagtccacatttttatgcaacacaaaattttgaaacaatgaattntgctcttgtcctagtctatcctaacacanacttatat

SEQ ID NO: 54753 - DNA, 559 bp, Arabidopsis thaliana landsberg
gctctacagcaagccgccgttgctgccgtcggccagtgtcaggtcgcccaggcccgtcaacgtcttgccgttgccgacgttcttgtcgcccaccgtgcctgtgccggtcagcaccaccgtttcgctgcccaccagaccgctgatggtcgtcaggtcgctggcgcccgcattggccgtgccgtcgtacacgcgcgtgccgctcaggctcagcaccttcttgcctacgtcgagcgaaccgtcgacgtagctgatggcgtagttgccgctggtcaggccgctcgccgtgatgtcgtagctgccggcattcaccgcgccctgcgacgtgccgccgtaggccaggctgccgcccaggacaccggtcgactcgccattgacgaagccgctgtagctcaccccgttgccgccggtgtaggtctggccatcgtaggtcttgctggcgtcgttcgcggttatcgtcagcgccgccttgcccacgtcgagcgagccgtcgacgtagctgatggtgtagttgccactgttcaggccgctcgccgtgatgtcgtagctgccgacgttgatc

SEQ ID NO: 54754 - DNA, 473 bp, Arabidopsis thaliana landsberg
  unsure (1)..(473): unsure at all n locations
gcgttagtagcagacagcaaacagcggagtcgcgactcatccgcgtccatgagctgatcaagcttcgattacgccgatgctcgagtcgcggtacatcatacacgcatacgatccacgagatcccgaagtgcgagtactagccactgcatacacacagagcagctatggcgttacagctaatcgataatagtgtaggtatgcgctgcaacagtgctcattcagtcgggtgtcggcatcactcaggcccacgatcgccacatgacgcgtgcgcgcgtcatattcgggcggcaattcccacgggatgacgcacgtgacnnnnnnnnnnnnnnnnnnncggtctcaaatcgcagtccgacaacagtaccgagacctcaaggtcctacacgtcgaactgtggcgtcgactcgtatggatggaagtggaagcccatgtcgactcctcgcgaggtcaagcctcactgatcaagtgcctgc

SEQ ID NO: 54755 - DNA, 813 bp, Arabidopsis thaliana landsberg
ccgtttactaatttttgtaatgtgattgaatctacagatgataagataaaaaaaaatttactgtttgaattgtcacagtcgcatagacattcatgattttgtctcttggtttgatttttatctttgcagttacattcgcagtcggtggagatcggagttggagagaagacgcgtcggagacgaatatctttgatggtggctcgtggatacgtaggtgtgattttagaatcgattttttgatagagtgatggtgaatgatggacgctagatcggtttctgctttgagatacggtggttgcgattcgttggttttgtgattttctttgaggaaggatctctgtagctggagaagacgagaatcgcattctcttccgagggatttgatttgattccgccattgttgaaccttcgtcaagagagagagagagaggtttttctttaatattttatttttggagggaatgataagaaaggaggtgggttagcttgtggatgtttggcgggaaactagatggcgggaaaggagtaacgcattgattttgtgcgggaaagagtttataaggcctagagaatgttgttgagctaggcccatttaagcccgctatgaatataggttttgtggttttagtcatttatttcccctttttttattcttctgagctaggcacaattttattgataaaacaagaatttaggttgttttcctttatttttcttattacttcatggttccattttaaatagtgaatgtgattctttggctatctgaagaaaacaaaattttaatgtaatagtaatagtttcttactcaac

SEQ ID NO: 54756 - DNA, 1311 bp, Arabidopsis thaliana landsberg
acccctcagcttagttgggtctacctgttgcttcttgtctcctgacaaggtatgctgtggtcacattcgttcaactttacagtaaaagaaatttattttggacgacttgtgtaaaatttctcaactaaactaaattcgtaaatctgacctttccattttctttgtacagggctcctttaggctataatgctgaagggaaaacgaaatatgtcattagaccgtaagttccgctaaaaaactttttaccagctaaagctttgcattgtatttcatgtctggacaaccattgctagcctatctgtcgcattttttttcacttttgttctgttagcttatctgtaactttgcatttttagtttacgcattgtgccattgtctgcaacttaaagttgaaggctgatagctgtcattaagaaaataaatagatagcttggaaaagatgcagattttatgcagccatatctctaagaataggttacttgattctaaatttgagctgctgaagttaccacttttgtgctatctgccttctaatttctaaatatcaacccactttttcagtatacaaactattcttgcaaataaatcttccagatcattatttttcttgctttctacgataaagctctttaatacttgtacttatgtacgtgaggcttcttttgaccttatttatcttatatttgtgaattatctcagttacactcctatatcagatccagaggctaagggctattttgatttactgattaaggtatgagtgtcctgttaatatacatgtgcttctctctacttctactgctattttcgagaaacaactagatatattatgattgcatttatttcctcgacttgttttgaatttgttgtgatgtagttcattgctttttgcaggtatatcctgacggaaaaatgagtcagcattttgccagcttaaaaccgggggatgtgttggaagtaaaagggtatagtttttttttactattgttagtcttttatctacagttggtgatagctctttatttcatatggtgtttaacattatcttttcgtatagacccgttgaaaagttcaaatactcgccgaatatgaagaaacatattggcatggtatacccttattcccttgttacaaccaactttactgaagggttcttgcatagaatctgttttgttatatggaagtagaaccttgaagatacgaactgcactagtacagctgcttttttctcatctcagcgtatggaagtatttttaccctgctccattactgacatgcaagtccctataaatcaaattttatgcggtttca

SEQ ID NO: 54757 - DNA, 721 bp, Arabidopsis thaliana landsberg
  unsure (1)..(721): unsure at all n locations
tataatatcttttattaaacatttattccaatatatttattaaatattaaaatcttgcatgtatatgcaggttagaatctagttaattattaattattaaaaatataggtctggattttccctagtgacaaaataaaaatcattaaactatggcacaattctctcttaattttccacttttacgatagttctattcttcttccaaaagaatatgcgattgtgctctcatcatcttcatgtgtatatataaactctaacaatcaaatcttctatttctttttttccggatctaaatcatctctttatatttactttctaaacatactgactaatacatatatttctttgcaatgatcatcaaatgtttcaacacgaaaactaatctgttcgattgaccatgtcatgaaagaaaccatggcatattctttctctggtatatatcacttttgtcgtaattgtttcagtataattctcgaatccccaattttttagaatagtttggtgataaaattttatttactacagtacaaacaaaatattatttctagttccaatccttattcaaactagaattggtttcttttttttgttacaacaactttctctatatatanttgaaacatttcttttcacttgttttgcttccagagtgaagagaacaganaaatatcgagattgctaaccaagaagaaagaagcatcttgaaagctcttgacgttgc

SEQ ID NO: 54758 - DNA, 970 bp, Arabidopsis thaliana landsberg
tgaaaccggtggtttgaactccttctgtgcttgcttatgaaagaatggttagtttatgtaatgatcttgagtcaagaaactctaatgtcaatacctgagtgcatagggagataatgtctgagtattgtgaggcgactcttgaggagaatgtgccggctatgcctccatcaatcatctgttataagcttcgcctgtcatgaagtctggttgatgcccatttcaccagtagctgttctcatcggggtcgtgatctgcaaaacatccatcagaaaagggtcatgattagcttagcttaggcatcaatgattatattattatgtgaaacgattgtgtacctgtcaaatgctttccttcctgttaacagttctaagagtagcactcccagtgcataagtgtcactctttgtgccactgcttcctggttgtccatgttctggtgctatgtagccagtgttttgtatcgctatttctgaagcctgctctaaatcacaactcattaggtctctctgagtcaaagaattaggtgacacatcagatgctgtcttacttacccgaagtttaacactgttgcttgtaagtggccttaaactagcaagcccacagtcagcaatacgaggtgtaagttcttcgtctagtaagatgtttgttgctttcagatcgctatgggctataggagggcaaaacgacgagtgcaaatagctgaaagtttttgattcaccagatagggaagagtcaaaataaataactgcaagggtagggaatagctactaccactagtttgagaagatagaatacttactccagagctcgggcaactccaatagcaatgcggagacgcaagcaccaagaaagtggcttgtatacctcatcatgcatagcattgtacaacgacaaatggccaacatactcatagacaagaagatgctctccattctcaatgcagaaaccgagaagtgtaacaatgtttgggt

SEQ ID NO: 54759 - DNA, 825 bp, Arabidopsis thaliana landsberg
tataaatttatattcctacaattatttctctttactcgcgtgacataacttctttcgttgcttgggttttatattatccatcgaatatggatttatatataatgtcgagtgacctcgattagttacttataaactctttttttgttgtgggtaatcaaaaagcttatgataaggcattgaatacgtgaatatcagattagtcaaatataaacatctatattgataaacaaataaagccatatgaactaaacaaaaccatatatgaattccatgattgttgaatatttcttttcttttagaagatttgtaatattgatcgatcatgactaaatgatcatttctgtttcaattctccgttcaacaattggtattctttccaaaacaaattatcagatttatcggttcagctaaaccgattaaaaaaattactgtcaagtcaaatatttcagtgattgatcaatggccagtgaattaaagcaaacatggatgtgtagtagacatcttattgatgatagcatgtgaacatggaatgttctattgtcttgttttttttttcttcgaattaaaacatctcatttgttctctgactgtctacataacttaccaacttatcttagttcttcatcattctaagagccaaagcctgaagctcacctaaatcgctactacaataactcactgatctcttcttgttaggatatccttcgtgaaaccctaatccatcgtgaccgtatactcctcctccggtttgatgatgagtctctcgcacgttggctggtgtggtgacgtcactgctcgtgttgctgaaagattcttctagcgagc

SEQ ID NO: 54760 - DNA, 569 bp, Arabidopsis thaliana landsberg
cgcaagccggtggaagccagttgttatttcgcttgtgagcctcctgaaaaataaaattgaaaacataccgttgactaaatgatgcttataacacacataaattctgaggtagattttcaaaatcacctgtgccgaaatagcttgggttacagtatactcggtctcagatttgaactgtctccacagtgacttacactgcactggcgtcagtagtatattatttggaggaacctgcacacataacaataacattggtaattcatttgacgacaagtggaagtggttcatcccatgagccacgatgccaagtatgtcctaattttggcggaacaaataaataattggtaaagtagactaaattggattatttcgtattccatttagtgtgatgtcttaataatagtcacatttttcaaccagattatactagagaccacttgcttagactgtttacctcttcccaagagctagatgcaagtggatctgtagacgctcctacgctttctgtgtgggaagatgcagcagaaacagttccatccattagagaagagaaaagagtactctcaata

SEQ ID NO: 54761 - DNA, 527 bp, Arabidopsis thaliana landsberg
ccgagagagttactttatattctccttcctctcctcttccttataccatatgcaaaacttatcacgttcgcaacctttctcctgacaaaaaaatggattgtctccgtggtcttatgaaggtacctggacacggctggtatgaaaaaatcattggcatacgttgttaatggcgttttcatcttcttggcttggctggtacttacaaatcctaatcaacattcgactcattttgatactaggcatttatgtgtctacttatcactcaaacactttcatgtcaggttgctagaattctactgttcatatacatgttttatcatgtttatctccactacaaccaggtaaagctcactatctagcgggtttattgattatgctgatacccaattgcttcaaaaccttccccatgaaattaatacatcactatggtttcatttccggatgttttttttatggtgtgattgaaatggaattactttgttttgtgggtaggtcatgaggatgcacatctttggtacgttctggtt

SEQ ID NO: 54762 - DNA, 600 bp, Arabidopsis thaliana landsberg
tgcccgtgcgttgctacggaatcaatatgctaaaatatattgatatgtaaaagcactaattgttattctatagtcttattagcatgttaaggatgttttcatcgagaggtgattcattatcaacctctgcatgctcgtcaacttgtacttcgtttttctccttcgaagaatccattttggcaccattgtaatattgaattcctacgttaatgaatttgttacaataaaagcaatattttttgaactattgcgaatacatgatgaaacattaaaagaactgaggtcgatattctatattcatattgagattctaatgggtttatcaaaatctactcgctgctgttctcagggtgtccagctaaccagccatggcaaacgcaaggcaagccaccgtgcagatccacgtgcaacctatcgaccagaagatgtcttgctgctcttgctaagatcgcatgatttcttcagtgccttgtaatcaacacgccattagtaccgtttgtagatgtatttgcattacttgttcacgaaatgcctttgcttagtatctcttcgttggtcagatggatagagagctgctgaagtgtaagatcagggtacgag

SEQ ID NO: 54763 - DNA, 247 bp, Arabidopsis thaliana landsberg
gggaaaacaaaaacgagcaaaacacaaccaaccagacggatattaggaacagacggaagcaagccccagcaaagaaaaaaacaacacaaaaagagccacacccaaagacaaaaaaaaaaaaacagccagagaaagcagacaacacccacaaagcgcacaacgaaagaacggaaaaaacaagcgaacaagaaaagcaagcaaagcaacaaaaaaagaagcgcgacaaccaaaaaaaacaaacagacaa

SEQ ID NO: 54764 - DNA, 291 bp, Arabidopsis thaliana landsberg
aaagaaaaaaaaaagacatgttaaaggtttttgagcaggacaaaaaaacagggaaaaaacgctaacctataatagggaaagacccagatacaaaaaaagatgatcaattaataaaaaaaagggaaaaaggaaggagggaaaaagggaaaggggacagtaaaaaacggatgggagaaaaaggaaaaatacagagaagaaagatacgggaggagggaaaataagtaaaaataaacaaaaagaaagggggggatacgaaaaaaccatagaggaagcagagaatggacgcgaaga

SEQ ID NO: 54765 - DNA, 605 bp, Arabidopsis thaliana landsberg
aggcacctactcctgctcttaatccacctgtaactgctccaggtttgattgattttaggaaacccatttgcctcatggttcccttactagctaggttagctagtctacggaaactacctaagagtaggtcaactaccccagcagtctttctcataataacagataaagttaatagtcccaccccagcaccgaccagtgcaaaaggtagagccactaacccggctgtcatcattgggaattttcgggctagcatgtctattctaccagccactgccggaacagcttctagtaggccctgtagagggacattgacgatgaagccgattgtctttccaagatcgtcaagggcaccggtagctcgacgagtagcaccacccaaatcactgtccattgtcatggcagctagtcgagcttcatttcctgcattcttaatctcacgggcaaacttaatgacccgctcgatctcctgggtggaggatattgcacgggcaccacggatattgaagatgtcttggaggtggctactcgttccagcttatccatctggctggtggctcggtacagagcttccagtgtagctactagatccaacatgccctgttgtt

SEQ ID NO: 54766 - DNA, 603 bp, Arabidopsis thaliana landsberg
cagaactacttcttcagcggcacgctggattacgacgtcaccgacgactggcgcctcagcgccctggccatgtacgggcacgagaccagccggaccggggctttcgggcggctctgcggcagctgcgcccacctggcgctcaacggcacgaccgaggccaacggcgtccccgccacccccaaccccggcgcctttctcggcggccccaacctgcccctcaccccgcagaacgccctggacgtatggcgcccggccgagaccaaccggacttcgcaggcggtccgcgacctgctgaccgacagcgaccagaactcggtctggtattattcgaccagccagttgcgtctgaacaccgacgcgcggccgttctccctgcccgccggcgaggtgagcgtggccgccggcgcggaatatgtgaactacacgctcgagataaaccggacgagcccgaacaacaccggccccgcctccaccggctcccagttcctctacatcccgctggagcggacggtgggctcggcctacgccgaagccctcgtgccgctggtttcgcgcggcatgcatgtcccgttcgtgcgccgtgtggctctgagcgcctcgatc

SEQ ID NO: 54767 - DNA, 1476 bp, Arabidopsis thaliana landsberg
catggtatatagtaacatgaatatacataaatgaaggtgtaaacgcctgaaaagagctaacctacgctttacacgcaagaaagcagaacaatctcagagtaataatggccggaacaagaaacgcaattcaagcacagagacccacagaacacagtcatacagagtgcaggagaagcaacgcacttgccctgaaacaactttcaatacatgtactcctaagatctgatgttctttctcaagatcattgaaaacttacgaaagagaagccatagagtaaacaactaatcaaatccaaaattataccaattccacattgattcaactcatcaaaagttcaaaatgtaaagctgtgttatatcacacacagatactagtactgatcaacatagcagcactcttgcttcacctcagctctcataaacctctgcaaagaataacaataagaaaaacgcaagatcttactaaactaaacaacaccattaaaaccctaaaaaatgtgaagcttttgagaaaaatcagaaaacattacctgactttcttgatgaggattgattggagttttcgagcaaagtcaatggatttgattctgcgttcaagattcttcctagcgagaaccttcttctccgaattcttaatgtgatgagtctgagtccctttgatcagcctctccattccactcgattgcatcttcttctgcaaaatcgtcagtgccttgtctagatcattggagaacaccttcactcttatccctcgctcttgctgcaactgctggtttagactcggacgagtcaccaaccccgtaactcgcttcgctatcgtgttcatctcttttacttgttttctgaaaaagtatgtttctgaaaacgtaaatgagattgacgagagacagtgataggatctgaattcgacttaccggtcggaatctcgccggagagaatcaaagagccaatttgagtgatgatggagaatgtctaggttaaaaaagaggcgatggaggaaatgagataaaaaccagagaatttactaatatagggggtggttatgtaagttttatgagatatagggatgtttttgtaaatatccttaaatctaatcttctgtttgattcagagagtattgactttgaagaagaacattcaagcctttcaaaaaaaaaaaagcttctttaatttctctctctctctgtggagtgttcgaatctccaagctctctctcaaatggcagcgtccacatagtaaagctgaagaagcactgtatctatctacagagaaagtgaagaggaagaaaaggaagagaggatatagaaattaagctggcgacttttagtccgaggcgagcaatggcagagttacggcactcgagctctctcggtagccgatcttcttcttctccgttacgtgccgccggagatgaggattcttcatcgcctcatgtacacgatcactctctaacggcggagacgacgaagatggtcgc

SEQ ID NO: 54768 - DNA, 116 bp, Arabidopsis thaliana landsberg
tactgctttagtttctgcttcaagagatcgataagttccgtatttacattttataaaagcaggcgcggatttatggataggagacgcaatccttgttcaccccggcgtctcctgaa

SEQ ID NO: 54769 - DNA, 482 bp, Arabidopsis thaliana landsberg
tacgttttgtgcgcctgctccaccgcttcgcgaggtctggatcgaaatatcggcattttttatctcgatattgatctcatcgtccactaacgggtagacatatacgctgcaaaagctggcatggcgcttggcattggagtcgaacggagaaatgcgcaccatgcggcgcacaccgttcttgcccttgaggtaaccgtaagcaaaatcgccctcaaactgcatggggatgctcttgatcccggccacagacaccatactgtttgtccagctcggcaattgtatagcctattttctgcccgcacatgagggacatacgcatgagcatactggcccagatgcaactttaggtcccacctgcaccagcagtaatttggatcacagcgcttttactgtcttccggggcactcagcatattgcggaactccatgtcttcgagctgcgacaatgccttgtcatactgggcattcacttcttactcggtt

SEQ ID NO: 54770 - DNA, 956 bp, Arabidopsis thaliana landsberg
  unsure (1)..(956): unsure at all n locations
aacggctcctttggctgtactcttgcccagatgctgtattcgattcattttctggagattctaaggtaaagtgtttgtagtatcaaaaccatattcaagcatttctgacaccgcttgaagccatctaattttccttacttggttgtagcttaaagccttgcttcatnnnnnnnnnnnnnnnnnnnnngctatgggttgcgcaacagccgccaaagccatccaatggttcaaagatccagagactaaccacaacatcacttcacaaggaaaaactttaagagaggtattagtacaactaaacatgctcttcatctttatagtatacgcgagtccagattcgtagaccagtatgttgcaatcaataacaaaatcagccattactcttggtatcaattaatcctttaaaatttgcagctgtgggacgaagaactggtgcaacaaatatcatctcactctgcggttcaaagggtggttgtaataggaacccttttcgctctagaactaaaagcagatgcttccaattcagggtaatcttctcaagtaacataatatttgttctcttgaattgtcaccattagacaaaatgtcttgaacacaaactttggtacaatttctctgcgtgtttcaggtatgcttcgttgtatgcaaagtctcttctaataatgcttcgggaagacggtatctttacccggcctcttggaaacgttatctatctcatgtgtggcccttgcacctcgccggaaatttgccgccggttgctcacgaagctctacaaaaggctcggagaattcattagaacatgaaacccaaaactctctctccagcttattttgttgtcatctctgtatctgttgcatattttaatgacatatggaatctggattttctattggtaggtnggtgtatggnggtcttttcttttctttttttcccttcccgcggtgtgtcggtttttg

SEQ ID NO: 54771 - DNA, 560 bp, Arabidopsis thaliana landsberg
  unsure (1)..(560): unsure at all n locations
gctaaagccgttggacataagccttaaactatcggaaatagcctatctcctgcacggacctcgcgtgcagtatttatggttggtgaggctatatcatcctttaacaagccgcagcggccgggtgcagatatattctacgagttctaatgtatatgtagttatgtacaagttcctactatatataatagcgttatcatcttgcaaagactaataaacatgcattgtgtactgtctcttgtgtaacatgggccgcattttctatgaaatggaattaacagttggttggaattcttcttggtacgataaaaaagaaagagagagagagagaaataggctgtttgaccatgtaactctttaagtattgtacactgatcaatcaatccatacatacagttgcacacgtactagtttgtagtcagcacatactagacagcatgctacgcgtggtcagcagacaaatacagccgccagctacaccctcttcttcttccatagttccatcctcaagctgctggcgcaggctgcagcgcntggtttttttcgctagcgtacatacagat

SEQ ID NO: 54772 - DNA, 904 bp, Arabidopsis thaliana landsberg
attccatcacactgaccaccaatggaagacccatgagcacatgtacatatgtggtgttcattgcatattacatgtgttcctactctgcaaccacgagaatcacattccgcaacactcttacatcgaaattgaccttgactcctcaaaatcagacctgtatatatattttaccagagtcaaatttcaaactaaactaaattatatattaaaaaaatacgttagaaatgaccttgagaaacttacatgaagaaattaggagaagaacaaagaaaatgcttgtaactttttccattttaatttgttgcttactaatttttcgattttcttcaattttttgttagtattttgggtgaatgcagacttgtttatatatatggggttttgtgtctcctttgtttcaattcgatatgacttggtcaaaaaaaaattatcgatattagatttattaccttatcttggcgaaaaagaatttttaccttataatcttcttatttttttcctttttataaaaaaaatcttcttctatatttttcaaactaaaagtttactatcttatcatagcccaaaaataaaagttttacattattagccttttgcgaatcttgggtacatgtaagtgttttttgtacatagtgaacagaacaaatactgtatatctcacgtctcctttaaatcttcatatattttccaatcatatacttacgtacatctccttgtcgaaaaagatatattagattattttttcaacacaaattgcgtatttgtcagcatacacacacaaattacagatatattttagattattttgttgactaatgatttttgactcaaatattttgtaatggatgagagaatattttctgaatttacagatatatttcgatttcacaaatgaatttcaaac

SEQ ID NO: 54773 - DNA, 693 bp, Arabidopsis thaliana landsberg
  unsure (1)..(693): unsure at all n locations
tgggtctggtttgtatatcaagaagaccaagaccaaccaagtggtttaaacagaaaataaaagcttttgatgttttagaacttggattggtttcaaactttaaaatatctccacattgaaaacaagatgaaaatattttcacggactatcatatcagtctattcctctccaaacaaaaaaactctgtatcatttaaattcgattcttccctccatcggccacacttctttttgggctatattgggcctattagagatagtttgacatatgttgctgtctgcagtttctcgtttgctcatttgagtcatttctttgtctatggttaaaaatcttagctaaaatgatgatttaacacacacatacaaacaaataagttacacagtgttttaatgtgttagatcctattcaatgatgtgtgccagataagttctaaatcatataaaaaatcagataccattttcgaagtgcatgtaaatcataactagctacacatgatatactgtatgttaaatgttacaatataatatataattcagtccctaaatataaatgaaatcatacgatcaagatcaatatataatgttctatcactaaccaaaacattcgactctttcgtgcgaatatgtttgtcgcttgcatttggatacatatgtgaatngtgaagtaacaaaaaattttttttatcaaaaagaa

SEQ ID NO: 54774 - DNA, 476 bp, Arabidopsis thaliana landsberg
cgatcaattcctcctcgtcggtgacgacatggtcgcggatttcggattcgcgcacctggcgccattggatgtcgctggggtggatgacttcgccgcgacgtttgtcgtccgcgagcacgggaaccgagacgagcttgtagatgcgcccggtcacgcgtgtccgcgcggcggccggatcgttggccggcacggcgacggtcgcgacgaaccgccccgtaccgtcatcgtaattcaagccctcgatcccgaccgtcgaaggtatatcggccgcgacatggaaattgatggccgaagccgccagctcgacctcgatatcggttccggcgccgcggtcgcgcagtgcactgacgagggcgtcatggatctcgtcgcgctgaatgatctggctcgcgcgttccacgacggcatgggtgttcatcgtgaacggccgccagttcagcttgtaggcgctggccaccctgtagagccatttcgca

SEQ ID NO: 54775 - DNA, 1456 bp, Arabidopsis thaliana landsberg
ttttttatatgcttttgaattcacaggtggtttggaattcagattttgtatggtttagagttttttttatatatatatcatgctgaggttgtatacttcgatttgttttttcattttattgaaggatggcaatttttcgatttgcacttggcagagtatctgtttgtgtgattaaaagttgttatggtaactttgtaacagggacagtgtaaattttcgatttgcaattggttttgtttttcatgtaagcgtatgattcaaccttaataagccatcattaataattaataatggtggaccaacaaaattttaagtaatgttaaatatggcaaagtcatgaatcatacttataatttttttttaaaaatctaaagtggtgacgaaaatataattcatttaaatggatcactggtggacgaatggtgtgagtgtgacatggctaggtagagccgtgaacctcgagaatgattcaaattaacggggcaacttcgttcaacgggggactttcttttgaccaaagcttctatttatgtgtttcacccttatattatgcagtttcttcgatttaggaccattacttccattgattcctttattttcctaagcaaagagtacaatttaggaataacttgtcgatattttccataaacaccatttcttaattttggagatacgttttccttattatttttcacaaattcaaacaaaatcttcataatatattttagctatcaaatcacactctcaatacattcaaaacttccataaacactcttagaaatcactaaaatttagtagacagaaatatcagtaaatatttgaatataagtcatttaagcgaacattctataaactgtgtttggtatcaatgttttatagctaacgattaggtgtaaattacacattcacataattactaagatataggttggggttgcatttttttattaacagaaatatatggttcatcttgtaatttgaaaacttaaacccactattttataattttgtcagaagaacaaaaccttgtctttggcttttgttcgtaacctttgtttacttgatcaagaaaaaacattaaaatccgaccaaacaaggaaatatacacattttcaacgcggacataaattttcattacagcgtcttactaagctgttctgttctttaacgcggtctcttcctctcttcaaaattaaacttccgatttttcaccttttcatttccagaatttgtttttaaaaaaagagatttttgtgagtgaagagatttagagtaatcatgggtttaactcgaaatttcattttatggattcttttgtcatctctctttacggcgattcaactaacgtcgtttcaacgcaacactccaccaccacgctctaaagacgcccatctctgcaacggcgtggtcgttttctcacttacttaaccgggaccaagattaaaccaaacgacac

SEQ ID NO: 54776 - DNA, 478 bp, Arabidopsis thaliana landsberg
ggttcccatgttttccaaatatacataattttctttctttctgaacatcaaaaacaaattccgtgaacttattttaaattggtcaaaatctatatttctttccatttgtacttttattatataatatctagaactggaaaaaactataaaggtttgactcgtgttctttgcctcccgctggcgttttccatttaaggaatttgttttttagtggtataactggccaagccaattcagattcccaacttttacttttaaaatatataattatcgtatactaaaacaaatctgtcttagcattgtatgttagtcaaaataaaatactttctatgtaacagttaattactgtttccattataaacaagtcgtatacaatttacaaagacagctacattgtaatgatttaattcggccaacctcaaaccatgacttttgcccgttctttattacatgtcaatccaactcatttgatatttga

SEQ ID NO: 54777 - DNA, 733 bp, Arabidopsis thaliana landsberg
cagagatgttatccacttaaccgttacctggttcggtgatagatatgacctcgtcgtatcacaattttagtaccgaaggtaaaagaaagcttgaaagaaagaacaatgagactcagatttttgggcaatcgatattgcctctttttgactttttcatttcttaaatagaagaacaaaacaacaatgcaatggagtgaacaccagtcctacaatttgggaaataatgggaaagaggtgataatggttcctaacaattagggagaccacttccacacttatttgcagaacttgaaaatgtggagacgaagtctctcttaatccaaatacttcttattgggcttccttacacgtgaggactgtctcggacgcagcccattagtaagcccagtgccttcatcttcttcctcgtcacttacacattcatcattcggcgtacacagagccgtgccaaaggtttttgatgccataggaaaataaaaatataattcaatgtataaaaatgattttttaacaactatatatcacacaaaatgtagttcaatatttaagtaagaaaactttaccggaataatttataaataaatttttaacaacacaaatcagatcatatataaactattgtgactgaaattcaaagtctaaaaatgtataaagaaatgattacagctggactaaaatagttaaaacaagtgcatggcaataaaaccatagaataatatctttgaatattgat

SEQ ID NO: 54778 - DNA, 107 bp, Arabidopsis thaliana landsberg
agacgtgttactctgaatacagctatagaacatgactgagggcactagatatcgaaggctcgtattttacctgagcgagcgcagagagagaaacagggcacgggcag

SEQ ID NO: 54779 - DNA, 140 bp, Arabidopsis thaliana landsberg
ccaccgcctccacctccacctcctccacgaccaccacctcctcctccactatttccaaagccaactccaccagcaaaaccactaccatgaccatatccgccaccgactgtactaccaccgctaccaccagctgcctcctc

SEQ ID NO: 54780 - DNA, 640 bp, Arabidopsis thaliana landsberg
ggggaggatgggagtgatataatgagatggaagtaggaatggtgtggaaagaggcatcagagtcgaccaaccagctggtgggaggaggggagctaggccgggagtggcgagcatggtgacaggggcatgggtggaggcgacactgaggccttgatcatcagggaggcgatcgtagcactgcgaaatacaagcgacccagtagtgtggtggcccgcttgagggtggaggtcgacgcagtcatggagaagtgggttcatgacctaattaaaggccatgaaagtaccctgaagaagctggacattgtgaaggtagatgcgcacgtggtagggaggcacaagaactacggtggaggtaggcatctccaaaagtgagagaaggggcagagcaaacaagccgcatcgaggtagatggtgtagacaggggatgcgaccgtgctaggttaggggaggacatcgacagacacactgcgtggcatcatcatgggcatgttgtgctgggaagagagttagtggcggcacgaactgatacatacatggataggagggcgtcggggtcggtcaggtggctgtgggaggtgctgggagcatagggatgcgtgtgggggctagggtagagtgttggtatgttggcagtgatggga

SEQ ID NO: 54781 - DNA, 409 bp, Arabidopsis thaliana landsberg
tcaagtattaaacaatatccagcataaacacaggacccaacaaaggctcatgctcaaattatatatcacctcccaatggactcgaaatcaactaagttcacgttcggcggtttaataagtggcagacgcgattgacgacgtgcattagagatcatcaaacacggagaatagtatatggcttactcaccgtgaagggatgtcgatgacacaagatccagtagtatcatcgggcagtgtcaatgcgatcagccgggattgaggatggcgatgagacccgcagcgaagtcgccgccagttctcccagtaagaggcagtccacatcggaccggtgaccccaggcattttaatgaccatctgccaccatgtccctacacgacgcttgactaccagtggagatggattcaggaat

SEQ ID NO: 54782 - DNA, 1126 bp, Arabidopsis thaliana landsberg
tctaacaacagttactcccttcaagtgttcaaaatttgctttctcgatcatttggaacctttggaaaaataggaatcaacttatatttgaaggagacatagttcatgctaatgatatttataacaaagcaatggaggaagaaagccaatggagctttgctcaaaagaatgtgatgtttcaagaaaagtagccaacgtatatggaatttttgcagcctcccttgatgggagaagtcaaatgtaacattagtagattgggttgtcagaaatctgcagggtgatgttctcttacatagtcgcagatcttttttccaagtacactctctctttcaagtaaaattttgtagttggcagtaggctttggaaagtatgaaaagtttgggattttctcatgttctttttggcgcttcaactccgaaaattatcaatgcacttaacaaacaaaagattggccagccatcattggtcacattgtagtgttacttatgttcaccaaagatcaactacactggtttattatgagggaatctctctcttgtaatcaaggtactatggcaattgccacaagtgtggttactgattttagactccaatcatatgttgccagcagagctcctcaatggttgcaacaattttaatgacaatgaaagacctcaaacatttcaggtttgactcggttctatctaatgaagggagtagtttgttgacttttgaattcttacctccttaagaagaaagctaaggtcgggtttttttattcctatttgtcttgatccatttttatttttttttccttttatcttttattttcattaacttctaatttttctcttttctcttatctcttatctcttgtcctcttctttctagtgttttcattttgtttttaactacattaaattcttacgctctttgagaatgtcttagtcatacttttcatctcggtttgggtttttacatgggtcacctaatttttttaggtgatttattatcttttcttttctttgatctctattgtccttttcactctttctcctctaataaatacttcgttcagagtttataaacgactgtacacgcacaccttgtacactctgcttccctttactcttctttaatggacgatg

SEQ ID NO: 54783 - DNA, 379 bp, Arabidopsis thaliana landsberg
  unsure (1)..(379): unsure at all n locations
aagtctagatttgaatttgtggacttgacacaggtagttgaatttggttttgtagatgaatttgaggacaattgcgtttggtgcatatggaagagtaagcaatgaccaagtttgattgttgtgaatagaacttatttgtgcatggattgggtgtttgcacatgaagtgttttgcagcttgttggaaagttgttggatcnnnnnnnnnnnnnnnnnngaacactggattttgagaacgaactgtagcgatgtttgcctgagcttgagcatgagataattgctctgcagatgtgtaatgatcgtgccaaacaggtggtcttnttagtctggaactgttgaagatgtagcttcagtgttgacttgagtgagcgagggagagt

SEQ ID NO: 54784 - DNA, 1121 bp, Arabidopsis thaliana landsberg
  unsure (1)..(1121): unsure at all n locations
ggtataatgaattacatttatcttctttcttatagatatgtaattcttaaaaaagaaacagattccatgtgtaaaatctaacaactgtaagctgtttggtctgccatttactcaacaaaagtggtagaaaaagacagcttttcttcacgtgagttatccattgttttttaaaaaaatctcaaattaagcataaatatttctttgttttttattaaattaatttaggtcaatcaaatgtaaactttacagagcattaatgganngacttatatacattcaattatataaatcagtttttataacaattattgggaaggctttaaagttagaaaatgatagatgcatgcaaatttattgggtaggaaaaataaattaatgttttggtggaaatcttttaaatcaattttatgaaacacttcatttgttacatattgattctggaatcataaagacacatacattatattatcattatacacacaaaatcactagaaaaatcaataaaaaacaaactaacagtacttatcataactctctttagccatgaatagaagcaaagtgattaatcaaagctaaagcattacttgttaaatgagcaataaccaaaatcctccctctaaccaaaaccttaaccttcccgtccatatcttctccttcaaatccgtcagtacatgtgttcacatctgtcaaagccgcactgacccaagtctgtatatcgcttatgtaaacttcatagttcgagccacttagctgacacatctcaccaatcgatttcctaagctcctccaacgtgtcacctaactcctcgacgcagtctctcatggccgagacttctttaggcttgagccgactattcgagagacgcaccatcattgctgaagttactttagccgaggctaatgtgatgttgagagccgcatgagccatgagcttggggcttgtttggatgagactagcatgagttgagagtgaagagaaacagagtcttgggtacgttgtgaaagtgcatgatgattttacgaactcggtgtttgttgtcgttgttgtcgttgttgatgttgttgttgtatgaccaatttgagcatggctatgattatgagaaaagttgtgacgaagtgatg

SEQ ID NO: 54785 - DNA, 963 bp, Arabidopsis thaliana landsberg
ctcatcttcgaatacgatctcgggatctcaggtttttttctttcttcaagtcttgttcttctttgatctgatctaggaatttccggtgactaattagggtttctatattcttgtaggaggggtaacctcaatggagccattcttggaagagttcttcccttacgtctacaagaagatgaagagcgcacatgagaacgagtactgtcgatttgatagtcagcttctcactctcttcacttcgtctctctatgtggcggctttggtgtcttctctctttgcctccaccattactagagttttcggaaggaaatggtcgatgtttctcggtggtttcaccttcttcatcggttctgctttcaacggctttgcccaaaacatcgctatgcttctcattggtcgtatcctacttggtttcggagtcggattcgccaatcaagtaagctctaaaaactgtctttttccttgatgaagaagtaacactggtggcttagttaactggttttgttttgtgtttcagtctggaccggtttatttatcagaaatggctcctccgaatctaagaggagctttcaacaacgggtttcaagtagcgattatctttggtattgtggttgcaacgatcatcaattacttcaccgcacagatgaaaggaaacatcggatggagaatctctctcggattagcttgtgtccctgcagtgatgatcatgatcggagctctgatccttcccgacactcccaactctctcatcgaacgtggctacaccgaagaggccaaggaaatgcttcagtccatccgaggaaccaatgaagtcgatgaagagtttcaagatctcattgatgcaagtgaggagtccaagcaagtgaaacacccatggaagaacatcatgcctcctcgttacagaccacaattgatcatgacttgcttcattcctttctttcaacaacgcaccggaatcaatgt

SEQ ID NO: 54786 - DNA, 489 bp, Arabidopsis thaliana landsberg
gtattcgatcctattgttgtgtggtgtgtactgaaggtggagtcggtgaaggttcgatcagttcaactagggtatttggtgttcctaactaaaatttagtatgtgtcacatcgaacatttgaatgtcaactacgagtattaaatatagtataattattaaattaattacagagacgaagactaaacaatgagccatattctaccaaattcttttgttttttgtttacccgtcggttggcatatacaactatcctatcagttatgagacaaaatcacatgtataatgttgctactgcaacagaaaaggtacaatttatataaatttataagtgataattgtaaaaggtccttaactgaactaaattgttattctattgttactttagctgacaatagtatcagtggcacaggtggaaatacactatcataactcatgatttttttggccccctcgttatccgaccacttttgtccgattcttaatgtgta

SEQ ID NO: 54787 - DNA, 252 bp, Arabidopsis thaliana landsberg
gccgaacgcgattaaaaattaaaccaaagtgtgatttctgttaatataacttatctttttctatctttataatttaaattcactgatatagactggcaaaaagagccaaaatcacaatcacaatctcacattctaaaatctctgacgattttgcttcttcagtcaaaagaaaaaaaaaaattatcgaaaaattaatcaaggagacatttacgagttttgtcaactctattgaaattcagttgctcccagtaa

SEQ ID NO: 54788 - DNA, 755 bp, Arabidopsis thaliana landsberg
agaagaagctcgtctggaagacaattaagttacaccttagagatagataagattctgattttgtaatctttccttgaacatcatctgtaacaatgtagttttctaagcaaaacagattctatatattgacaaagcagtaacctccacaaaacgaaaaaagatttacacacagatagtacttacaagacatctacaaatattcaaacacaaacatatcaaatcagacaagaattatactcttttttctttatctatagatactagatcttgttatttactttgatcgtgtatataaataccccaaaaaaccaccacgataaggccagtcttttccgaaattctatcaactttgatggtatgtaccttgggagaaaaaccgccgcaaatactcgaaaccgaagcaggagatcatcttcttcttcaaatggccagcttctattcttggccccttttcctgttcatacaaagcaacatgtttctgttgttggttttcccgggaaaagagagaaacttcttcgacggaagataaatgtctcaggaaagaactttctctgtgttgggctttaagagaagagaggaagataaatgtttttgaatgaagattatccgaagaaagagaagcttttacggtgtttggaatggcgggaggaacgagggagtgtatggtcagcggtagctgatctaggagtgctggacactgagttctggactgtatcattcttaacatcagaaagctcggggaaaaaaaacttaca

SEQ ID NO: 54789 - DNA, 678 bp, Arabidopsis thaliana landsberg
caatagtttgtagatttcaactaaatgatataagctatttttttctacattttgcacatgttgttttgttcttgaggttcatctctctattttcttcttttcactgtaaaatgatactccatgatgacttaagtatccaacaacaacaaaccaaaatccaattctagtttcctagttttcttactcctccaatcgtcttcggtttatcgtgtaaaatttcctttacataagagcaaaacgcaccgtttcgtacagatcagatccatcgcaccctatgataaaaaacaatggtctcacacgctcatccaccaccacgtgtttaacaagacacgtgtccaaacaaattgactttgcctagttgtgttctaatggaaaagtaaaattcctcttttctctcttagttcagggaggaggctcgagaacagtgccccatatctgaaagctgaagctaagaatctggacgttcgtgtttaaaacgacgacgtatttgaaattggctttgaaggaaaggtgaaattaatggcggaatcgtcgtcgccgtcgcctactgaagagatcgttcggttgattaagcgtttaagcgcttacggtgctttcaaaatgtgaagccttttcttcactacatcgattcgaaatctggttcctttctcgaactctctctctatttacaacgtttct

SEQ ID NO: 54790 - DNA, 1278 bp, Arabidopsis thaliana landsberg
aataaattggattccaacttttatgacatcattatcttcatatgcgcatggtaaagttttagctcaactctaaccatattcgggttggtttgtgtttaatacccattttcggtttggtttgtgtttaataccggtttcaatattgttgttagatttggtttccaaagacaaatgatacaatcccattttaaaccgacccaaacatttcgattcgacctggttcgatttcaatttggttatgctcataacataaagtgatgttattatagaaagtaggaatattcacagaattacaaaaaacaagaaagcagaaaagatcagattcagccataaacacagacacgactctgattattatctcgaaagaagaagaagaagagctttgttccttctagaagcttcaccgtggctgatagatatgatgattccggcgacaattaaagttcggattcatgtacttcttctgattatactttggtgaacaagacgaaaccttcgatctataaatcttctctttcgtagactccgctatgttcaaaagcatcttcaaataactagccacatctgcttctgccattaaaacacacaaaaatcctcagatctgaatgtttcgaatccctaaatctcaactaattttaaaacagtaaacaaatcgttacctgtaactgtatcagccatggatccaccatcagacgatgcgatcatctcctcgaactcttcttccataactgagaaatcgtcgccgccgaggaactcatactcagagttagcactgagccaaaagtcacggaaccatttcgaagtcgttactagatcccaccatttcggtgaaaaatcctccacctcacgaaattccaccggatcaaacaccggcgcgtttggattcagcgttgataacctccgatctatcgtcgccgtcatctttcacctcaaactcacactgaaacaaagtcagaaactcagaaattcgaatcgattcatagtaatgaaatcggaaatcagagttttgtcgttacctttcgttgatcaacgagtcaaactgggtcttagagcgagtctcactcacgagtcgcttgggcacggttttaaagaagagacaatccgcttatccggtaaagagtcacggccacgtgtgatgtaaaatatgaggatctgacggtcatgaatgataagggcgtgatctgacggtggtgatgttcacaataattgggatatacgttcgttagttactggataagacatttattgttcttataatttccatactggttttggaat

SEQ ID NO: 54791 - DNA, 466 bp, Arabidopsis thaliana landsberg
gttttcgggatcgcgttgacgtcttgatccgtgtcggcaactctagacagctggagggtcggtctgattatctgcagataccagtcgcataagcggctgcacacgaaatggcagatcgtgtcggcgtacgcgaacaagcggaactcggggaccgcgaggtcgagcgcctgtgcggtcttggcgacttccccgatgatccagcggatgaccggcagcctcagctcgggcgggccgatgagctgcgaggtgccgatgccgattgcctcacacaagcgcgcggagatgcacaccttgctgccgaagttgcgatagccctctacgcgcttgtggctgagctagatgactcggccctgcgtcccatcgcggtcatcgagaagcggagagcatccgcgccggactggtcgatcagcgtcagtgggtcgacggtgttttcgcgcgacttggacaattttctgccccttcgcgt

SEQ ID NO: 54792 - DNA, 116 bp, Arabidopsis thaliana landsberg
  unsure (1)..(116): unsure at all n locations
ctttagtccttaatcctttttgattcgatgttccttttgaagttcnttcccaggaacacaaggtagggagactggagaagtttgaacagcttccactgagtgtaagcacctatcaa

SEQ ID NO: 54793 - DNA, 1223 bp, Arabidopsis thaliana landsberg
tgcaggatgttatatacaagaaattccaactgccacaatatataaaatgagcagcaaattttatttttttctcatgggctgtcataaatgttacttaataagacacaagacgttgggaaggactgaatgactttactgatatgttttcatgctaccaaatttcgtttttcatcattctaccatatcaatttcgaagtagaggaataatgtcgtgcacaaccaagtctcggtcccagctaccattatcttcaatgaacaccgcaacacgtaaacgcaagtgataccgcaacctagctaatgaagttttggttaacatgaactcgcactatatgacttccaaatcttttgtcttcaactcttttttaccaaagattcaaaaccgtaggctcttactctataaagctagaccttgtcatttttaatgatattacacagaacaaaaaaaaaaatataaatccaaacctaaaatcacaacccaactccgaagataataaacggcattgaaaatcacacaacaaccttaaaggctataatcgtcactgaatgttacataccgactctgaataaaacataacttataggatactaaaattatgtcaattcagatgtaaagttgtatcaatttattgaaaatactagctactatatgaaaaagtttagaaatgtattggggaattaagttttccgaaagagagtgtttaactaatattgcctcaactcgttttatgaattttcaaattttagtcatgtggatatggaaatggaagagtctcaatacattgtagaactgaaatacattcttctaatcaatcataatccatacaaatctgtatttttactcatttgtatttaaatgtaacaaccacatacataatcccaccttaagtacatgattaaggaatgacttttcagcaaaacacacctcaaaattctcaaattcttgtcagttcaataaaacaatttccttgaattattgtcagacacttaaaagatttgtatgcatgtaactgctggtcccgtattaatatttattgcttcattccttattactaagcaacaaaagtcacgcgtgagatataaaagaagatcctttgcagtttctctgttcttgctccttcttcttcatctccctttattgatactgtctgagtaataataaaaattcactctttttgtattctcaagacagatttcaaaatagaaatcattctccttttttcttt

SEQ ID NO: 54794 - DNA, 419 bp, Arabidopsis thaliana landsberg
cggtcacgaagcttgaggctctgatcacagaactcaccgaggaactcaacgcgcaattcaccacctgtcatttagaagatcggtgcggaattcgctcgattcttcacgctcatgttcggcggcggaaatgcggcattgcttctcgtgaagccgaaggtgcgcaagaagagcgatgatgaggaaggcgaggaagtatctgaagaggcagaggagccggaggaggggatcgatatcgacgtgaagctgcccaacaagcgcgtacgcggactccacatgcaggcaggcttagaacgcgcgcggagggggagggctctcatcttcgggatgagccaggtcaattcaccactcttcgcgattctcgctgagactgacgcggagcttgatgaaacaaacagtcgccgctatggcgatatgatctt

SEQ ID NO: 54795 - DNA, 477 bp, Arabidopsis thaliana landsberg
  unsure (1)..(477): unsure at all n locations
agctcaacggcggtgttagacaaaggaaaaacagagaacgcactccatcgagcctatccggatgaagatatttcccaactcacgacacgtcacaagccnnnnnnnnnnnnnnnnnnnnnnnnnnnnnnnnnnnnnnnnnnnnnnnnnnnnnnnnnnnnnnnnnttattaggacagaacagacagacgcatcacaggtggggcaccgcttaactctatccattttgcatcaacttttgcccacttctgttatctacaacgagtccttcccttacccatgttggttcactgtcataggccatccaaccacagttacaaagccccagctaaacatagggagtgaggagcttaaaacaccatgaactccagctctccaaactgaattcgaacagactgtaccacggtttcagccacctagactgaagctctacgtgtaatcctacataatctcactacttcaagtggtaacaaagggatga

SEQ ID NO: 54796 - DNA, 565 bp, Arabidopsis thaliana landsberg
gctggcaatgaggacattccaacgttgaaggttgaacgctgaacgggcgcaggaaatggcccaatcacccggcagcagatccgcccgaatcttcggtgctccaacctcgccggcaacaaccgcccccgacgcgtcatgggcccttcctcgctcccgcctccactccgtagctcccacctcaccccccctcctcgcaggctcgaccccacccgttcggtccgcgtgcccgcctcacgttggcccgccgcgcgcaccacaccgctacatacaaataagcgagccccccggcgcccaacgactttgcaaatcccgtgtgccgcactggccgagcccacatttgaactcaaagtccccccgggcccccacaaggaaaaccatgtgccgcgcccgccacgttcccacgcgccactaaatcagcagcgcccggccgcccggagctgcctgccagtagcagcaacagcaaaacaagaagcagccgtaagcagcagagagcatggcgagatcagggcgggaagcggatccggagaggaggaacggaagctggtgctgggcaagtacgagctgg

SEQ ID NO: 54797 - DNA, 478 bp, Arabidopsis thaliana landsberg
tttgaaaaaccaccccatccgcaataagtcaattcatcgatatattaccacatcatgcatgatatcaaatttcatataatattaagatctagtagtagctagtagtacaatataataaacattaaataaatcccactagatgcattcttaagagaaatcttccaagaaaaattcagacatattagatgagaatagattaatccatactagaaatcaatgttgtgttgagttagtgcttaccctcgcagtctcaatctccttcccaaaaagacttttcaaaccaaagaatggtgaacgcttaggaggtaatgggcttcctctcggcatctctctcttcgtttaccagtaaacaaacaacaaaaacgtatttgaaataataaatactattgttttttatttcatttgttctctctctctctctcttatagagtattgtggatttctttgcgatagaaggaacaagagatgtctctaatgt

SEQ ID NO: 54798 - DNA, 299 bp, Arabidopsis thaliana landsberg
cggggaacttgtctagagctaacccaaggccggatcgagccacatcctcggacccggtaaactgttctagtttactccaagtccggatcgacgattccgcggaaccgatttttttacctcgacgatatgaagtgctggtggaggaatgccggacaataactggctagcgagaagctcactgaacctgcttagcatgcagccaaaccacaaccgatgtaacgggaaggatagtataatgggtgcaagagagacccgtgtgagttttggcttagtccgattttgttgaaacgactggggag

SEQ ID NO: 54799 - DNA, 728 bp, Arabidopsis thaliana landsberg
cgcaccttctgaccaatctttctctaagtttggtcaaccttcgcttctcgatatgaagtaccagctctctccgacgagactccccggagaaaccttaagaaacctcccaaatggcgccaaaatccctactctcagatctaattactctctaaccgtcacgaattcttcacgattcggaggtaaaacttcgatcaacaacgtcgtagtccaagattctcctgtttttgacgacggatacgtcgtgatttacggatccgacgagtttttcacatcaccgacgaaaatctccgacgattcatcatcttcttcttcaatcccaagcactacttcatctactggttcaatccctatccctagctcagcgactcaaacacctccaagtcctaatatcgcttcggattccactcgaaatcttcccaatagatctaaaccagtgaatcgcttcaacatctttgaatcggcttcaagattgttaatgtcgagaggtttcgtgattatagctacgtttctcgctctgcaattagaagataatacttcagtaaacgacacgaagatcacagtctttgctccgatcgacgaagcaattccaaatccaactactaaattctccgattacgttactattttcagaggacatgttgtcagtcaacttctcttatggaaagatcttcagaaatttgctaaggaaggatcgattctgcagactgttcttaaagggtatgagattg

SEQ ID NO: 54800 - DNA, 639 bp, Arabidopsis thaliana landsberg
  unsure (1)..(639): unsure at all n locations
cagtcgcttgtggcgaagacatcgtcgtacgtctgggcacccgaagagccaaacacgtcgacgctctcagtgatgaggccgttgggatcctcgtcgaaaataggctctccatcgaagatgcattcctcgtcgaagataggccacaccttgaagacacgnnnnnnnnnnnnnnnnnnngtggcgacggcatctactgcaatgcgttgaatagcttgtgtgcggtggcttccaacaactctataggtgaagatcgtaggcgtggagaagcgcacgagtcgaagaagcaaggccgaagatgatcgactctgataccacttgtcacaacccttggccggcgcggcgttgccgatgtgagtgcgtgcaatcgtcgccgtgagatcgccgataaacacaccggagtgagattggttactggaaactgagttctgttatttcaaaagttctcccctgtctctgttacaacagagcagcctatataggcgcccaaacgatccggcccaacttcatggcccactcacacccgccttcacaacgtcattatatcagatcaacgatcacacgccaaacaaccgcgtcagcgactgtccctttgcatggtagagcaagcactgtcatgcagtaaccacagagtccttgacc

SEQ ID NO: 54801 - DNA, 540 bp, Arabidopsis thaliana landsberg
ccttcccttccaattggctgttgcctatccaatgtcgaacacaagaatggacaacaagtttgtttgcaagcgccaggatctcagagagaggccggtctctattgcccgccctttctctttgatctatatgctctctgcttgcctttgcattccgatcatgacgccgtgggccgttacggcagaattaccttgtttctgacgccggcttacctgctgagggataaacaggctgcgatgccagcattgacagatgccgttatgatggccatattagacctaacctgcaactcttcttctccggaagccagagtggcaataaaaatagacatggcaaatacgatttctgcactcatacccgtacctcaaagatgacctcaggtggcatcggtaggaagagctggcacattccaattttacagacaggaaagaaaaaagaaagactgccttccgtttttcccagtaccaaacccaatacgacgccatatgcgatcggtgaaatgaaaatatggctggactctccagaaaaataatggctgtatt

SEQ ID NO: 54802 - DNA, 405 bp, Arabidopsis thaliana landsberg
gaatgcgatcctttacttagaattagatttattgggcaaacgcttcattggattggatttgaaccatatattctagttatgcagatcgtcccaaggcccgcaacttttcttattcactacttaattagcattctttcttcttcaatcacactctgtttcactttgtgctttgctaattcagctttatagcataatgtgtatatcatattcattactctctctggctccatcggtggaataacagagattaatgtgaacttcctatgaaataaatatcaaagattcgactcaagagatcgaaattacaaagcacaatacatatgtaaagaatatataatctggaatgaatcctgtatcttctttatggtgagtatcaatccactcactcactatacactaaagaat

SEQ ID NO: 54803 - DNA, 1202 bp, Arabidopsis thaliana landsberg
  unsure (1)..(1202): unsure at all n locations
atataacccccttatactgaagtttggggaggtatgggcatcagccaatgtgaataagatgagnccaattacaagtaacatagcagatatgtactcgtggacagggtattttcttctcaaccctggtataaaagctcccataaccataaccggcaaaacctagataacagaggaagaaatcaatgttaagagatactgcgagaattacacaatgattcaccaattaagaaaatgtaacatatcttgctaaccaatacccctgggattaaacaagaatgtgactttttaaattcctaccgtaacatttattgatacaaaatccatgtgagttcaaaccgttactgacaatgtaataatgtaaggagtctttgattacaaagccgagataaacaaatgcaatgatctatatatattgaacgaaattgatctcaccgattaatctaaactttgatccctcgctcaactaatgatggtattggactataccatgcattacttctttttttaaataaaaatctataggatatatatacaccattagttggttaagtgaaatattatataccttagtggatttgaacatgatttgagcaggataattgagataagccaaggagcctttggtgaggccatgagaacccataagaacaccagatagtttcacgtaagtcttccatggattaaccatttgcttcgtcctgaagccatacatgtaaatcaaggcaatgtacaccaatccttgcgcaaacgtgaaataccatccataactgcaacgcgcacacacacatattatacttcttctactattcgaattttaattaataaagatttgacttttaaattacctgaatttaagccggttgtacacatattcctgcanatttgataagaagccaaaaaaagtgtgtattaaagatccgatattgtagtcaaataaaataaatctaaattttaataaatgaattaagcaaatacagaatctgaagatttttttttttctgtatttgtattaaatgtatacaaatctcagattcaacaaaaacaaaattgcatgcctaatcttcgcctttgtttccggtaaaagtctttgttctaatgaaatatttttagaagaagaacaccggattcatttcttaacctagggaaggtttttttgacaaaagacacaaaacacacctcttgcactaacggatttcccgact

SEQ ID NO: 54804 - DNA, 706 bp, Arabidopsis thaliana landsberg
aaaaatctgatttatgacacaaaacggtaatagaatttttacggaaaaaatataaactactggaacagttaaaagcaaaaatagtggtagagcatagtaatatacacagagataagcagaaaaaatcggataaaaccgccgattaatttttatttgacgatttaatatctgttatattaaatttggaataaaaaaattatttaattttgattgttttttaaagtcctcgttttttaaattttagtagattagtatctcaacaatggtaataaaatcgcgataaaattaatatagaataattcatttcataatttaaaagttatattctctctcttttttaaattaattcaatttctgagtttttactaatattagataagattataatccataattttttgaaattgacaattctttcaaactttaaacctatagttttcaatttaattttaaatttacaatttatcgtcaataactaataaaaaaatagaaacattttagcaaaacaaatatttttattttgtataatgttttgttttctaaaattgtgtttaataagtaaccgaaggaatatattatattgaatttttttaaaataaagtaatgctaaatataaaataaatgacactctatctttagttgacaaaagcactgagatctcgccacgtaacatgctgagcaacggacaccacgtggtgttttgctg

SEQ ID NO: 54805 - DNA, 836 bp, Arabidopsis thaliana landsberg
aatatcatttttggaggaaagaatataagctaaattaaggtatagactagagaccacattttgtgtgcttttattggaaaacttccatcaaagatgtggaaacataggaacctctgtatgtctctttacatgcagttaaaacggtcctagctataacgttgattcctttaggtttctatttcatggatccgatccaaagataatagatgaaagttttcgaatgtgtttcttttaatttcttttgtaaagacctatatactaaacacttttttgttaaaacattatacaatattgtcaatttcaaaactttaacgaaacaaataattgtgttatctttttggtgtgtgttaccttttcgtataatccacagatggtgcctgccccataaaaacccgtctcccatttttctttctagcttcccacttcttatcgagagaaatctttcactattcttaatatataaactgtttatttaaaagagcatttcatttagagaaatgaaaaaaaaaaaaaaaagagaggcaattctcagaaaacgtaaaagaaaaagtgaaacatgtgatgtgatgatcaggtaggggcgcagaacataacataacgtctcaagacaaaatgttttcggaatattcatttgtccatattccgactccgcgaacatcacatttgcgcttcctactacgatttctaaatctcttgtcgcaacaaacaaaatgcattatgcgaatctatggatggataattccatttgaaagatatgcaccgattggtttgcacgatgttgatcgtctaaacaagcatggcctttcgaaagtagtggtgcaagttatgtgatttat

SEQ ID NO: 54806 - DNA, 415 bp, Arabidopsis thaliana landsberg
tggatggacctccgccgttggtccacctgagacgagcgatccaccgtcggacctgtccgattccgaccacctggagcctagcttcgtgtccaactccgacgaaggacgtcgggaatgaacaggcgctgtagagaagacggttgtgacgggaaggaagagcaaaaggaaagtttccactccaacgcgggagagagaagtgaccagcgtgtagcgaacgtctgaaatccgccacatttagcgtctctttcgcgtccggcaaattttagcgctccatttggcgtgtcttgttggaggcatacaggaggacatggtgcgctaattttagcgtacagaaccctttacagggtgttgttggaggcagtcttacggcgttatgcgtgtgcgtcaccgtggagtatgtgcgtatctttacgta

SEQ ID NO: 54807 - DNA, 388 bp, Arabidopsis thaliana landsberg
tgtcagagagtgacacacccatgctatgctatacacaaattgcgtttatgctacaaacattattctaaaatggacccctgtctatcatgaaaaagatatcttccaagcaactatcaatactatgatatgacgctgaccttgagcatgtctatgggcaaaaagctgggccagatttaaaacgcatcaatcgcgacggacttccatggcgagtttttgatacccgaggccgccttttctgtcttttacctcttttccaatgtactctgtcttcctattaccagtcagttccattaatgcttggtctgtgacatgactactgtggccaagatcttcagagaggagacaggatgcctcatctttgacgtgtgttccgtttaaatctgactgg

SEQ ID NO: 54808 - DNA, 133 bp, Arabidopsis thaliana landsberg
aacataccgccacggacccaccgcaaggggagcacctttgtttaaaaaaagaaaaaatgggaccgcggggcggattcaaacgggagccggcctccccgcacggacgcacgggatcgaaccacatgcacacaga

SEQ ID NO: 54809 - DNA, 292 bp, Arabidopsis thaliana landsberg
gaaaggggtaaaaaacagcaccatgcagccaaatcttcgatgcgcaaagaagaactcaggagacaactacggaaccgaaccaggcatctacatcagtcgctaacatacgaagatgacaagatgctatgagacctagtcgagatgacatctatctgaccgatgcatcagcagcgcaaaggccatgagatgcgtcgagggattccgactcaacctagccatgagcagaagccgcatgagatgctacctcatcaacgcgtcccggacataggtcactcgatgacggacgcagtaa

SEQ ID NO: 54810 - DNA, 1063 bp, Arabidopsis thaliana landsberg
tgttggtggctgatgtatcttatttatctgttctttacatataatagacatatttgaggtcgctcatgaagatggaactattctagcaatgaagttacatagactagggagaacctcctttagggctgtcaaatctaagcgtgactacttgaggcatcgcagtagtttcagctggttgtatctctcccgacttgcagctctcaaggagtttgcttttatgaaggttattgccttcttccactaatgtaacactattcttgtgggtgtatcgtctttttattttatttttggcctaatgtttgtttggcttctgggtgagcaggctttggaagaacatgactttccggttccaaaagctattgactgcaatagacattgtgttatcatgtcccttgtgcaaggttaccccatgtaaggacctaactacatatctacacaaagaaaagtggttatgatttatgatgtttgtcatcatctactgatatgttgtggtcggatattgattttaagctaagataatcgttggatttttgagtttctaagaaagctaaaccatttgcttcactcactcactaagaaacagttacaccctttctgctgtgaatcacatcttttcacatttttcatttatgcagggttcaggtgaagcaattacagaaccctgagacaattttcgagaagatcattggcattgttgtttgtttggctgagcatggtctaattcattgtgacttcaatgaattcaacatcatggtgagatacttagatctatctagttgaattataccttctatttgtaagttactttgctgaaaatatcatgcatttatttgaagctgccttctcatataagttaattagtacttctgtaagcatgctagttttgtcctctgcctacttacaattttcattgacacatcctgtttatgtatgcatgtatgttatagattgatgatgaagagaaaataacgatgattgactttccacaaatggtatctgtttcacaccgaaatgcacaaatgtatgtgacctctcatctctgcaccatgctgcagaaatagag

SEQ ID NO: 54811 - DNA, 387 bp, Arabidopsis thaliana landsberg
tcgactctacccggcgccgcaggtgacagtgacgtcgagcaggccgcagctgtcaatcctccgccaccgcgtcctgatcggcataacacatgcccaccaatcggtctttcacatgatcttcatgtactagtgcgaatagggatcagttacttatcgtagagccgttaggtttgataatgggtcacgtacgagcacctctagactcagtgcatgctcaaactgtatgggtctagatacaagcaatgcggtgcatgatgcacaccactatgaggaaggggttgatattttgatgtggcccccagtgtcgagcggaggctgcgttctggaccgtgaaagaccgtagacgcgcatgggatccgaggcactgggtagctagctgcgtgtgct

SEQ ID NO: 54812 - DNA, 433 bp, Arabidopsis thaliana landsberg
  unsure (1)..(433): unsure at all n locations
tgcgaaagccctagaaaccctaagacttggatgtcgttctttaacttttgtgacgacacggggggatcggggcatgacaaaaatcacagccgaatccgctcattgtccgtgggggcgcggggtggatggaaactcgaatcgttctcgtcgcgcttgctcttgctcttttgatccaactacgacaattcttacgacattgcgttccactctcgtgcgagatctaacccgnnnnnnnnnnnnnnnnnnnncagctcgcttcttttcttagctcgctgatcgggggggatttatgtggatgattcttcaggtcaaaaagatcttagtcattatactgccgtattctaatttngaaaaatgctgatttgggatttgcagggtggacatgcgatttctaattattacattcgtcctggttcggttcatgagaaactac

SEQ ID NO: 54813 - DNA, 545 bp, Arabidopsis thaliana landsberg
attccatcacacaaattttaaaagctgatcttatacataaactaatacttatgttttttaatcaccaggtccagagaatatagttcgagctttattctactaaactcaaaaagtttaattttgatattcctaaaattaaattaatcaaccaacccatacaaaaaaattcattctaaaactatagattaaaaaaaagtaacgacgttgatcgcatcacatgactctctctctcactctttttattctgtctccttctaaataaaaactttccccttcctcttttctcactgagacactgtcttcactcttttttgcttatcaacaaactctgcacaaaacttaacctctctgaaatttctctttaattctctctttcatcgaaagaaacctcaaatttcaaatcttcgcattgtccgccattcttattcttcccccagagaagctttttagggttcttagtttctatctctgccgcttcttctcaagattaaaacttgtctctttttctttaaatccaatcaaagggtagagattttttagttcta

SEQ ID NO: 54814 - DNA, 597 bp, Arabidopsis thaliana landsberg
cccaccacattcctccgccgtcctctctcctcctcttcctccgtcacctccgttgccgacgaaggaatacggatccgtcaccatggatactcctcctacgaagcatacatcaaacaccagctcaacaaaactcagaacccgaagctacgtaaggtatggacaacgcgcgactgggacaggaaagttcgtgtgttctccactttcttccgacgtctcagcgatcgcggtcttctctcaaatcaatcaaaagctctctcgatcggtgctcgggttggacaagaggttgcggcgttgagattgatcggcgtggaagactccgtcggaatagatctggttccgcgaccacctctcgtggtgaaaggtgacttccacgcgcacgcgttcgacgaagagacattcgatttcgaattctcaaacgtgttcgatcacgcgctttacccggagaagttcgttggggagatcgaacggactttaaagcccggaggggtgtgtgtgttacacgtgtcgatatctgggaagacggataagtactcggctagcgatttgcttagtgtgaaccattggtgaaattgttaagagatcaaggttgtggagatg

SEQ ID NO: 54815 - DNA, 799 bp, Arabidopsis thaliana landsberg
gaacaatcacatccatatgcatgtgtatgtatggtttggttatgttgaagatccatgacttagtcggagattaatcacatgtaacacactgaaggtaatcactagacgtacggtaaaatatctttgtcttttgttaagattaataaaaagttgcaaaatgattaagatttggatttgcagtagacagacagactgatattccccaaattataagctgagctgtttgatctctataagaatatcttgtcgaagaatgaagattttatttttagattcatcatatacaaactcacacactgatatgtatgttcttataaccttgacctgattaacaagctatttcacaaggtttccatgcattattaatttttcaaaatggtcctactcctacggtcctctcctaccacatggcgatcttttcacaagattcaaatttacccatccgaaagaaacgtaatcacttttcattgacattaaagaaacaaattaaactagtgtcctttttacttgattaggtacatcatacatggttatataattatatcatatgttatttctactctgtttttttttctcaacatttttgcattgtgaatattttcatgtattcgttaatctagcaccatacaaaagccttcgaaaatttgtaatgcatttagtatcataatagtgttgatagaagaaaaaaataagtatgaaaataatttgtcaaactgagataaactttaatacaacaaggttggtacgccgaaattcctagacaaaacaaagcctacccataatatataattttgattaa

SEQ ID NO: 54816 - DNA, 1709 bp, Arabidopsis thaliana landsberg
tatatatacatatatatatatatatatttttatattttttaaaaaagcctaaaatttctgttgaaaaatacaaagagctagaagaaaaagaaattcccctgttcttccgtaaatatcgttaattcgttatgacagagtttcattctctttgactagatctttatttttttctttacaccgatacaagtcaaaactcttaacaaacaaatatttagatcaacatagaccaaagagtcaaagaaataatgtctgtctccataaagtctccaacttttataacaaattttccgttgaatatgacagtaaataaaccaacggtctagttcttatcatgtctaaaaaccacaagctccttcctcatcttacgctcccctctttacctctccttttattctccttctcattctcctctcaacaactgatcgtataatcattctcacggagacgagtgaccaaaacaaggtctcccgcttcttgcgaagattaaacgaatccatttagattttaaaaaccacacaaaaaaatatgggtcggctcaagttcgcatgtccggttcttgagatcaatttaatctcagctcaagacttagcccctgtctcaagaaacatgaaaacgtattccgtcgcttggatcaacaccgatcctatgagaaaactcaccacgcgtgttgatcaatccaacagagctaaccctatatggaacgagaagtttgtgtttcgtgtcaacgacaagattctctacgttgacgcatcagcgattgtgattgagatctacgcagcggcttgggctaaagatgctcttgttggtactgtgaatgttcttctcagcgatctttttgctccttggtctggttttggtgatggtaacgacggtggtggtgggaataacaacatgaggcttgtgactcttcagattcgtcgtccttcagggaggctacaagggtttttacgtctcggtgttgcacttcttgacggtggtcaacggagtatgcctttatctattgaggttttcgatggaagtcgaaaaggagagaggaatagtgttaaaagagaccaagaggcttcaagaatgatgcatcgccgtacgaatagcgatcaaacggatttaaccacgtctacgaatgattacggtgtgaaaacaggggttgttactggcaatggaggaggaggtggtggtggtggcggtattgctgttgctgcggatagtatggttaatggttcgctttgtagctctgatattggaccatcagcgtctgtggttgcggctgcgattgcgcaagggctttacaatagacagaaaacagcggttaaagcggctaacaaagaggacgcaagttcgatacttgaagggaaaacagagggaattgagcatagagttgaacggtggagagcagagaaaaatggcacggttggagcgggtggagcggctggatcaagcgatgattctagcgggaaaggaggagcgggaaggagaagaaggaggaggagaagaaaggagaaacaacaagggaggagaaacggtggaggagagggtaagaaagggttgttttcatgttttggaaacgtgtttggatgtgagatttcgataacatgtggcggtggaagcggcggagaaggagacagcacaaagaagagatataataacaataaagtagtaaatcttagtgctgtagacgaaacgtttagtcattctgcgacttgagataagag

SEQ ID NO: 54817 - DNA, 784 bp, Arabidopsis thaliana landsberg
tttcttacctggttgaatatctagttggctctagtaaggggttagcagcgtcaggttctggctctgttggaatttcagctgttggggagagcatgttacaattgcttctcccaaacagccaactgaaagcccagcatagagtttagtctttcatcctcaaggcacttagaagtttcaggggccttgagattagcatttgcgaagtaaacttatccagggaagctattcattagtacataaactatataactggtagaagtgtaaccacgtgccactaaaagttttgttttcttctgtcataggcccattagagtcagcatctccgacatatttaatcatgcgacattttgtatagatatcggttattgttttatgctgatgatacactattctaacaatacattcgggatgtaactcataattcacttgcatttgagattagggctatgagggtgggtaactctcagcctgaaccaaattctttgattgctttccgtaacttcagtgaagagccaaaaagccctggaatttgggaaccagatgagggtgattcctcagcctctgcctcagcatccgcatctgcatcagagtcagcatccgcacctcgggacagcctggcctcgttgtaccgtcctccttttcacctgatgttccagggctcttttgaacaggttatctacacagtttcttgtttggctaattgcttgtttgctttcttactctaaacttctctgtatggttttcttgttcaggcaaaaactacttcgtcttcccaggataaatg

SEQ ID NO: 54818 - DNA, 400 bp, Arabidopsis thaliana landsberg
agcttctctcttgcatctccccagtataacttggtcactacatgcacctttgtatttcaacaaaaccaccattagttattgtctttgccaaagagtctttgaacaaaaatgtattgttgattcggataaaaacctctttctgcctcgaaccagtgtcgagcatatcaagacatgcgatgtcggttttgacaccgtatttctccataatctccggttccctaaactctgccaacggtatgagagctgcaagcaccaaattaaaccggattaaaccgacagatcatttcttttcagaatccataccataagaagaaagaaacttacgagaaccggatttgaaccagagggagttacgagattcatcgccagagagtggtagagtgtggatgatgtaaatcgt

SEQ ID NO: 54819 - DNA, 812 bp, Arabidopsis thaliana landsberg
tatcacatgggtatgtctgataagaatttaccaaaatttgtttttaaaaaattgtaatattattttgaagttgtcacatttttttctttttgctttttaaatgggtgatatatcattgatttgaagttgtctatataactatttgggctgataacaattattcgattcaataatcagacccgtcttcgcaggtccacgagagctcccacgagtctcactttgtttttgttttttttttcaattgaataggtgaccgttttttaaatctcatttgttcacatctttataagtaacatatgggatccgagagaaaagacaagtattaatcgcacttaatataaacgaaaatattgaattaagaaaagagaggttgaaaagagtttggtggttgaattagtttctgatttgctatatcactcgatcagtcgattgtcaaactgagagcatgaggaatatttgaagcatgctaatgctacatcctatatattcgattcatgttggatttaattaaataatcgagaaagcagtatacacacaaaaaccaaaacttgtcttcttctcaacctctttcgccattttcttcttgtcgttgtctcaaaaacttacatttcgccattattcagtttaaactctttttacttccaacgttatttcttctagtaccactttaggaacttagcttttctctatttatctttaaaatacgttctaaaccttactttgtttttttttttttttttgctatatatcaagctttcctttttgtgacaaaaaaaaaaaacacttccaaattttaatgcttgaattctaat

SEQ ID NO: 54820 - DNA, 345 bp, Arabidopsis thaliana landsberg
atcgctacgaatgaaacagaactttgggtctccttgttttcatcaaccgagttctcttctgcttattccacaggcgcaaaatacgctctctataggctacaaggcgcctttgacacaatgacacatctgaaggcggcaaagtgggactgaaaggaacagtataaggtcatgccaccattgcaactagctgtccattaggaagtacattagaggaccaagcactgatatgcagaagagaaactataccaatgctgagttgatgacgcatataccgagcgatcatattggaaacggtgggaaacattccgactaaacttccgtgctatcaatatggacatgctgctc

SEQ ID NO: 54821 - DNA, 648 bp, Arabidopsis thaliana landsberg
  unsure (1)..(648): unsure at all n locations
cactctttctcagattatataattagtcaattttattcaatggttacaaaaagaaaaaaaaaaacttgccaatgaaaaaaaggaatgctcttgacctcaagactcatcatggttaacaatgaaattcgccttaacttcgaaattttgacgccgttgaaatgtttataatttacccgcnnnnnnnnnnnnnnnnngtttagcccattaaaggtaatattaggcgtccattaatcataacgaatatcactttctcaatttaacaagtcatgagaaagtgtacacatttgatctatttaatatttattaaccaaaaaggaagcaaatcaattatttcgttacgtgacggtggcattaagcatcttgcattgaatgatccgttatatataatctcaggttttttttgggttgaaatgatgatattaaattttaggttgacatgtacttatctttgtaatcaactaattaaatatttgaactgacatgtctacgttatatcataaataaaccaggtgttttaattaaataccacgattaaccttttaaaataaggaaaatcatattttattcgtcaatcactataatttggaaaacgatgcaatattttacttctttcttatcacatactaattaatattaaaattcattcta

SEQ ID NO: 54822 - DNA, 532 bp, Arabidopsis thaliana landsberg
aatccttttctttgccaccattattgtaagtattgttagataaacccaaaaaaaacagagttcaattggtaggatttatcctttaaattgataaggagcctgcaatggcccctgtgacccccctgctgcaccatagaaaacatgctgcttatattaaaaaccagggctagcctgcggcaatatcttgatactaaaaaacaggaaggaaagcagatcggttttgtacccactatgggtgccctgcatgccgggcaccttcgcctggtccgtaattcgcgccaggccggccttttcaccgtttgcagtattttcgcgaatcccacccagttcaacgacaaaaaggatttctaaaaatatcccaagaccctcgaacccgatatcaggcttctggaagaagccgggtgcgacctgctattcctccccgaagtggaagaactttatcctcatgggcttcaggagctggagacctatcacctgggtaagctggaagaagtttatgaaggcaagtaccgaccgggtcatttccagggcg

SEQ ID NO: 54823 - DNA, 288 bp, Arabidopsis thaliana landsberg
aagtgcttggtcaagcgcagcaatgatatgactggattttttgcttggcagactatggagaatctttttaacaggtttgggcatgtcaacaatggaacctaatgatgctgatattgtggatacttctgaaagtctaccagcgaaatcatcactcttctgcgaatctttgatcttcattctttcgaatgcttccattggaggccgcagcctcgcatctgtaactctctacgcaccaatattactatcttttatatgatgccatacctatatgcaggcctatgaactcca

SEQ ID NO: 54824 - DNA, 626 bp, Arabidopsis thaliana landsberg
aaaaaacgagtataaaattaaaaaaggttaagctttgatgaaggaaggaagagaatgaaggtgtttctcaaagtttgggtcttttccttttctttcttctctcctctttccttttttctctttccttacaggtaactattattcctcagcttacacggttccacatatcccggttttattaaaccgaaatccggttaaataaataactataaatcgtttcaaattttcaaactaatacgttatgttaaacttaaacccaatatcaatcacttattatcaccatacttaaatttcatcaactcatattaattacgtatcataacgattttttaattttccggtttagttcggtattttggaatttggacttataacacgcgtagagttttaaattatttttaaaagttaaaaaaatgtgagaaaattgggattggctacgagtaagaaatgcgtcaccaagcgtgagagctacgcgtgccgttggtgagcggtaaagatcgtttggcacgtgacttccatccatcattatgagtcaaatatactcaaacgtaatccccacgtgacttcattcttttagttttgtctcggtattttgaccttactggtctaaattcctaattcataaa

SEQ ID NO: 54825 - DNA, 468 bp, Arabidopsis thaliana landsberg
atcgaagccttaactgttgacaacccagaaactgctattgtgtctcatgatcatcctcatcctcaacccggcgatacctctgatcttaattatttgcaagagcaagtaggaggaatgcttaagattactccctctgatgttgatgtaagccatcttcctgctcatttttataatgaacatagaaataggaagttgtgcagagaaactaattaagctgactcaaaatctaccctcataattgttgtttgatattggtcttgtattttgcagaatgatgagtcggactactggcttctctcaaatgctgagattagcatgacggatatttggaaaactgactgtatcctttgcatatatgcaatttgtttctctcttatagttaactatatctatctgcataagatataaatacgcaatcgttaactctagcaaaagctggtatcgattgggattatggaatagccgacg

SEQ ID NO: 54826 - DNA, 633 bp, Arabidopsis thaliana landsberg
ttttttcttttacctatccaactgttatgagtataccctgcaaagattaattttcattatccaaaaaatttgactaatgcgaagctagatttttcttgtgacgtactagtatataacaactcctaacaaatatattggttaattcaaaatgtttccgacaaagttattagacttttctagatttgatttttcaattcctccaatagacgattctattcagtattcaccattatatcagatccagctaccatccgactacatttactggttattctcatagaggatgaataaactctctctctttttctcggtcaatgaaaagtcaattttttaaaaattagatcatcacgtcaaacgcaacaaaacatactagaacattgattttgtacgtataagcttcaaatgtgatttcatctagaagcaaggaaggtgttgacgaagagaaagaaagaaattaatgtaatgaaaagtcaaacaaattgatggagcaaatgtcaaagtgggttatgatgtcaccgtagaacatatagtgatgcttgactcttcaaatgatgatgcttattccgtacggttcacatgtactttgttagttttgtctgcacaaaagtcaacgccgatatcgaaaattattaa

SEQ ID NO: 54827 - DNA, 165 bp, Arabidopsis thaliana landsberg
agtatcccctatctaagctaaggagtaattggcaattcctctgtataatttcaagccgcatttgacatacatactttgagagatatgtccatgatagaccgagaggaagcatcaacctgttatccgactttgcgctcggtgattcccctaatgatcgatatgaaa

SEQ ID NO: 54828 - DNA, 756 bp, Arabidopsis thaliana landsberg
gagctatgacagcaaccgcgacaatccacaaatgcactttcgagttgttatcgtcgccttttgttgctctttcgagtgtgttagccaccactggaccacacactttaacataagaagtactcggaaccgatggccactggtacccagtaaagaaggaaccaggatgtttctgccaacaatttccagacccatcagacatggaaacagaagcaagacacaaaacactactaagacaattagctctacaaggcgaactacccgcaaagaaactctccgagttcggatcgttttcataagtaaacaacctcgtatgaaccaaatcaagcatggttgtattgccagagcaatcacttagctccactttccttttacatccctttcttctatcattcacatcaacaaaatcaaagttacgagacggacacgaacaaatcggattagtatcattgtaactacaaatcccaaagtttccacaatatccataaacaagacactgatcaacagcagaccaatgagcattcacaggtccactgtttctactagcagaactgtagattctcaaattcccatcatcatctaacttcaagaacctaaacgtattgctatcaccgtaatcgccactataaacgatttcagctcctccaagaagatttgattcgaagatcgaaacaactccattagtctgtaaacttaatctaggagacgatagattcgagctaaacgaagaattaagtccatggttccagtaaatcgcgc

SEQ ID NO: 54829 - DNA, 186 bp, Arabidopsis thaliana landsberg
ccaaccagactaatgtgagaagaagccccggaaaacagaacaaggaacaatttgattccccccaaactgggaagccacccgagggggaaagaaacgctacacaaagtcaaatccaacaagcagagacaccacaaagcaacgagcaaaggagacacaagcccaacaaagaagaatcgggaactagca

SEQ ID NO: 54830 - DNA, 435 bp, Arabidopsis thaliana landsberg
acaaattcaatagaacttctaatgtataaaggcttattaggattgcatcttcttcggccataactatcaatatatcaaaaaggacaaaacatggattcattgtcgtactttcccatatgtgagcagcacataacatcagcgacgagtagacatctggaaagtaccatgacaccatgactggacgacgattatcgcgccactcctatggccggtttaatcgatctacgcccctgtacagatcacttccctcttgtacagaatcgtgatccttctgctgaccgattgtacacgacagacttcataaccatatactaatgtagaagttgatcataaatagggctgatactaatgagccagccagatgccttagatgtatccagtctgcatgtacctgcatctggatactgtggtctgaaggtccgacgctgctagtga

SEQ ID NO: 54831 - DNA, 777 bp, Arabidopsis thaliana landsberg
ccaaaaagattgtgtgggatcttttgaaggaagaatcaagtttctctctcctgagtgactttctctctcctgaacgactttctctcttctgaacgacttttttggcaatttgtccttctctaacctaattgcctccggcggccggcatctcgccggttgacatgattttttccaatgtcaaagaaaaagaagaagctgccttgtccttcttcttgttctccctctctctaagttctctcgagttttggcctcggccaatagctcgtctctcctccctggttcgagtgttcttatcggctcctccttggttgtctcgccgtcgtccactgagagtgacacggctcattcagttgagatgatggggaatcttccatcgtctcctgtcacccagatcgcgctttttcaatctggatctggctccactcctcctccatctgaagcatcggttttgtaggttgagacgacagggaatcttcgactcctgaatctcagattaaccttattcagcctagcgctgacttaaatcctctcatacatgctatttcggttgaggcctgagctcgtcctgtaagcttcatgtctctaagtaggttccttccccggatttgcaccaaagtgtatgagatctcttccaataaagtcatagtgattgatttggataatgctctggcgactagaatcgatcgtcttccgctctctgccccctttccaaccaaagtcctgtcttataaaaaaaaaataagcctctaaggggaagatcctgggctttgacattct

SEQ ID NO: 54832 - DNA, 1097 bp, Arabidopsis thaliana landsberg
tctaacctgtggatagcaaatgttgaagtttctattatgatatctgtggatcttgaaattttctaattcggtgtatgtaggggtttatgaggttattaccaaaatttagcaatctcaattccttctgggaaagaaccttcactgcagcaagaacaatttttttaagaaaggctgatgcaaaagcaaaaaagagtttatgttctcaaaaaatcatcacctattgtctcgaaggtccaagacgaatgcgtttacattgttgcctctcaaggtttcaatagcttcccttaccgcacctacaaaaaaagtgttaagactttgagagataataaactagagagtagataaatttgtaagaaggaatcagtcatgccaaagaatacatactagaagcattttgattgaatgttgttagcttgatatagccaatcttaggggagttactcccagaaccaggaagttcacataatcttgacttcactggattcacagaaacccgctctcgcctgaaataacaacaattgtagttaccaaatgaacgtgacaacgaagataaatgtaggcatgagagaattacgtcaaagttaagagtctcgtttcaggtccactgcgaatcgctagctccactgcacttccttcaggtcccctgcatttcaaccaaagcattatcatcatttcttacttcagaaccattaactcgtcacacttagatttttcaaagttaaggaatgatgaaaaatggaaatgtaactcactgcaacatctgtgcagcatcgtatatggtaagagtttctgtggttgtattatcaattccttgaataacatcgccaggtaatatccccgccctatttgcaggacctcctggagcagctgatataacaacaagcccagctggtggtccatctgatgcagtggggtaacctatcgacagcccaacacccgtaaccgccccttgagtccccgactgccttcaaccaaaccatttaattactagatcttacatacagtctatttgctaaattcagaactgtatatttttaggaaatcttacccgcaaactcttgaactttttcggctccaagaatcgagtaaaaggatca

SEQ ID NO: 54833 - DNA, 889 bp, Arabidopsis thaliana landsberg
tgtttttctttattatgtgcaaaaggcattattaaggactcttataatcgaggagttcaatgataacggctaaactataaatcaccaccgtgttcagttacagagcaaaagccgattacaacgtagtcttgatgagtaataaacaaacctacaataacaacactaattaagtgcccttgacgtgaactctgaaacctgataatataatgagtatattactctaagcatgtttaatgagtaagcttcagtatttatactaaaatacatcaggttgtaaaccctctgactctctaagagtttcacaactacatcaggttcaaaatacttattggaccctatagtcgatcatctccttccttgaattcaataccaagaaattaactaaacgggtactatatctactttttaaccaaccttttattattagagttacaaaaatgctggtttctttgacctgcaagagcagatactagtttctttaagaaacaaaattttgaatgagatggtggagactacatacaccaacaccaaaaggaagaagaacttgcgcatgtagaagtcaaatttaatcggataatggataggcccattagtttatatgggcttaagaaaccaggctctgatccgttattgactaagtcaatgacgttgcctttatctacaaaatcgtaacaaacacgttagacacaagctataatgatttatctctatgatcatgagtttgccggtctattaaattggatattttcatcaatagtttcaggaaaacagcgcaactttatgagaaaaaccatgcatacgtcataactaatgagaactgagaaagtaaatcgtctaacatttgtttgttgccacataattactaccaatttatgtaaaattattttca

SEQ ID NO: 54834 - DNA, 531 bp, Arabidopsis thaliana landsberg
tgggcctaggaacattcgtccgcctgcaacgaggagtcggggtcaggcatggaggcgttttcagcttatgggttctccggcacaccgaccggcgagggcagaataagcttcttgaggcgcccaggatacttgatggcgtaggaaacagcaagatagccgcccagggaatgtccgagcagggtgaactgctccagcttcctggcctttcgccattcctccagcgcgttgatgaaccagctctcagcttcaagaacctggtcctacttcttcttggcgtgaatcttgaacggcggccgagtcgagttacccatgctcagcatgtacagcgcatacagcttcagtcccctcatacgagaaaggggctcaaagttcttgtagaagaagcccacaccggcgccgtatccgtggatcatgacaagagcatgttcagttttcttctcgacccgttcaaccgtgacttcgttgagggcgcgattttttgccgacagatagaccattgtcccgctccatactcgggtgccatacggatcg

SEQ ID NO: 54835 - DNA, 585 bp, Arabidopsis thaliana landsberg
  unsure (1)..(585): unsure at all n locations
taaaaagaattagaaggacttttgttggttcgctagctgctggtctttttgtttcttgtggtggtgggtcgatacaatgatcgatatatatatcgatctggttccgattccttccaatgaacctggtcaaaaatgtggaccggcgaccggccgggcagagtcattgaccttgaccataaaataatgcgccagagaggtgcgttgccatccgttgcgtgcgtctcaaccagacatgacacgagacaacacgagagtaaatgactgaatgaattcgtgctgcatctaggcaggcaggcgttgcatgcattgctattcagtccagcaagcccatgccatgaaggcatgaatacatgatgcatcacatgttcacataataaataaagcgtgtagctacgacatgcacactggacgtacgtacgtacgtgtgtctagagagacagtgcatgaatccaatgatgcgatgcgcggccttgatctcgatcaaagcagctcgtcgctatagctcgatcgtagtacgtagtggatgcgtgcctacctctatagcgctacnnnnnnnnnnnnnnnnnnnnnnnnnnnnctgctggg

SEQ ID NO: 54836 - DNA, 591 bp, Arabidopsis thaliana landsberg
  unsure (1)..(591): unsure at all n locations
tcttcataggaaatgggttataaaaattaaaagtgaaaacaatttttttttatttttttacctaagtgatgatttgttatcaataccttttaaaatcatcatattgtagcaggctagcagccagtgctttctatataaagaatcaaatatactctgtgactaattacatcaaacacatcaagcaaagtaacaaattccataaacacaattagctaaaagaaagaaacaatcatgaaggccaccatatccatcactaccatctttctcgtggtcgctttggccgcaccctccctagctcgtcctgataaccatgtcgaggactctgtaggccgtctacttcgtcctggtcaaacgtaccacatcgtacctgcgaatcccgagacaggaggaggtattttctcgaacagtgaagaaatctgtcctcttgacatcttccagtcaaacaatccgcttgacttgggcctacccatcaaatttaagtccgagttatggtttgttaaggaaatgaatagtatcaccatcgagtttgaggctcagaactggtttttgtgtctaaagatcaaaggggntgagagttgtgactctgaagaa

SEQ ID NO: 54837 - DNA, 399 bp, Arabidopsis thaliana landsberg
aaaaagaagacgccctttgttctttctaaagacggagatgcctgtccaatcaacaacttacccattcttattgtacaacgaaccctctcggattaacccaccttttgctgtagtattaccaatataagcctacaaagcttgaattttaggaattattatccaagcttgtgatgaactacgattttcaaccagcccagcactaactcttcgatatatttcttgtcgtaagtatgcctgtacccaatgttgacgtgatggaccaattatttctttgggatgagttgcagaaccattccacagagcctcagtaccatcttaatgctgcaccgatgacatcagccatactactggtatggacggttacaatattgcccatacctaattctatgtatagaccat

SEQ ID NO: 54838 - DNA, 564 bp, Arabidopsis thaliana landsberg
tgacttggctaatcacttattacagcccaaagaagattaatacggccctattatggcccaaaccctaatacacgaaagacccactaatactccatacctgtgcctaagcaccgccaccttgggtcatcacatccctatgatgcccatgacatctccccctcccttgaggaccagctcgtcctcgagctgccatagacttacctgacacaacttaaggttaagctttttagatctcggcttacctttattatttaagacgaaaatacaaaataattgtggaactaaaatataaatgtgaactgcagctatgtcctcctggatcccaaggaaagagttgaactgcggacttcacgttgaatgaaaggtgaaggaggaaccaacccgttcttatgttgggtctgtccagcaccaaggcagttgctcgaatgaaggagacgaccctctttggccgtgtaggggggctgcatcccagatctcgacttctgcagggggtcaaaaagtatagacgagacctggtggttgggcgcgtagctgcgagttggtgcacgatgactgatcacaagt

SEQ ID NO: 54839 - DNA, 496 bp, Arabidopsis thaliana landsberg
atatgaccataatgtcttgctcttggctggcaattaattaggcaaagacgacgacatgctagataatgccactaaccacacaaagaaatgaagaatatagcatcaaacggctagaatgccccccacacaacttcacaagacaagcactgtgattctctagattacgggtacaggccgagggtatgcacacgggtcatgcttatattggtctaaacccatttccgactgggtcaaagaagatggccggactaatgctgcatgaccactgaccaagggcagacttagcataagccacagggattcaaatgcatcctagttttttttcctggaagaggaaagctatcaagtgatatacaatgcccaggagcagggtcaaaagcgacgattgaactaaagactatcctggtgtagtagactcagaaggcgtgggatccagatgagcactcgcagatgtctatttaaaaaaagtttgctaccttcttaggcccgtgtttag

SEQ ID NO: 54840 - DNA, 350 bp, Arabidopsis thaliana landsberg
aaagggtctttttaaacccgaactgactcaaaagcctcaaaaatttcactgttccttggttattgaccggtttagaatcatggtttcggttttgaatcatatttgctttcttggacatgagaaagtaactgggcttcatcattgttttagctcattgggcccatattacaactcgagctaacgctgtcaagttaaatgctttttcactttctagagcattctcttttaaacacttcttttaaccaagagacggttcctacttctctaatatttttattttctagttttttggccagcagcaaaatattattttaatttagtgtcaagataattaaattatcattgtcttt

SEQ ID NO: 54841 - DNA, 608 bp, Arabidopsis thaliana landsberg
ccaccggttcgaccgtttctttgtccagccgcgtgacacctgaaccagaaaagtttaatagccattttaataacagagccgttaattacacgtgacttaaaaagccgttatccttaacagcgttaacatctcggtcctgtgaaaacactttttatatgtccccacgacatttatcttttcctaagcatcgctctagttaaggaagcagcaggtttggatccgaaccaaccaacggatcagatcagaaacaaaatattcaacggctcagatttattctaattttcctccttttattgttggttttttcattcgacttcgagatctttcttctcagaggtgtaacgaaaacgctagaacaataactttgatcgttcttcttcttctcttgaatcggaaacaatggcggatgaacataagcatgaagaatcttcacctaatttggatccagcagtggaggttgtagagagggaatcgctgatggagaagttatcggagaagatccatcacaaaggtgattcgtcgtcttcatcatcatcagatgacgaaaacgagaagaagtcttcgtcattccgcttcaaagtctttgaaatcgaaggttatcgtttgtc

SEQ ID NO: 54842 - DNA, 763 bp, Arabidopsis thaliana landsberg
ttttctcactctctacttgtgtttatgtttataaggctgtggtaatttattgaaaatatatctgtttcttgttaggttaaagtgcttgattactcagaaccagggcttcagctttatgggttctatagaactcctgctctggattgttttgtcaactggtctgaatcccgagtgttatctatctcacatgaatcttacaaggtagctttaagattctcagtactgttttctttaaaatgtatatatggctggtttttgaacttcatgagaacctttattgtattgattagaagtgttgtctttgtatacttcacattgatattttgaaatcaaagattcaatctttaattagtacctatgtttagtcaagaatttattgtagctttgattgtcattgaattctcttttagacaatttattgaactgattcatttctctcagggatggccatattatctcaacagagggtcattgttgaatattacatataccgttaaaccacaaggttctgcggttcagcttgtggtcgatgaaggttagtaagtattgtagtgttttcattttctatgtctgcctgttggtttgatgttgtgtcactgaggctgtgatagcgttaaaatgatgagcacaacgaaaaacctaaaagattgacaataacgtatctaaacccatttcccgcgttgttttctcgcaatcgagacttcattcgtataaagtatctactgaaacgtagagcaaaccctaactagaaatgggaaataac

SEQ ID NO: 54843 - DNA, 320 bp, Arabidopsis thaliana landsberg
acttggttggatgggctatataggctccatataagcgattcgcttgatgtctgatacatttgtcggttgactgcaaaacctatgtacctcgaaggacctaagagactatgatccagcactttggatcgggtcctctgtgtcagttgctggatagccatcctttgggaccagactcgagtcccgctgacaagcagcgtttactgttcacaaactagatctgggaatcctctatgattgtattgctcgcgagcaaagtgagcgagtttaactgcctggaggagaccacacttgattagagggatcagctgcatgaacgtgat

SEQ ID NO: 54844 - DNA, 502 bp, Arabidopsis thaliana landsberg
ttggacaaggaaaaaatgaaagaaaaatagtaaaaaacaattatatatagaactcacactgtcaacaacagtaatacaaataagtagaatatatataatggtaaagtttctgttaatcatatttaaggcactaatcagtgggttctatatttgacatattcagagctagttctaagtcagagtcaatcgaagacgtacataacagaattctgatgacggtactaccttaataaacaaaaatgacgtgaaaacgaaggtttttttctctgagtcaatgatgaaaatttgaatatggtgataccaaattgatataaaaaggcatgctcaatcactaaggctaataccaaacaatcagagctccaaaaactaattttttacttgtgtattaagtaataatttctttatatttgttcacccttaatcttagccagcaaaagagatagcaaaatggaaaacgcatcgactgtgagattttctagctgtcgaggagttcagtttgaga

SEQ ID NO: 54845 - DNA, 580 bp, Arabidopsis thaliana landsberg
ccctatcccagcaacagtaataggggagggggcgcgtgggggcatgcgttgaagacagtctaaagagagacggcagccccctagtggcgacactcaggcttgggcacagggcaagtgaacgcaacggacaagttgaacccatgcccaagttccttcatcgccgatcttttaccctccctcaattatccacacaaccaacgagcacaggtattaccctaagcacgaatcaccgcgcaaggatcaccggccgtgagtggggtgaatctaatcttcttcagttactgttcttgcctgaacgcatgtttgaaactgcctaacagaccaagtttgggagcaatttactccaaaattcaaacagcaccaagcccaactctatatgagaggtttgttcactaatataagggctacaactttgtcataaggatcatggtccttagctctttggattaaccacaaagcagcccaaagttaggtaaatgtcctgggattccattcagcatcacttccagtctgacagccacattttggtggtgttttcactaagtccatatggtctaggctaggacttaattagttgatc

SEQ ID NO: 54846 - DNA, 168 bp, Arabidopsis thaliana landsberg
  unsure (1)..(168): unsure at all n locations
taattatttgattaattttggacgcgccattatagcttattctgtaatcataagatcacaaactttagcagagtttttcttggtgctcagctttccaaagaaccatcgaccagatcctccaccgttctcttcgattccaccagcggttgtggccgcggttgccgttna

SEQ ID NO: 54847 - DNA, 580 bp, Arabidopsis thaliana landsberg
  unsure (1)..(580): unsure at all n locations
attgatgttgttctttaataaaacacagatatgttgataactacaaaaggaaatttgcagagcaggtagaagctaaatatcaatttgatctctttctttaagtggatgatactttcttcaaaggatgatgatatgtaccaattactatttttgtgtatcaggagtttaatgctattaaaagaagatgtaaagggatgcaaggacagaaatgctcatgtatcgttgcggtaaatatatactgtttgcactttgnnnnnnnnnnnnnnnnnnnnnnnnnnnnnnnnnntattttctttgagagtttgtgtatgtcaagcttttgttgttgtgtttattaggtaaaaaaggaagagaagcatattaaacgttcagtaatcaaaagtgtggttgggacgcttgatttgagtattcggtattttttgcagggagagacctttcctggggtatatatttctttcgttaatttcttgtagtgggtgtgtgtacaaaagcctcctaataagtttacattatgagcacggaaaggtgaagtctcaattgttctgcagcataaaccaggaaggantcaataggtatggtt

SEQ ID NO: 54848 - DNA, 525 bp, Arabidopsis thaliana landsberg
  unsure (1)..(525): unsure at all n locations
gagaaggatcaggtggccgaaggacgtggctgcgcgctgggtgaccatcgggtggatgtgtcaaggatcccggtggacgatgacggggtgataggtcagggcctcggcgcgagacgatgtccgggtaccgcgtcgaccacggcgctggtacgtctagatggggtcggtgtagcgagataacagagcggtgtgggatggtgcagaaggcactggtgccgcacagggctatgcggaagacatgggggtcgtgcgaggtgacagaggggacaccgaggccgcacatggttgtgcggtggagggcggtgcagagggcgccgaggctgcacatggcagtgcgggggtgcatggcgcaggcagggccacacgaggcgactcagggagcgtcagggccgcacgtggctgtgcgggggtgggcgacgtaggcagggccgcgcgaggcgacttcagggagccccggggctgcancgtggttgtgcgggggagggcgtcgcaggcagggtcgtgcgaggcgacgaagtggacgaa

SEQ ID NO: 54849 - DNA, 430 bp, Arabidopsis thaliana landsberg
attatgccctgcaacttgttcacttagtgacccatttagacacaggaggaatatggacagcttcgtccttaagaagcggggttcacggcaactctttcttcccttcataagtaccctgaggccccaagaaactaggctggtacgaagaatacaaggacctaggccacatcctgtgcgtaatcacaacattgggcagggtctctgatatcctctgcaagacaaacaaaaaaacaacgacacgattcagaattgctcacaagtgcacgatcagacgcaattcaggaccatcccgcacacaatagaaacttgtttagtaacacacgtaaaaagggatgtatgttcagtcttccatagacaacaccactggtgtagccagggtgaccagccattgcaccatgaaccgtgctcagcgcaagaagtggacagtaaa

SEQ ID NO: 54850 - DNA, 840 bp, Arabidopsis thaliana landsberg
aactatttatcttgggggtttttgtttttcgttttttacactttaatgcatttctcaactttttgaaaatcaaattactacccaaaagttaccaaatttattttcaggaattcaaaagttaccaactaaaatccaaaactatagagattagagaaaagaacaaatgtagaatttggatctaattttctaattatcaataatattttaagtaaaaaaatatttgattagtcagttataaaataaaaaatttgataagtcggattatatgcttttgacaataagagaaagacaaagatattatcagataacaagaaaataaataaaatatactctaaacatattcagtttgaccccaaaaaaaaactctatacatgatcgtaacagagtattcgcgtgaatttagatgtagtttctctacccttttttcaggtatcctatgaaaaaatcaatagtacctataaaagcttacgttgttgtaatttatcctcttttcgtaaattttaatttgctaccatccaacatgtctcagcttttacccaaagtttacaaaaaaaatgtctctgtaaaggattttgattattcccataactagaaacaattaaatcaaatttatcaaaaatatcaaagctctctgagacatggaaagaaatagtgtaacagatggccaagaggactttagcttaaagaagcacaatcatttcaaaaagcaaatcatttgtcactttcttcttcttcacctatccatccacaaaaacactttccttttcctctcatcaagaaactccctaatccgacgtcgttcgttttaattcagtgacacaatcttccacatcttcaaac

SEQ ID NO: 54851 - DNA, 594 bp, Arabidopsis thaliana landsberg
  unsure (1)..(594): unsure at all n locations
gaaagtacgcaaagagtagagaacgtttcagtttacttatgtatgtaatgcatagtttgaatgaccagaaataatatgagtaatatgaaacctcgagcgatccagaactaacccgagcggtctgaggtaatataactgatctagaaataatgatgccataaaaaaagaattatccagaaattaatatgaatgcttcaaaataaagtgactagtctagagttgatcccggtgatccaaaaattatctgagatccagaagtaatatagataattagagttatccatgaataacccaattgatccaataactcggatatttaaaaaataatctagtagattcatatcatttaaatttacgtggacacaatcctatgctgggcgaaggttggttgaggtcttcgcgccttggagttcgtcggagtagttctcgttgaggtgaggtggggcgagcctgccttcnnnnnnnnnnnnnnnnnnnnnnatctcttcttggatggatccatgatgcggtgtaggcaccttctcgatctgcgatacaggagagggatcaaagtggaaaactccctgcgttgaaaatatcggggtgtgaagagat

SEQ ID NO: 54852 - DNA, 573 bp, Arabidopsis thaliana landsberg
tcggttcagcaggtatactgctgttgtaacagcctcgccccagaacatgcccgacaaccccttcgccttgagcatgcaccgagcagtgccaaccactgactggtttcgtcgctcgacgacgccattttgttggggcgagtagggcgccgtgcgtcatcggcggatgcgagtatcagcgcagtactgctcgaagtcgcccgccagaaactccccaccgcggtctgtgcggacggcacgtacccgcttgcctgtcttccgctccgcctcggcttggatacgcttgatcgccgcggccgcgccataccttgctaggaagcagtgcgatccacatatagcgtgagtagtcatcgacgatgagaagaaaataccggttcccactcggcgtcggcggcgagattggaccacagaggtccccgtgcagcagctgaagcacctccgtggagcgcgacagggcgtgcttgggaaacggcgagcgctacgtttcctgccaggcagcgtcgcacactgctccactggtcgagtagaggcatgctcgaacaagcctctccggccatcttccttacgcagtgaagt

SEQ ID NO: 54853 - DNA, 284 bp, Arabidopsis thaliana landsberg
taaccgaactgaagatgatgaagacaattgaataccgtggtgactgacaacttaacaatcatgaggaaaagcacccagaatgtcagcacaacaacctttcgtgcgggccaaatttaggaggaaaaccaatgccacagagctcttaaatcggcgagactaaggagttgcagacaccagactacactgagcaacagagccgggtgaggagggcgccctatatgcatatgccaggaggcacttataagcacgtgctgatgtatgacaaaaattctcataatatattc

SEQ ID NO: 54854 - DNA, 479 bp, Arabidopsis thaliana landsberg
tgttaagtgttaaccataagctgacaaaagaggctacagttgaactttgcacatatgggtgaaaaagggaacgaagatatttatgttgtcaatgttcatggcccacggatatggagcagagaggactcttcgtgtttggttgcagagtgcttgcaccatcgaaaccataaaccggaatgaacctaaatcatgttttgagaggagggctaaaggaattacatcacccatcagtacaatggcatggattcattgcgggtgacgtcaataatgctaacaacccatcttcaatggctgtagaattcatggggatgtaaagaagcattcaccaatgttgtttatgagttaagcaacaagaacatttaacctgtttaacctgagtgatttgtcttgttcgataaaggctcccaatgctaaaacttttaactgcaggactctgttgtttaaccgtagaggtttaagtatttgtacttaaccataaa

SEQ ID NO: 54855 - DNA, 529 bp, Arabidopsis thaliana landsberg
gtataacgaacactagtgtgtctactcgtttcgaagagctgtgtcgtgaaatcacgcagatgaatgatgaatttcagatttctcgtgagggagaacgcgcaacttaatcatccaattgggcgaccttattttgatgccattgaagaagtcaggatgaagctaaatgataagagaatgaagttgcaagagctctatgagaagaagaaagaagttatgaaggagaagaaggaaaccccacagtgataggttacttttacttttccagtgaagctccttatggataaataactaattgagatgttgctatgcatttaaactctgatgaggagtgatagacaagttaattatattacttttttttgaattggttaagtctagtgagactttcttgtaagtaaataattgggaaactcttatgagtttttatataatcaaatagacatggttgtttcaatgagggcctttattttcttcctcctcttttatatgagtcacaacctctaaagaggatttttttttgggacaaaac

SEQ ID NO: 54856 - DNA, 996 bp, Arabidopsis thaliana landsberg
gcacaggaaacgaaaccgtgacaacagtactatgtctacatcacgaaagctcgttgaagatattaatacgacaagcaaccaatgcaaagaatttggagtttcctctaaatgttgagccttttatatttccttgttcaattctcaattccaagaagaccaagagagtaactattgatatgcagcttttcgatcttgtggaactaaagagattcataactccgttgaatgataggtagccaaattaccctcactaacattgtcaatttactaaaaggattcagaaatatcaaatttgcaaagcaaggaaacatacagattcgtggaggggcctctgttgcagcagattctaacgcatagagaagcaattatcccaacgacgacgaagattagggttgttataaggaaacccatgtttgatcctgatctgtgagagaattatctgcgacgataagtattacacgtgatttagggtacaataacctcaacgcgatcgaacaatacgggagaggagaaagtgtctgagatctcacagatttggaaatgaaagctcctctttggaggaggacgatgatgttcttcgtgcgaatccggtgaatctgaattttggatccgtgtgagtttttgagattttcgtgagggcataataggcaaaaaccgaacttttcttcaaatatgaaagtccaaacaccctaattcagatttgtcttaataatcacgttttaaagttcaaaacaagctttctatatttcatatctattgaatatacatacactatgcgatgattttgtaataaaattgtaaaatgttcaaattatccttctaatcaatgatacacgagaaatacttcacatttgcaaacattttttttgctaaaacatcttacgacaaacagagggaacagtgtttttgttcttcttcggattttctatttctttaatcatagtaatgttacaaataacatatcatttgagtcatcgtaatgttataaaagacact

SEQ ID NO: 54857 - DNA, 626 bp, Arabidopsis thaliana landsberg
actaacgccacgaaaatggcgcatggccatcagacagctctcagaaacgctcatcaaccagatcgccgccgtgcgaagtcatcgaacgcccggcgagtgcggcgaaagagctgatcgaaaacgccctggacgcgggcgcgacgcgcatcgagatcgccacatcgggcggcggcaagggtctactgcgcgtcagcgacaacggctcgggcatggatgccgccgatctcgagcttgcggtaaaacgtcactgcacctcgaaaatttcagaaacgctcgacgatatccgcacgctcggttttcgcggcgaggccttgccctcgatcggttcggtcgccaagctcagcatttcgagccgccgcaaggatagcgccggcggcagcgagatcgccgtctccggcggcaagttcctgcatctgaggccatcggccctgaaccccggaacgatcgtcgaggtgcgcgacctgttcttcgccaccccggcgcggctgaaattcctgaagaccgagaaggcggaagcggcggcaatcaccgaaatcgtcaagcgcatggcgatcgcctttccgggcgtgcgcttcgtgctctccggcaccgaccgcagcacgctggaatttccggcgaccggcgac

SEQ ID NO: 54858 - DNA, 1061 bp, Arabidopsis thaliana landsberg
taattatgtagtttctctcaaaattttgttaatggtatttttatttgatacaaagataaaataaaaatcaaactcaaatagaattattattattttttgttgctagaaaagacaaaacaaaaactatttgacatgttatgcaatttatacaagttatgaaatgttattttttgtcggtcaaatttttattaatttagcatgttgaccccaaaaaaactctttgacatcctatagcaatgtcaaactaaaataaaattgcataactttcagaagtatattattttggcttaaaacattaaacaggaataaaatttgataaaatatgtctatgggccataaaactattataaaagataattgcgttgatttaaacacttgggccgaattagtgaaagcccatacgatgcatatgccaaattggcgccaatatttcccgcctaatcgacgagagaacccaataaacgagtgtattgtgccctgattctatcgccggaaacaatacacagatagagcgagagaaatggcgggagaaaattccgataacgagccgtcttcaccagcttcaccttcttccgctggattcaacacagatcagttaccaatcagtacaagccaaaactccgaaaatttctccgatgaagaagaagcagctgtagatacccaagtcattagagatgagcctgacgaagcggaggatgaagaagaagaagaaggagaagatctcttcaatgatacttttatgaacgattatcggaagatggatgagaatgatcagtatgagtctaatggaatagatgattccgtcgatgatgaaagagatttaggtcaggctatgcttgaccgtcgtgctgctgacgctgatcttgatgctcgtgaaaatcgacttgcgaatcgcaagcttcctcatcttcttcacgataacggtaattattaaatccctaattggaatctggcgaaattggaaaccctaaatgttcactgattttgggatttgtggttagatgtagttttatctttatgttatgtgtattgaagcatggctgtttgttatagattcagat

SEQ ID NO: 54859 - DNA, 536 bp, Arabidopsis thaliana landsberg
gtccaggccggtatcagatgccatcaatgcggagggtgtcttaacatattcgaccgacataacacgcagttaatcggcaaatccggatgtgaacatcagattgacgtgtactgggaatatcgtgtcgtatgctatccgaaggacttcttcaagcgtaatcgactgccggaataaggcagtccgccaactccatagatattggcctgcctgcgtcagttgcagactgcggtcagtctttcgccacgcgcggacctgatgccgattctccagcttcgagatcgcgcagctaatcgccgactggctgagaaccatgtactccgtcacgggggttacgctatcagcccggtgcgatcgctcccgatggaagccgagcatggtcactatcgggctccaataagatcagggcctgacagttgccaaaactggctttaaacggaaattggagcgtatggatagtacggggaattattgcattggcgaacggcttggtcaccaaccggcagcgccgacgagctggggtggaccagcccggatag

SEQ ID NO: 54860 - DNA, 595 bp, Arabidopsis thaliana landsberg
gggacgaactgactgtccatgtcaacgtgctccctgcacacactgcgaccggacgaaagcttccggttcactgcatcgtgcacgcgccaccatcgagaaagcaacttgcacgcgaccgggcgaaccttcggcagatagtttctgccgaacggcttcagcccgagcggcgatggaccggtgtcggaccgctaccgacagcgtggaacggacaggcgtgtcggaacttgctggaaatgcaccacgttcaagcacagaacggagctattcatgtcgccagcacccacaaccgcctcgctttggatggatgtcacgctgccggaatttccggcactcgcggaggacatcgacgtcgacgtgctcgtggtcggcgccggactcacgggcatcacaaccgcgtatttactggttcaagaaggcgtccgggtggcgttgatcgaccgagaaaaggttgcaagcgccgacagcgctcgaacgaccgcgcatctgacctacgtcaccgacgaacggttacatcatttggcaagcaaatttggcacggacgccgcgcgtaaattttgggaagccggcgcggtcgcaatcgacaccatcgagcgca

SEQ ID NO: 54861 - DNA, 1011 bp, Arabidopsis thaliana landsberg
cttacagcatcagacctgtgaatagcaaaactaatgagtcaatgacttacatcactggttacaccatcatgaatcaaagcaaaacatattcaagcattcatgcaaaaaaagcaagtagatttttctgaaaggttctattattaaatcaagaataagttattaggtacagatgagagcatccgtgacatatttgatagttgtttttttcaaacggagaggtcactgaaaagcgtttatagctttctctgtgctgtatgtatctgttagcctaactttgaacacacacagtatgagcttgccttgcactgagatattgctagaatagattaatagtattctaaggaacaatgaatcagacatattgactaagccacaaacactggaagacaaatgatacagagacgtagcgtataactgtgggtgtcattacctttgcgtagactcttcacggcctttcaggctagagctctctgttaagaaaacaaccacaagtatattataattagaatatacagacataactagagataatgtaaagaacacgcatgaggagagaactgtatattatttctggcaatacttggtgccaaacctaaaagcatcaaatcgtgttgataaacagataacatccctaaacatagacatgattgcttaatatgattgaagatttgattattcaaatcaagaattgccataagtttaatatttcaggatatcaggatatagagagatggaaaacgtaattactttttttctgagtcggctttgaaggcgtatctccaatctccttccttctgctgagcacttgattcctcatctttgcatcaaatttagtctcatcttcaccatcatcgtgatcatcactatttccaactgtatcagatacagaaaagctcttatctttttgagccgcttctttcttagcattcagagcttctcgcacagatagtacctccttggactcagatgcgtttctgaatataaaaatacatcagaaagtcaagattgctt

SEQ ID NO: 54862 - DNA, 964 bp, Arabidopsis thaliana landsberg
ttggttgtgattgtaattttaatatgtccatctcacagatatctgagatacgtgaacgccaatatgaaaagatgggaataggaagcagttatcttttcaggcttgacgatggctatgtggttagtcacttgtgcaatacatttaactcttatcttgtttatgtcaatgagtgaatgttctgaatcacttgttgcttttcatgactctagcttgatgccacaaagcgaggtggcatagcgaggtttatcaaccattcatgtgaggtaattatatgcatagttttgtatcattggttagtttgttcgtggattttgggtcttatagaagatattgtgcttctgcagccgaactgttacaccaagattataagcgtagaaggtaagaaaaagatattcatttatgctaagcggcatatagacgccggtgaagaaataagttacaactacaagttcccattggaggacgacaaaatcccctgtaactgtggagcgccaaagtaagttgcattagtttcatatttcgttttacgatttcttggttttgttacttcttatatctcacactgttcttcacatgtatcttgagtgagatgatttgtttaaaatgaaaattgttggatatgttagtataatagccttggtgtctctatttgatgtatcttttgctttacttacttttagtgtgtattgcttttgtgagcaggtgccgtggatcgctaaactaaaaagaaggacgtggttttcaagacgaaactgaatcgggtgtgtcttatccacggttttcagagtttaccgggagagaaggatgatgaatctctcttttgcaaatgcatctcctgcagcagatgagtctcctctctttcaattgagaactgtaactaatttttgtcccacatactaacacttagaaatagttattgtccttttaacacatatttttcttttcctttgtgttgttgttggcg

SEQ ID NO: 54863 - DNA, 989 bp, Arabidopsis thaliana landsberg
ttgtcactgatttgaaacgcaacttgtctgcggaagcttgcccttttgtgttgtttggtggatcatatggtggaagtgggtgagcaacttttgtgttagtggaattctttttaaatgagattgtggagtaattgtgtttttgtgtttgttgttattgatgcaacagtgttagcagcatggatgaggctcaagtatcctcacattgcaataggagctttagcttcctcagctccaattcttcagtttgaagatgttgtacctcctgagacgttctatgacattgcatcaaatgatttcaaggtaatacatacttttgcttcccttagtcgattgactttatcttgtctttctttaatcatatagggaccgtgtttttgtttgtagcgtgagagtagcagctgcttcaataccattaaggactcgtgggatgcaataatagcagagggtcagaaggaaaatggccttctgcagttgacgaaaacttttcacttttgccggtaaacaaataaattggagttagtgtgcgcttgttaagtgtattgattagtaatagttcaatggattgtttctcgatttgcagggtgttgaacagtactgatgacctttcagactggctggactctgcctatagttatttggcaatggtggattatccgtatcctgctgacttcatgatgcctttgcctggacatcccattagagaggtatatttgggaagtaacactttatgagtttatacgaatattgtagaagaaatctgagaatgcattcgctagatcatttggattttcatctttacatcaacgatccggggaggctatgctttaaagatttgcttgttgcgtcaggctattgttcaaccacgtccgttaaagtctttgttcaatgtggtgtatctttctataggtctgcagaaaaattgacggtgctggtagtaatgctagcatcctagatcgcatatatgcagggataagtgtgtactacaacta

SEQ ID NO: 54864 - DNA, 621 bp, Arabidopsis thaliana landsberg
  unsure (1)..(621): unsure at all n locations
cagatgcaatcctctgtggctgctccatgttaagctctcgtaagctcagataaggaatcgccacgtcacctttcctcgccggcgtcaatgttcccgctataggtcccgacgaaggtttactcgttgttgtacgatacggtgtgttcgacccgcttattagactctccgttgcgtaaatcggacccgacattgacatggacccggttacggagcgaaagttcctgaccctacgatcttcgttcacgccgacggtggagattggccatttccgccatttgaaaaaagggagagctttcttccaccaacaccgtttcttcttcttgtcgttgtgcattgtggaccgggtcgggttgtcttttgaaatgggtttctggatcttgaattgaagaccgttcgtgtatgattttgatgacgtttctctcttatgcttcctcgcttcttccataacctttccattaagacatcagaaacagagccaaaattactcaaaaacagaatgcaaatgcagagccagatccattggatttgagttttgttgatttgaaacgaaacaaaacattagcaaaaacgtaaacatacctgaaagtagtggagttagttcgaagccntagtcgctgaaat

SEQ ID NO: 54865 - DNA, 853 bp, Arabidopsis thaliana landsberg
gtcgaacaaaagcagctgaaggttggttttctcctattgttatctcagcattcaccgggccggtgacattaatttttcttgtctaacatttctatttttcttactttttccgaatcagggatctctgtacctgataattcccagggacagagtgacaaggacacttcaatccctgagacagacgagaaaggtataagcttgcctacatttggttttgagtctaagttagtttgttaggttctagtttatcattaaatttgtatttgcatcagtatctccacccgagaaaaaattagagaagccagttgagcgcaaaaaagtagagaaaccaattgagcgcaaacaagtagagaagccagttgagcgcaaaaaagcagagaagccaattgagctcaaacaagtagagaagccagttgagcgcaaacaagtagagaagccagttgagcgcaaacaagtagagaagccagttgagcgcaaacaagtagagaagccaattgagcgcaaaagaccaacaaagcttcatgttgatttacctgataaagaaacatgttcagataagcaaaggtatgagttttataataatgggctgatgtttttctagatatatatatcctcaatgaatgtattattgcctttgctgagattaattatgtaattagaaagatttgttgttcttgttttacttgcatatatatgtatacttttttaaatgggtgaagagttgcaagaactgtattattgggtgggcttgctaatgctgagatggcagatgaagttcatagttcagtcaaagagattggcactgtgtgctctgacagatataccctacccaaagacgagctccaacaaaatg

SEQ ID NO: 54866 - DNA, 1110 bp, Arabidopsis thaliana landsberg
gagcaatcaatcacccaaaagagaattgtgtaacaagtttttaccgcttatgaagttgaaatgaagttgtgaatgtattgaccccatacgaatcctttatacatgcagaagagtaaagtagagacaacttcatggtttgtactttttagctgcaaaaggtcaaacattttctttgcaaagtgagaaagaaagctatgacgacatcctattctcacgatgcagaagagaatcatggcatccgattctcaatagttacatgtgctttttcaaaagtaagatctattttgcaaacgtttctttttgttaacaaaagaagatcatatatttttgttcctctaataattttagcaataaaaacaaggaaacagtctgaaacttgcaaactttttcccattagaacattagtaattttattgttttgttcagcttaacacacataagagaccgattggcgattgcataacccgaaaacgaattaattatttcatgagttttcattattcgcgggaaaagaaaaataaaataaataaacagcaagttaaacactaatcacgtgccgtttctaaataatcaagctacgtaacatcgtacagagagctagtcacgtgctgtttccattaatgaaagccgtaacatcgtgcggttttccctcgtgcgtctcttctcgaccatgcattttcgtaactcgtaagtcttcataatgtcacgctcggaaactcacatcgtccgtaacctggtttcaagcgacaacagagtacaaaaatttagcaaacccaaaatccaccaccggttttaacatcctgatatcactgaaccggaactaatttacgaatcggtttaattatgatttggattttggaatttaacttacttggatctttgatggtttgtgtagctaagccgttgaaggagcaagttcccccgatcttacgaaattgggcccaataagagctaaaggcgtagctggcgtgcaaaacggtcaaatcaggtttctgacatgggcctccgcgttgaatcgggtcacaggtattattcccctgtgagcaagcgtacgatagagcatcacctagctgagtgcaattcgctcctttagccaccacgcaccaaatc

SEQ ID NO: 54867 - DNA, 520 bp, Arabidopsis thaliana landsberg
ctagaggatcccctgcaagtgaatgctcagattattctgattgcatctccctaagctcgccacaacacaactaaaccaagcctagacaatgctgggctggcctggcctacagtaggaatatatgatgatcaaccaagcactttgcttctttcctcctagctctaggggcagcagcaaatggcctttgtttggctggtcctgctttggtttcatgggtgttcacacggacgtgctctgccagcctgtttggtttggagactgaagttccatgatgctcgatcggattttgggtcgggtgattcagttcccggactgcttcatcatcctcatgcctgcctgtagtcttccaggcgccaaaaggcaagcgaacgaggtgcccgcggatgagcgaaacacggcagcagacgaacagccggcggtcaagcgactgagcaacagcaggaggagcatgtccagacacaacacgatctgggcacctatacggaactggaagcgcggctcaaccagagcaaactggccg

SEQ ID NO: 54868 - DNA, 1087 bp, Arabidopsis thaliana landsberg
attacaccatctgttctacgtatactggtccatctgtctacttttcccattaattatggaatattccattagttaaatcgaatttgtagcaacgaacaaccaacattttaggtagactagagtcccttgatggtttttgtcaaagaatatactatgtatttttatttatttctttgacaaaaccatctaaggcaaatttttactccggataattaggattgtagttacgtataaatggtgtggtccaacgtcttagtttcaagttctggtaactatttcttggtctctagctatataaagtttacataatacattgacaaaaacaaataaagggttaaatgacataaagtttccattccatgatagatttacaatagataattaaatatatacatgacagagtaacattatcctttaaaatgataaagaacactttttaattaatattatatctttgtttaatcgaattccctttataaaaaataaaatgggatatgtctaaagaaaagaatcaaggcaagttatcaggaccatcttcacgttgtttgattcgggtatcgggttcgggtcctgaacttgagctaccgggtaacccgccacatttatgacacctggtaaccaccaagatttgacggcaagaaggacaagaagagtgtgatccaagccacgtgtcgatacacgatacgtggaaaccatgtccacactgcggcaacaccctaagctcgtctccggcggcgaattccgttaaacagatagcacactccacgagtttctccgccggcggagaatccggcgagtaggtgagtttcggtaacgaccggaggactttctttttcaatcctttgttggctgcagctaccggcggtggatgagtttgatccgatctgtttcttgaggcgatacggcggagccaagcgcatcgagagacggctattaagccgatgatacatgtcagtgcacaaagaagaaccgcaaggatgaggacgaggtcggagttgaaaggcggagaagcttcagccggagatgtagaattggcttcttggagaagacggaagagaaggcgcgcccttgttataggtttaggggt

SEQ ID NO: 54869 - DNA, 1033 bp, Arabidopsis thaliana landsberg
gcacccaaataaaattttgctagcattcaccattgtctcattcttgtggaaatgaaaaccaaaatattatatgcttataataggagattaatgtagacatgagacatatacgactttcactgaaatgggtcagtttgttttctcaggtgtccaagttccaccccgtgacttgttgattttgatcctttaagaccagtctcagtctgtttcaattataaaatttggcctacatgacggtgccggtgcacctttaaagcggatagacgttatggtcttattgatatatatacaactccgtggcgatatggcttctgaaagcgaatatacatagacttctctctttgagatttacattttctacgtaaaaaatatttcaaataatgctctttagtcactaccgctgtggcattatgtaaaagccattgaagaagtgtgttaggaatcaacatttaaatttacgtagaaccataaataatataaataaaatgactaatcaaattttagtatcatttcatttttgtgttagaaacctataaaacttaacatacgtgacttaattatgtgacttttctcgccttgaataacttcaacaatgtagctatttacactagatgttgaacaacaacaaaaaaagaaagatatttacattagatttaatggcaggaatacaatagttgatccatgactttggagattattcattacatagaaacataagagcgagccctatatattcaaagacatgtatatacattgggcacgttttgcttttcggaccaaaaaacctacttcagcaatctcccatacgacactgaccacttaacactctcactcgcatttcttcttattcacgccataaaaaaagaagaaaggggccaaaaatatatttaagcgaccctcatattcttctgaaaaatagatactacaaaattcacacaggactttcttcctgggtaataagtaatggaactttgtattcatcttcatcgtgatgatgaatagttttgatggattttggttcttcatttggact

SEQ ID NO: 54870 - DNA, 1027 bp, Arabidopsis thaliana landsberg
actaacaaaacaaaatatatataaattataaatagtactatttattttatgtttgggggatattaaaatttttaaacactaatcgaaattagaaaatgaaaagactaaacaggagctactactttcaaacacaaaacagaaacatcactcattcgaaaagtgtaaatattaacgggcttaacattaatgcactactttagcgggcttgaaaaaatgaggcccaaacagtctctttcaaagactaccgccatcaaaaacggactgaaaaactttatactaccgcctgtaattggtaataatttcgttatacttccttactttaaaatttgattaaatcaacccccaattcaattgattatcaaagggactgcaagactcaaaaactacctaaaagacattagtctcttcctcgagccattgggtgattttccagatgcataactgaatggagcagaacttccaagtcttttccaagaatgcgttgcattaacagttgcttatccaaatcttcgagacaactggtgatcctcatacccatttgatttttggaagcttcttccgcttccagtacaatctcagccgtccattgagagttatctacggttgtatcgtttagcctggaaagaaaaaacgagagttaacaagtaacaatgtgattcaacaaagaactaagaaaagctttagggatttttgaatcaaaaaccatataagactggtttttcttcagttatacttactcttccagtatagaatctgcttccttcaggtctttcaatctaaataaaacgtcaacagtgtcctcattaaccctagtaagcccttcgagagggccaatcgaaaagcacatcgagtgtatcaatgaatcagctgttttcgagtttagattaccaatccttataacgagtactgaagagagtgtattggaggtcgcagaacccttggagatagtttcgttttccggctcagaactgggactgattttcttttgagatttggatttctgatcttgaatttgagacgatgactt

SEQ ID NO: 54871 - DNA, 394 bp, Arabidopsis thaliana landsberg
  unsure (1)..(394): unsure at all n locations
gttattgccagcggnacatcaaaccgtcagacccgggcgctggccaaatacgttatcgacaatgtgcggtatcataaagtcgttgtcgtcgcctgcgaaggcgaggacttgggcgaatgggtattggtcgatctcggcgacatcgtcgtgcactgtatgcaacctaccattcggtaatactactaccttgaagaattgtggggagacaagccggtgcgcgtgcgccttgcgcaatgaaactgcacgttatagccgtgggcatgctcatgcccgaatgggtagacaccgcgtggaatgagtacgccaaacggtttacgtcggactgcgcgctggcgctgcgggaaattaagccagagtcccgatcgtcgggaaagacaccggaacaacttcatga

SEQ ID NO: 54872 - DNA, 718 bp, Arabidopsis thaliana landsberg
agcgatgaacaaatcgaaaaatcaggtaggcttcagctcctttctcgattcatgacccctcaaaatctaaagttgtaccattgaattgtgatccatacacttctgattctgacattcgcttatcatttggattgtactgcgattttgatgtgtgaggttatgttcaaattgttcctagaaccaccaatttgattgtattcggctttcaatgtttgattgatcatagaacaagctttatatctgctttaacattgttggtgattggattatgcgcagagattcagcaccaaagagttgtaattgagaacagtcatggtgagaaactcgtaggagttttgcatgatactggttctacagagactgttgtcatctgccatggatttcgttcatcaaaggtctttttttttgtaccattctcatcattttcaacttcctttgattcacattttagattccatgagatttgaatttgtattggttttctctaaacattgtaacctttcataaatttacttctagaatcggattccaatgctgaccattgcaagtttctttgaaagagcaatgatcagttctttccggtttgactttgctggcaacgggtaaattgtaacatctctcttctttcttttaaactggttgaattgtttttttgcctttacactcatgtttctcaacttcagggaaagccaaggatcatttcagtatggtaaaaatc

SEQ ID NO: 54873 - DNA, 500 bp, Arabidopsis thaliana landsberg
aggccgtcctgttcaacaaactgatattgcgttgatgttgatggatcatggagctttttcttgagtacaagattgcacaaggtaattgtcatgctacacaaatcttaccaaatcaatgacctgcgaaaaacatgttaaggagaacaagtgttgttagttacataggaacttctctggtttcgttcgcctaaagtatataaattgttatgcgtcaccaggagaaacaccgctagattgtgccccggcaacactgcaatacaagatgcgggaaaagatgaagtccacttaacagcatgcctcagacagagctacaaatcattcctcaaatctttttcagattagggaaagatttgtaatggaaaaaatcaagggatcatgaatttgcttgtaactttagttgcattctgtgtgcaatttttcatgttatgtgatctttgaaccatgtcttcttccctatgacataaaaactcccttttgttttatgtcattaaaatgtgaca

SEQ ID NO: 54874 - DNA, 450 bp, Arabidopsis thaliana landsberg
  unsure (1)..(450): unsure at all n locations
cccccccccccccccccccccccccccccccccccccccccccccccccccccccccccccccctcccccccccccctcccccccccctccccccctccccccccccccccccccccccccccctttttttnnttgtcctcgnccccnnccccccgcgccccccacctccaccncaacccccacccncccccccccccccccccccccccctgcccccccccccccccccccccccccccccctctttcttctatcccccccccccccccccctcccccgccccccccccccccccccccccccccccgcccccctccccccccctcccccctcccaccgtccccccccctccccccccacctttatctccccccttctccccccccccccccccccctcccccccccccccccccaacccccccccccccccccccccccccccccccc

SEQ ID NO: 54875 - DNA, 639 bp, Arabidopsis thaliana landsberg
  unsure (1)..(639): unsure at all n locations
tatggattgacaaagatttttcaccttttctctctaaaaaaatgtttactgccattgacnnnnnnnnnnnnnnnnnnnnngtggatcaagaatttgcttgcttatcgtcgtcgacgtcttctgattcgatcggggagaacagtgacgacgatgaaggtggagagaatgagattgagtcttcttacaatggtcctcttgatatgatggaatctcttgnnnnnnnnnnnnnnnnnnagtaagtgtcattgtttttgtctgattgtttctagggttaatgtctgaacgtggaacacgttttaatgtctgaatattgacttcattttaggagagctatatcaaagttttacaaagggaagtcaaagtcgttcatgagcttatcagaaacttcatctttgccggtgaaggacttgacgaaaccggagaatctttatagtcgtcgtcggaggaatcttctcagccaccggatatgtagtcgtggtgggatctcaagaagccattcaagagtgttttagcggtgagtcaacgagaaggagactcttcttcctccggagatgattgtcttccgactctaaggcagcatcataagactcttacgccgaggctgagaaaagggagttttggtaattgtgttcccgttgt

SEQ ID NO: 54876 - DNA, 683 bp, Arabidopsis thaliana landsberg
tttttcgacaggccgcaaatcagtttccctgagaatttttaacgcacacggtgtatgtactccggcgtgcactcttcagacatgccacaacactcacactttgcatcttccacttcggatatcgctgataaggataacaaagttgttgcggttgcggttggagatggttcttttgttagagtgttgtctattgaaatttggtgtgaaatatccgagatggtgcgttgaaggggggccattggaaggatatgtggtcttttggtgttttcttgtgtttgttatatgtatagcaatcacttgtatctatgactagctactagattgttatgatgcgcatttatagtgtttaagacttaagagaatagtctcgagggttctgcttctttatttacttttgttttttgtcctgccaataaaagcatgaacaatttagctttaatttaatgaccttaaaaaggatcaacttcacatgtatatcttgaacaacacggtaaagccaataaaaggtttcctcttttgttagtgggaagatgaagcttattgaatcctttaccaacaagaaaaagaaggataaggtttattgagatatttggtaacccattcatttttttgtttttcatttcaaccgcttaaactatctctttcattggtgaccacatttgaattaaagaataggagtctgc

SEQ ID NO: 54877 - DNA, 493 bp, Arabidopsis thaliana landsberg
catcggtgttagccagtatggccgcctggggcacaggccataatacatggtactgactgatttggaactggtcgccatgcaccgttgtaaagttcttggagtagaacacattcttttccagtagtgcggtcaaccatgaaattggatgtggagaagttcgccatggtataggtcttgccgttgtagggttgttctgtttttgcgaaaatataggcgatcctcgtcagctctgtttttcgtggttcttcgtaatacagttcacgggcacgctcatccagtatggtgccgatgctcattttggaaggaaggtaaggtgtgcatttcgctctcgtggcgacagcgtttacatctgcagcagcattggccgtcttttctttccacaaatatgctttggctctcatcaggtatgtttctggcatgcggaacacataccattcggcattaccatctatgcaggggttattgatctgggcacgaacataagttttgtatt

SEQ ID NO: 54878 - DNA, 688 bp, Arabidopsis thaliana landsberg
acactcagtttttttttcccaatacattccctataaatctatgttatccctaatcaagtattacaataaatgatacagtaataataaccttaatgaaaaaaacttatcaaattatcagagataaggaaaaagaaaacactaataaagttgttttttgtgtcaaagttaaaaattttagaggacaataaaattaagaaatttaatcgtggccagttagctagtgaatatgtcggcttcatgagcataattaaaaaaataaaaatatcggaaaaagaaaagagaaggaaaaaaagaggagaggaagaagaaaaagctgttcctgtgctttagcagaccttttggtagttgtcttggtcgctgatcatccctttccgacaactttgttgctctttctctcacgtttgagctctctctctgtcttaatcttcgattgtccttggtcatccttaagttttgtttttctctttcgattcatttttccagatttctttttatagaaacccgtctctttgatttgattcccccccaagaaaggaaagcaaaacaaagacgagcagctgaatcaagtaactttgtgggtgtttttgaattatctgactcgagataaagagcttcgtaaaaaacggaatcttttttaaggtcgtatgctctatttgtctttccgggattccgcgtcgggtttttgatc

SEQ ID NO: 54879 - DNA, 1217 bp, Arabidopsis thaliana landsberg
  unsure (1)..(1217): unsure at all n locations
tgaaaaaattgaatataaaaatcaatatttataaattaatatccaaaatattactttaatatctagacatgtgtacatatatgtaggattttcttgctacttaccttgaaggatttgacatctcttacggtttctctagcttgagctacataaagtacgagtatggaatcgaagaattttagaccaacatccattaattaacaatatgtggaattttcttaatagctttgtttggttttgttcttgttaaaactacaattacatataggtatttataatcgttttcagttttaaatctttcttatttatgatttttagttacttaatgtgtattgttgaccaaaaaataattacaaactctctttttgttaactttgcttttttaagaaaacaatactaaaatttgttaataagtactattattcattagttttcttaggaattaggattgtttagtcaactagtttttaaaaaaattaatgactcactcaagtcaagatagcctgatttgttggcacttttaggattcttacttgtttaaaaagttttaacagttaggggtgtgtgttgaattaagggttttggaagattctgaaacatattcggggatttggttaattttagaagatttcttttaactgaaaagaaaactgtaatggtcatttggtgagatttgttgtgaaatttgagaagatattggagtattttgtgtgatatcccaaaattatgttttggtaattatttaaagttatgctacctgtagtctttcatcttgttcttcattacaaatatgatttctcagaaccaattagaacaacaatacttgcatcgaacgtgaagagaagagccttgattagtggtgtttcatagccaagtcgaaggcgccaaatttctccagatcaagaaatcaacagtggtaaagttagcgacaccacgatgacaattgcagtgctttgttagggaaagtttccagaattttctcaaccagctgaatcatctcattgaatggagcaaaatatggagnagaaagtggtttaactattctgatacctgaaactgaagattgactaacgttcacggagaatcaatgatgggcgagtttttgtgaatatttttatttatgaaatccatccaactacacctctaaaatgtgattntctcagncatattctcaactaaaatgtataaaagtctctcatatatgagagagcacatgt

SEQ ID NO: 54880 - DNA, 254 bp, Arabidopsis thaliana landsberg
  unsure (1)..(254): unsure at all n locations
cccccccccccccncccccccccccnccnnnnccncccccccccccccccccccccgcccccgnccagagacggcaacccccccccccccccccccccccccccccccccccccccccccccccccccccccccccccccccccccccccccccccccccccaccccacccccccgccaaagagaaaagcccccccccccccccccccccccccccaccagcccccccccccccccaccccccccccccccccc

SEQ ID NO: 54881 - DNA, 598 bp, Arabidopsis thaliana landsberg
  unsure (1)..(598): unsure at all n locations
gaacccagatatggnttttgatcaaaatctaaactttatgtaccttgaacaaagaagccaccgtttcactttgagatttatgtgaatctgccgacgattagagaggaggatcgcttaaattaggtctatgcggcgcgaaagatgaagaagatgagcgttaactccagaaggagagacactcacacttgtcttcttcaaaaagggtaccctaatttctaaagcagaagcataactgatagaagaaggcaaggacactctggtgactctcgagtattcggtttcatggtccaccttacgaaaccttacaaagttacaattaacctacaaatattattgttggtatttatttaatattaaaacaaataaaaaacccaaatcttttgcattctaaaatgttcaatcaaataacaagtccggtttggcttctggttaataatttcggtttcgcttacttgttaaaacctaaaacctattatgtaattcaaatttacgtcttggacataataatttgaaccctttcgtaccatccccaaacccgaccgtaaaccctgatcccaatccaaaatttcaaaaatcacggttctaacttcaacccgaa

SEQ ID NO: 54882 - DNA, 978 bp, Arabidopsis thaliana landsberg
cggcttctgttacgtggcgaccctgattaacgacaaacggattaattcaagtaaacgtcgtcaccaaaaaacacgatctctgtcttggaactcgcgacacttttttggggaacgttgtggttcccaccgaatccaccgaagccaacatcatcatcatttgcatttgcatcatcccatcaaacatcgtgtagttttattgctctcgttctggactacgagccggtcttctttttgttttgcgtatagccgtttggtttttcctttttggactactaaaatactcttgtccacacaaacgtcaagatacttaaaacatctcaatatttgcatatgaactagttagtagtatacatgtatatactcgtcggaagtgacattttttaagattgtgaaatattttgcgatatttgaatttaaaatagattaaaaacgatttaaatttcactgtaaaagcaaatcccggtgaataattacagaaagccgatcttgtaccgtagttaattacgtagttagtttatgggcattagagaaatgtttggtttattcaaatcactaaacaaccacgcgccattatagctcgtgagagttttagaacgtgtgggtcgatgggagcgtattagtcacgggtggttgggtcacgtgtgtgatatttagtagtagctttgcatgtagttgcgtccgtttacgctctgtgtgccgacgtaatgacggccagacgtgtcgcctttcgcaccttacgcattatagagactacgtacgctcattcagagtcagtttgctgtatggacgccagcgttcgacagcgcatcaccagtgaggcggtcgtcggcccattagtcgacataggtttcggctgtctcaggacgagctggcgttcaccgctggaatagtccagctggcgtcaatcctgttattgtaatggaatcgatagcgggcttgcgactgcgaaactccttgaacagcccgagatagggctgt

SEQ ID NO: 54883 - DNA, 537 bp, Arabidopsis thaliana landsberg
ggtcgacgccgtcgccgatcttgaacaccatggtcatcgcgggcatctcgaggttcttcagttcctcgtggattatcgttacctttccggccttctcgtcgagcttcttgatcttgcccttggtgaactcggccgcaaaggcggtcccggcaaaggccaacgtgagggtggcggcgaccgccagattgatgattttgcgcattcttgtgctcctttcttgggggttacttcttcgccgtgacgtcgacggcaccatgcatgcccgcctcgtaatggccagggatcaggcaggcgaacgtgagcgttcccgacttggtaaacttccagatgatctcgcccgacttgccgggcgcgaggcgcacggagttcgggtcgtcgtgttccatctcggggaacttctccatgactttcttgtgctccatgatctcgtcctgggtatcgaggacgaattcatggtcggtctcgccgccgttgcgaatggagaagcgtacggtctgacctttcttcaccttcaccgaggcgggcatgtagagcatc

SEQ ID NO: 54884 - DNA, 884 bp, Arabidopsis thaliana landsberg
ctgtgtgagagagaacattattcagtttttaaactaaaaagaccattgaccagagagatttctacagaaaaagaatgatgctattttactactattgtacctcaactttttttcatcttatcaatagtaaaatagtactataaagtgagaaaaatatgcatccataacaacttcgtaaaattgttttagtatgaaatttgtttagctttgactacaaattagagaatggtaagtttttgttattaaaaactttgtagttagatctcatgatatccaaacatagaatcacaattttgctgaaggagcttggtacgaagaccgcctcagaagtaaatgatggttctgttttagcaactttggatgctgctactcgggttgagcttctgagctccccttcttatgtctttttgtttgagcatttgtcctcgtagctttttgtgtatactctccacgtggaggcaactctcgtttaaagttgaatgaaatgttagtttgaccaaagaaaataaaaaataaagaatcacaattttgtgaaaactgtgtaatagtagttttgtggatcctccagaacaccaattaagtctaaaagtgaagtcaacttgataatgtcggtgagttctttgtgattgaaaaactgaaagaacactatcaattctttgtgattattcatgtattttatagggttcaagttcaattagtgcctgtacttataaaagacttcatttgatgtagtaaaatattagatggatgaatcaacttatttgatgcattaagaagcagtataatcaaaatatcaaataataaaattagaaaacggcatgctaactttgataatctagggaaatacataagcgtagctagagatttgaaaacctatagcatac

SEQ ID NO: 54885 - DNA, 939 bp, Arabidopsis thaliana landsberg
atgctttgttgctgtcattcatgtgaatatagattcctcacattttaaatgatgctgtttcttctttctttcatcaggaaataaagaacgtgaaagaaaagatgcaagaactagaactccaaattattcaatcaaagcagttgaagaaacagaaagttgaagaacgcaaaccctcaccacaatctggtatggaaacttggtacagctaacatttaccctccatttagaagaagtcatttccgcttaactacttccctgactgtcgcgctgcctcgttgcaacttctttgcaggcgaatcacagtatcaggaagatgtctcagaatcaagagtcatacatgttactaacgtaatcctacagggttccctcttatcttttgtttttgcattatctattttccttaatacacatgaatctaagattgagaaattatccaattctctcgaatgcattctaattttgaaaactcactaacacttgaaaacatctggaacttatcaggtatactatgcagcaaagaaagaagctatatcaatgttcttcagcagcaagtgtggagctgtccaaaatgttatagttgtaactgatccagtaactcgccatccaaaggggtaaaatcctctcttccttctaacatcttgttcgttgcaatagactatgcacaaattcacttttaagcaagaaatcgtccttatcacaaaaaaatcttctcttctccagtactgcttttgtgacttttgctacaaaggagtcagttggcaaagcagtagctctgagcggcacaatgttctattcaagacccatcaaggttaaattcaattcttctctatctccaaaaccatattacttgtttctgacacaacgtaagtaatccagcttctctgttttccaacattccaggttcgcatgcacgtgatagcttctggagtagtgtcagca

SEQ ID NO: 54886 - DNA, 1060 bp, Arabidopsis thaliana landsberg
agcgcatagagctcttgcactcaccatggctcatagaacttggagccttttatctcaactctgggctagataatgttggaaacttcaagaattcgtttgggcgtgtcgcttgtgaaaatctcaacgaagatcaaccagtgctaaaactcatgctgcctaactcaatagagctggagtatgatctaacttgtgcaatctgcctcgtaataaaaaatctctttgcattttttcacaaataaaatgtagtttgcatatctggaggtgaaaataataatttgttgtggataaatttgggcaggaaacggtattcaatccctatgctttaaagtgcggtcacatattttgtaactcgtgtgcatgctcggctgcttctgtattgattttccaaggcattaaagcagcacagcgacattcaaaatgtcccatctgcagagaggtttgtttagattcttgcaacattaaacgtgttcttctctcaacttttgtttccaatatctataaagaggtcaatcttgatttatttattgcggtatcaggctggagtttacgcggaagcagttcacatgatcgagctgcatcttcttttaaagacacggtaagacaagtctcaaattttagattgcaccaaatcagtatagatgtgtccataaactttgaactgatgattattatcattcatatagcaagatggtgttttcattcgttaagtaactagaaaatgaagttgcgatcgaatttttgttcttaatttttttttagttttaaagtcgttatgagtgagcctttcataaacatctgaatatattcttggggtggtatatattgttcaaactgtatttatattgcaagaattattaatgtcatatgatgaaagcataatacattttttgtagaagcaaagaatattggaaggagaggatgatgaatgaacggtctgagatggtgaagcagtcgaagatgttttggaatgaacagacgaagcatatgatcggttattaatggtgtatctcttcaagttcaattattaacttcatctaaacaaaaggtgatgaccctaaaa

SEQ ID NO: 54887 - DNA, 419 bp, Arabidopsis thaliana landsberg
cttgttgtacattcatctctcagagattccccaaattcacataagctgagaactcaaaaagagagagttttgtttctctgggactttgattatgtgataaagttttggaatttgaggcaatgtgtctctaaacgagacttttttactgtgtttgagatctctctgaaacttgtggggggtttgttagggtttcgtgatgacaggagagttacaggagacgacggcgccctgtgcggctataacagagaaacgaccaaatcgactcggtggttgtgtcggtgttttcttccagctctttgattggaaccgacgctttgctaaaaagaaactcttttctcgcaaatcacttctatctggttagtctctgtctctatctctgtcactgcctcattttatgtctgaaagtgagtgttgttgag

SEQ ID NO: 54888 - DNA, 588 bp, Arabidopsis thaliana landsberg
tttctagaaagtctttgtttcctaatacaagtttttatttgagaggtatgatttacgctttaataattattgtcaactttttttttttttttgccaacggttagtcccggaccgagaaagaaagattatgagccaacgaaaataaaattgtttgaaacgtttcttaattagtagtagtgtttttcttagagatttgtacaaaaaaaaaactaaaaagtacgaattttctcataagagtactgttaaaataatcacatttcagtgctctttctataattattttgtttctttaattaggggttaacggtcaaaaaaacggtcgcagaccagagaatttaaggcaatgttttcttaattaagactaagtcgataggtttaattcttaaacaagatataacgtaacgtaagcaacgtcgacaattcaatatctaatctggcccaataatattgacctaatccggtccagcaatattctagagaacgagaaactcatcagatttttacttccaagtgttttctacaagttaacatattttgtctttgtttttattttgattctaataacgtgcatctttttaaaagtgatct

SEQ ID NO: 54889 - DNA, 603 bp, Arabidopsis thaliana landsberg
tggctactactgcttcttctccgggctagagttggctccatacaaagtgttctatgcgatagcttctttaggctatatctctttgactcttaagatctcacaggtgaacaagaacgaccttcgtttccgtactaaaagcagaatacacagaaactgagttttacagtcgcatgataacacatttctgtgagacgaaaatcactactcgaccctaaaagcgcgaatgaatgaccgagatttatttttaatcggtcaggtgtgttgattggggatcttataaatgaagtcagaagagttttgttgccatttcaaacttctccaataacattaattagaattggtttcattgtgtacttgtcatgtgtttttgtatttctatctttatgtatgttatttactaggagcttcattgctcgaaccagactactatgataaattttgtatgatttggttttggtaaatttaatgaggagattctcaaattggcaacaaatgagttaacgcaccattttaagttctagtacacgcacaaaagcaatcagaaacaaatggcattacaaacaccaagatatcatgattttgcggaatcactagccacagagc

SEQ ID NO: 54890 - DNA, 766 bp, Arabidopsis thaliana landsberg
ggaccttcttgagttctttcgttggaacagatttttaattgaccacctttgacccgtactacactttggagcgttgcccaaaggttatgtggcaatgcagacgaggagtacttatgaaggaccaagaggagcttctggttatgatgcaacatttgctcccccgaaacaggaactggtaacgtaagcaaggcctgaagaaattgatgagtaccgttgtaaagaagtgtctaattcagactttaggtgtctggagacaggaagagaagtgcatgaagaaaacaatagctacagttgaaatttgtatggcgtttgggcacacctatttagcatgtagagagtaaagaggattaaatctcttacagtgaaaagctgaataaataacgtaagacataactcatagtatattttccattttcttaatccatatattctaggtaatcaaatctgttactgcaggtgactggtgattgataagggtatgtgtgtcttgacttggctcgggaacaatggttcgctcaggtacactcttgtatttcataacagttgctgccttaagttatgttgtgctgcttcttagaaacttttcttgacatgttaaaatttaaacatttcggatcttatttaaaagaatttcactcatataaattcgctcttattagcatttaactaagaatgaaagatgcttattgacaagaacttgatgggatgtcttacgatatcccttcacaatatcttatttaatgttcggttagtattgggtattctg

SEQ ID NO: 54891 - DNA, 361 bp, Arabidopsis thaliana landsberg
gaaacaatgccaatgaaaccgcttgcatctgtttggggtgctttactgaatggctgtcgaacgcacaagaatgttgaactcggagaactagctgttaaaaaccttcttgacttggagaagggaaatgtggaggaagaggaagcagctcttgttcaactatctaatatttactttagtgttcaaagaaatcccgaggcatctaaagttcgtgggatgatagagcagaggggggtaagaaagacaccaggatggagtgtgttagaggtggatgggaatgttaccaaatttgtttcgggagatgtgtcgcacccaaatcttctacaaattcacacagtgattcatctcctatctgttgatgcct

SEQ ID NO: 54892 - DNA, 855 bp, Arabidopsis thaliana landsberg
aagcttctcgagaatcccagggttggcagatttctcttatctttctaactctataatctattcattgtatcgttagtctaggagctagtctttcttttttggtgtgttatctatctttacaccattttctgttactcttttggttgctggtatttgctgtgtcctagacgtctcataaattctagtatctaaggtgctagtatcaggtctattttctgtgtatcttttactggtagtgatgtcaatcatctggactaggaaggttcaatatgcttttgcacaatgcctaaaccagttgaagccaaccagttccaggagccatagatcaaggctttcatgatatcttggattacacctggttgaccagtcattcaattgtgaattttcttcgtttctctcagttagtttacttgtacattctaacgagagggttatgaacagtttaatgtttgtgatttggcagacatttcaattagaaatatctagagaagcatggttctgctatttctgcgtcaccagatagcttgtgcaccttacacattataggaacctttccctctaaatttttacctctgatgtggtatacattactattttgttgtagatgaattgtgcgcatttggagaactgcttacatgaagcaagagaagaagcccagacccatctttgtgctgctgatcgtagagcttctcagtatactgcacttcgtgcatcagctgtgaagatgcgaggtctctttgaaagattccggagctctgtctgtgctggtagtgggattgctaattttgctgactccttgcgaactttggctcaagctttagccaagtaagttcccatctgtacgcttcccaaaaa

SEQ ID NO: 54893 - DNA, 580 bp, Arabidopsis thaliana landsberg
ccagcgacctgatgagtgatgattggtgaagattgaagaagcagctgacgtctggctcgctaccacgcgccaccgaggacgagggactggatcactagaataatggagaaattggtgccttgcggtggcgggtggcggctagctacttctaggttttgcagcgtcgcgccttggcactttggcagcttggctaattggcttgatgtgcgtacgtgcggtgttgactacttgacttggtgccttggtgggatcatcagatcatgggccatggcatgtgcatgtgatcacgtccagtccaaggcccacttctccactccaccagatgaccagacggccagaccgccagaccaccacggtgtgcagtactcgtagcaggccagcagtcacactctgcagactaatatgggtacttcgggtaccgggtgctactacccgaaatacccaaactaattttgggtaatagcatttactatccggattagacttcgggtactacgggttcgggtatttcgggtccgggtctgggtttttcgggttcgggtatcgggtagcgggtaatatgccagtcttaggcacaggg

SEQ ID NO: 54894 - DNA, 550 bp, Arabidopsis thaliana landsberg
tttttttcggataccaattgcttggatggatgcgtttgaaagcctcgagatgacttgcagaaaatatgctttctaggtttgtcttgtgtctccgtaacaaatggtccatttattgattaatgggcgaacgacgggaattgaacccgcgcatggtggattcacaatccactgccttgatccacttggctacatccgcccctaccctccccgcccttaattttgtttcactgtcataaaacctattaaacaactcatttacatttgtatcttagcaccaaactaaaatgaaattattctctgcctaatcattaataatcattaatgaaggggcccgcctcaccactccacttcccctttttatggaagcaaccaaactcaccatgacaagggccagcgctcttacagcgaaaggctccttttctctagccaaaaacattatgccatcaagccaagccagctcccgaatgtctttaatcgagagaggtacagaatagtcgaagaaagtaagcaactgcgacaagaaaggacttataagataacatggaaaatg

SEQ ID NO: 54895 - DNA, 1070 bp, Arabidopsis thaliana landsberg
aaaaccaggacctgcccgtaaatatttcatgtcctaactctattttcctttcacctaaaaacaaacggtcacttgggcggcgggggctactatatttagtgtagggctcatcaacaacaattaccctatcccatcccataaaacaaaattttgtcaggcatccgttctatttccccgtcacaccaaaactcgcgcatgacattaatttttcctcaactctatttattttccactgtaacgagtgtacggtcttcggttacttcatttccaaatcctacccgttaagattatctttagatattatatcaacggtcgatatagcttctttaaggacacgtgtgttgttaaatagttgtcgtaaattgaccagagttttgtactactttagtcaacagaaccagacaataaatgttttccaaattaatgctctcccctcctctaaatgacgtaagtaattattggcgacgaactaagatttgttttctttaaatgctttgcatctctctatgttttctttcttagaatttggtcgaacatgttggacgagatttatttgagattagagtgggaattagaaaggaatattcgactataatgattgtatgcaaacggataaaacaatgatgatcaccatcaaagagatggaccagtatcgactgtaaagtgttaaataccacaatatgattgatagtatcctaattatgaagtgatacaataatttgacatcatgaatgcttaaaaaggtatgccatgattcactctcgacatatgaaattcagataatgtaacattaacaagagaagttttcatcaaaggcttaagcctgttttgtaagaaacctaaaaaatcaaaggctcagcttactctgaagcgtgaaagaataaataaaaaaagtaagagcccaaaataagcccactaacattgacgagaggagtttaatcaaagcctgtttaaaagggaaaaggaaaaactagcgtgagaaagaaatacaagcgtaaaagcccaaaataagcccacttaaggtccaatatattcctaataaccacactggcagagaaatatcttgatag

SEQ ID NO: 54896 - DNA, 123 bp, Arabidopsis thaliana landsberg
aaatcgtcctcacgttatcagtctgcataggatttcgagttctgtagtgacttctacgatatttcgagatcgaagatcatctgtcatctaattcagaagctttcgagaagatatgaatcgcag

SEQ ID NO: 54897 - DNA, 1197 bp, Arabidopsis thaliana landsberg
gagttggtgaagccattggaattgtggtagtggtggtggtgggactctctctaaacaagtagttgttgagagagaagagaattaatgaattatggtttatgaagggaggagaattgaagaattgaagagagggtgacttttctcgttgagggaaaaagcaagcaacatgctgtttttctttcttgcacacatctgtctaagtaaaatgtcaaaggtcaacgaattactaaaacggatggatcagagctttgccaattgaaaatttatgtttacactagttttgcttttacacggtactgatattatttttatttaattattagtggcttataaaaaacaattatcaattattatcacctaataaagtatgtatcaggtaataaatgttgtcttatctgcataaactaattttacttgttggcttctgtattttgatcatcgtgagagaagaatcattatatattaacacgctcgttcatgcctcaccgtttatctgcaacgtccgcgtttcagggttagttcttctcacgcgaatcgtgtagcgcgtgaagctacgcgttgtctttaatgggttgggtttaggtgataatacccgataccgttggtttgggctttttagtgttaaaagcctcatctaatacgacgcgtaatgcattgaagacggaacaacaaatcgttttgaattctttattgcttccttcctatacggcatcgtgtgtttttttttgtttcgagagcaaatttttttttactagtgcatgatgtagagaaaatataattggttaaatttattagtgaaagaattgattaaattttatttacaagtctttaaacggtaattgaaagcttaatcacaattattgaagacctttccacacttttttgtatgaaatctttgtctagtagctttttgaactcttgcaagcaaaatctgaaatttctttccacttttcaggaccattttttcaaaatgtttgaagattcctgagactttctgttctgcagattttggtgaaaagaaaattggaattatataatgaactctatacttctgactattatatgagtaatagtgtgaatttgaaattaataaaccctattaatataatcttgcaccacttaaataaaagcccaatcacaaaactgacttgttctaaaactagttttaaacctaacctattgatgaaatgaagtgac

SEQ ID NO: 54898 - DNA, 594 bp, Arabidopsis thaliana landsberg
atttgctgtttaagcacagagccaagtctgtctgcagcatttaatatgtcgagtgattgtcacaatgtcacttacagtctgagaggatggatgtggagtgagcagagtgtaagagcattgctccctggagtcttctctgtccccacagctacactccggaacatctttctcttgtgttcttcattaggaagcagcttgtgcttcagcgtgaataggagcttgggatctgacctctcggggtctttgatttttgtgctattgttacctggagccacagacaaagctgggggtaagacagcattctgttcagtatttcagccaccttctacagaccttaccaccgtccccacccccatgcctagtgagctagcctgcaaacccagtgacattgagcgtcaaaaccaaaattgggccctaaccttgggcatatgtaagaatctgcagcttgcaactcacattatttgggctttattgctgtgtctttgcgctgcgggtggtggtgaactcacagactcatatctggttaaagcatcggtggactgctcggtccaaagtgagacaactgcagcaccccgaggctcagggactgtcact

SEQ ID NO: 54899 - DNA, 625 bp, Arabidopsis thaliana landsberg
  unsure (1)..(625): unsure at all n locations
ccttcttggcaaaacttgacgtacctactaactttctatatatggagaatcccgtttcgactccacccccatatgtccaattcaattgtactgcgggggcatgataggaagctgtcaccttcctgggagggtaaagggctccactatctataaaagaacccgagataaccattccattcaggataccgtaggcatagcctccttgagtattattataaccataaatccatacaggtatactcccattattgtccggtcttacattattgatagaggcaaccttactcgtatttccactgacaacgagcgtatctacttgatctcctatttgataggctgaaactacacccggcagatagctataacttccaaagaaaataaaattatacagactatctggatttaatccaaatatttgaactttctgaccaccagcagccttattgtatgtccatagcagagatttaagcactttatccggggcaactccactattattacctgtgattaccccaaaattctgaggcttctctcccattcgttgccaagtggaactaaattttattcctacatcggnggtattttccaaactatcctttaagctaccataggtatctccctgact

SEQ ID NO: 54900 - DNA, 538 bp, Arabidopsis thaliana landsberg
  unsure (1)..(538): unsure at all n locations
tataattcaaacttgaaaggaaataagctccattagatannnnnnnnnnnnnnnnnnnnnnatagatactagatactcatatctcccaaatcaagatcatccattgtattttcttcaccaccagcgccaacttgagtttgactgctatgtggggattgatgagagggcgggggagggtgagcagaggccgggcgagcttgctgcgagggcgggagagggggagcaggactcaagtcactaggttcctgcagattgataagggcggcgtgcagactgcagaggagggccggcatgagaggaggggcgggcgacacttggagaggaggggcgggcggcggcgtgaggggtagtcggcggattgggctctttgcatgaggaggggttggcggctctgtgcagatgaggggcgggttcagttgtgggttagggtaggggttaagttgtgtaatgggctgcttgggccgaatttgggacaagtcgactgtctagctagaacaagtcgacgactagtcgactcgaaaaatttcagtcgttgaca

SEQ ID NO: 54901 - DNA, 532 bp, Arabidopsis thaliana landsberg
gctctacggctccttcacgtccaggctgaagcccaccgccggccggttgcggccgaacacggcacccacctcgttgtagttgccgccgcgcaccagcgcgtcgctcgcgcccggcgtgtagatgccgaagcgcacgcccgtgtagtacgcgtagccgcgcaggtcggccaggtcgtagctggtgcggacgtcgccgtccacgtggggggccagccagcgcagctgcgcgagcgcctcgtccaccagcgccgacttcggcagcacgcgggccgcctcgtccagcaccttcgcgtcgccgtacagccggatcagcgcctgcagcccttcgcgcgccggcgcggcgaaattgcgcgtcagcgcggcgagctccgtggagtccttggcagccagcgcggcgtgcacctgcgcgagctgcggcggcgccagcgtttgcccggacagcagcgcgcgcacgatgcgcgcatcggccatgtccacggtgagcggccccgacttggtggcgcgcaggcagtccagcgcgagcagcatcacc

SEQ ID NO: 54902 - DNA, 583 bp, Arabidopsis thaliana landsberg
  unsure (1)..(583): unsure at all n locations
tttttnnnnnnnnnnnnnnnnnnnnnnnnnnnnnnnnnnnnnnnnnnnnnnnnnnnnnnnnnnnnnnnnnnnnnnnnnnnnnnnnnnnnnnnnnnnnnnnnnnnnnnnnnnnnnnnnnnnnnnnnnnnnnnnnnnnnnnnnnnnnnnnnnnntnnnnnnnnnnnnnnnnnnnnnnnnnnnnnnnnnnnnnnnnnnnnnnnnnnnnnnnnnnnnnnnnnnnnnnnnnnnnnnnnnnnnnnnnnnnnnnnnnnnnnnnnnnnnnnnnnnnnnnnnnnnnnnnnnnnnnnnnnnnnnnnnnnnnnnnnnnnnnnnnnnnnnnnnnnnnnnnnnnnnnnnnnnnnnnnnnnnnnnnnnnnnnnnnnnnnnnnnnnnnnnnnnnnnnnnnnnnnnnnnnnnnnnnnnnnnnnnnnnnnnnnnnnnnnnnnnnnnnnnnnnnnnnnnnnnnnnnnnnnnnnnnnnnnnnnnnnnnnnnnnnnnnnnnnnnnnnnnnnnnnnnncccatacgaccatatgatagctggtccaagtaacgaagatgaagtggactgggctaagacattgatgctggaatagctgcatgtaa

SEQ ID NO: 54903 - DNA, 1519 bp, Arabidopsis thaliana landsberg
ttgctagggttttacgattattgtgtcaacgctccctggctgagttctcttgataagggcttatatcttatgtgattgtgattctctctactcatctataataagtgtatcatcatttaaaaatgttagaatcgcctctccctctcaatgttttttattactataaaacaactcgaaaaaagagaaaaacaaagctcaaaatttataattaaaaggaacagcgaatctatgaatcaaaattcttttgtgcgacacagtgatccaaacgtgcatgcactacggtcaacttttcttggaattgcgtagtgaagaacgtatgtgctaattttggattagttacgctcttacgtatttaaatggaaaaaatcttattaatagtataatgtaaatttgttataaaatggaaaaaaacacccaagtaaaccatgcgcaaaaatgggatagaatattagctttgaattatatatatgttcgttgtaacttgtaagtaaattttatttaattatagggggaggctacctaacacttctggatatggtgcttcctaactccccttcaataccgagtcttcttgctaattatttgtaccaaactgtttgaatttaaggtatgattatttaaaattcatctgccaccaaatttgtttgaaaaatttataaactaatagtactactctatcgcatttaatagctcttggtaatatgatagggctacgaattgtaatcatacattggtcttaaaaacaaataaataaatgaaacttgattagttggttaataaaagaatatgggtcgtgccggtcaactacatttagcgtttctcaatgttctaataaatgacccttcacgcttaattgaaatggctaacgtaactgttaattagtttttttccatatgtgaatgatagttctgtttagactaaatgagattgaattgattattaattacatcgaattaaaagtgttcatatatcatatatgatacctcgtactcgtagtaacaaaattgcagtattgccttagtaattagacaaacaataaaacaatataatcacactatatatgtaggagtgaaaccgtaacatcacttcattcaaaactattcgcaacaaatatgtataaacggcgtcgacgatcgagagagagaccgagtcagattttgttaagcaaacaaagaacaagccaaaatagaaaactcagtgggtccctacctataccggtcaccgtcgcgttgtgaatttggttgatgatgttctcagtgacaaagatcaagttgttgagaactgagacgccaaattggtccactatcactaacccgacccaaccaaagctaacgcgacccatttcatcttattcttgaacgttagacttagacacgtgtttctgatcacctagagaatagatgtagtggtgatcatgaaacacgactatgcaattgtgtgactaggataatgtacatccgaaacacatttagattgtgcacttatcagatatacattaggaccgaagtgaatagagctc

SEQ ID NO: 54904 - DNA, 541 bp, Arabidopsis thaliana landsberg
gctataacgaagtttcgtgaattcgtaaccattcgtttgttcgtaaccttaccatatttttactcttacattcttctcacgatacatcgcgtcacctttctgaatgttgaaagccgcataaaactcatcaatatctgaaagcggtccgttgatacgaaattcggccggtgagtgcacatcactcatgatttgtttcgccagcgattcattggtacggtttaccatccaggcataggcatacgctaagaaatagcgttggtcaggagtgtagccgttaatgagttctgcagactgtccttgtttcgtttttttgaaagcttcatatcccataaccactccgcctaaatccgcaatattttctccctgggtgttttctcctcttacatgtatactgtccagcactttgtaattgctgaattgttcaacaatcagttttgttgtactaacaaaattttcacgatctttttttgtccaccagtctgtcaggttcccgtttcatcatataagctgccctggtcatcaaagccatgcgtaatctcat

SEQ ID NO: 54905 - DNA, 469 bp, Arabidopsis thaliana landsberg
catcgtcgtcttcttcaagatcactgaacgacacatcttcatcaacatcctgcacaagatggttggctggtggcactaacagttcctgcattatcttcatccttcaaccaatcatcagcatcatcatccacttgaacatcaataactctaggtgaagaaccagtgactaggctctgcaccggcttgtcatggtacgctggtgctggtctttcttcgatgacaggcttatcaacaacttgtacctccttggtctcgactgtgtgcttctctgtctcaaactcagatctctcagccgaatgtattgtttcgacagtgatcgttttcacaggttctggttctgatttgggtgaaggattagtaggttgaaaaagaggttccacattttcactatcagctcctctatcactactctctggcaccactactgtatctttgtttctcttacgcaacagctcgtgagataatagtg

SEQ ID NO: 54906 - DNA, 411 bp, Arabidopsis thaliana landsberg
  unsure (1)..(411): unsure at all n locations
ggcaggtcgcctcccagactgctatacgtgggcccaccctcttgcggcatggtgcctcatggcctccactagcctgggcgtacacggccagggcgatggcagccacaacactagcgacggttctgatcgtggcaacttggccatggcagtcattggggcggcggcaatggcacaaccgtaacaagagaaagggctgtggcagtagcggccagtatctagtcatggccgcnnnnnnnnnnnnnnnnnnnnnnnntgggtggctgggtgtgcttcactccctggggaggccagaagccacagtggcgtcccccggcgccgcagcggcgagctcaccgtagcacgctgcgggtggcctcgatgtgctgggcgcgttcccgcaggtgcgcaccagctgcgtgtccagaatacctt

SEQ ID NO: 54907 - DNA, 505 bp, Arabidopsis thaliana landsberg
  unsure (1)..(505): unsure at all n locations
ataacggcggngagataagtgagaagtgcgagaaggccgtgtgcgccgctggccagtagctttttctcacctctcactgctcttcactcaccgcccgccgcggatattcgcgcccggcgtatgatttgccggttatccctgcggacgcccgacatgtacacgctctactacgctcccggctcggccaacctggtcgtgcatctggccttgctcgaaatcggcgcgccatacacgctggaacggatcgatttcgccatcgaccagcaacacggcgcggcgtatctggcaatcaatccgcacggcgtggtgccgaccctggtggtcgacggcgtgccgcacggcgaagcgccggcgctggcgatgctggtggtcgaacggcatcccgaggccgcgctggcaccggcgccgggcagtgcgcaacgcgccgattacctgcagtggatgttctatctcgccaacaatctgcagccgctgttccggcagaatgttctttcccagggatcac

SEQ ID NO: 54908 - DNA, 1182 bp, Arabidopsis thaliana landsberg
catacctaccttggagacatgccactatgccagttgggtttgatttttacctctttaaatattagaatgttaccggtcatctccgagtaggtgttgtgatattatagacgagcaaaaaacaaaagtggttcatgagttttgtcgggctctctccaaagagacaagattgggaaagaatactctatcttctcattcttgttacattgattttgttttattttgcataggcgatgcagtaaaactattaaatatatactcaagggttcaattatcataactggtgtgattgttagagggttaaatttaagatttatataagatgtgattacataactcttgtattaaaagtgtttactgtatttgtatcactcacatgtaatcattcaaaaaatactaagatgaagatacggtaaaacatttcaacatagaaaaagacacaatcgataacaaaatagaacagtacacttgacctaaaccaatgcggtaaacacacacacacttatatacatattgttaataattttgaagttatgctatacaacttattattttgtatatcaatacatattcaaatagcttaatatttaaagcgctatgatgtcaatttcaaatattgaaattattttcaaaactttgtcacttatattatcacttataaccattctatatatcttcccaccgcgaaatttataaccacacttttacaaactaaatttcatacattttccaaatagtattgtaataaacaaaatagtttaaaaataatgtaatttacaaaacaataaatttttaatataaaacatattgatcagcaaaaatgctggttgatgcataaaaaagactcaactacagaagaaatattcagcacacgatatcacaagaagaactcgatgagacaaaaagagcccgtggcatcgatattaaggtaaaacgcatcgtttggttgtcgtacggacactactaaaagacgcttctcacctcttggcggatcctacgagacaaccaaacacagatctgcttccttcttcaccttttttttttttttttaaattttggtttcccttttttttttgttaaagtaagatttattcctccatagttacccaatctccttcttcgtcttcttcagcttcaatgaatctaaaaaacatagcaaaatccaaatcaaattcctaaccaccc

SEQ ID NO: 54909 - DNA, 519 bp, Arabidopsis thaliana landsberg
tgggctattactttgtcttgacacaaaggaatcaacagtcaagacagcgaagatgcttctttcgctttactaagcccagcgcttcagacaaaaccacggacgcaagaatttgccgctgcgatgcacccacagcccacgcttcaggcaaatccgcttcccctatacaaccgcacaaggctaacatcgctttgtctgaacttgccagaagcggctccgctgccggaaataaattgccaaatatttttatgcccttttgcgcagcaaagcggcagataaccgaagtgtaatccggggtgagtaaatgcgtcagcgattgcagcggataccggcccgtgttttgagttagcagtggcagcttgcagaaagcactacccgagccattcgcagaaaagcatgttataaggagtggctaaggcctgcaggtgtatgagcggaaagcgcaggccccgatcagtcagggcaacgcccaaatatctgctaaaatatgtcatgccgaacttgcttcggcaacccattata

SEQ ID NO: 54910 - DNA, 1072 bp, Arabidopsis thaliana landsberg
  unsure (1)..(1072): unsure at all n locations
agaagtatatgtgtaaccagccactattgatgttagagtgtacatgatgacgagagaagtcaacagcattccacgattgtatgggtagagaaaaccggtgaaggccaatgcaaatagagcaataatcctgaagacgaaaaacaagttagaaacaacaataataagaagccaaatgttttttttttggtaagtagaagccaaatgtttatagataatagaagcttacaacagtaataatggaattatagataatagaagcttacaagattagcaactgagtaccagttcctaagattgcacaaagccagctgatgttccgaggacatcgaaatacatcactatgtacgagtttccaacctgcttcctttctctcttcttcatctccgatagagtaactgaaatgcataaaggagaagttaaactcaaaaatgtaaattttatcaccacatccgttaaactacgcaaaacaagaatagtctcctaagaaaaaattgtcaccttcttagttcattcttgagatggcgcatgaagagaaaagatataagtccaattaacaaaacaacaacagttatcgagttgagaaatgagaagaagtgaatcttctggctgataggatgaaacgacgcccgggagtacttattcattcttgtctcagagcgttctgaagtcagattccaagaaaccgagtatgtaaattgaacatcaatctcagtgttctcggatatatcaaccatataactcggatcactaaaactgatgatctcaataactttgtctgcattgtacagaacattgaactttaagtgactgaatatataatacttagtatgctggtccccttgaccaaaataatctccctctacttttccaacaaatccccacaaagggagatcatcgtagtacattcgaaagtagtaatcttgagcaataatatctctgaacctggcaatatcactcgatgntaacgtgttccggcacaatacaaaatgagttttgtcctccctaaatttcagcttatataaagagctcatttaacgatcaccattaagaacttccccaagagtttcctgtt

SEQ ID NO: 54911 - DNA, 1111 bp, Arabidopsis thaliana landsberg
atttgacaatacagagacaaaccatctagaatgtttctgatcgtcccattaggactcctccacattgatttcagtccaaactccttcactctaccctcatctgccaaaaataacatacagaagatgtaaaaatgcttcctctgatcggaacaagcagcatatgtgttgcgatttgcgaaggacatcacataccaggagttatagtggcacatttgatagcaacattgtacctgcaaacataaaagttttaagcgcgaaatcagcttatttcacatagaaattaaaatgttttctgttactaaaagaatctaaaccatagaaaatgcaaagaatcaatagcacttacttaagagctgcttctgcactttcaactgtaaccttgtcatcagtagcatcgcgattcagaatccccaagtcgaagtacttaatgtccaaatccagataaggaagaataagctgcaaagacaagaaatcagacatgtgagctctgtcaaaaaaaaaatgaaccaactgttgcagacttggtgataaattacatccttactttctcctttatcatactccatatcaccctcgtcatttcatcgcctgaatttccacaaaatataaacaaattagaaacattctcaaagataccaaattcagtaagaacataaacaaatgacttataccaatccaaccaattatctggaaactacgatcaaatgtaagtaaggaacactgattgcgcaaagaatctcaccatccattttaacgataggattctgaacctgaattctatcagaaccgcctgaagaagcaaaacatcgaacagctgatgcgcgatgaaactgaacgggaaaagtcacgcgattcctggaatcgccactagagaatataccggaactaagaaatctcgaagaaacgaacgaagacgataaaccagcagaggttgaagaagataacatggcggtgaggctggcacggtacgtgaaaacgccgtgcgtgagcttatttagcattcgaggactccgacctgaacccaaacttttaactttgatcactgaatcagtgaatctgcagctttcggtccgaagtttattgctaaagtgtgctctgagctctttaataa

SEQ ID NO: 54912 - DNA, 252 bp, Arabidopsis thaliana landsberg
aaacataccgaattaaaacgacattttggctacagagattagtttgttagacgttgaaacaggaaactgaatcgactaacagttattggttacgccttttcggagcgtctaacactcaacaagaactgtggcggtgactcgacacaggagcggataatccgcgcgcattgccggacgggtagcggcctggtccgaggcgcagtcgcactctctgcgcatggacggactgtcctcgggctggggtcagacggt

SEQ ID NO: 54913 - DNA, 977 bp, Arabidopsis thaliana landsberg
aatgacagtataagccgaaaaatattcgaatgcgatctagaactaatctgaaaccaaacttctcaaatcatttacatttgattagggcctaaaagtccatccgtatttaaaaaaaaagtagataacaaatgcaaaaatacaaatatacattactattaaaactcaatctttctgattatatgtggatggagaagctgttttgcagtgtggatttgaattttgaagttcttgttcaaaaaagaaaagaaacttggtcaagcttcaaaagaaagaaagaaataaagacaaagtatacaaatacgttgacttcaattaatatgaagatagaagagaaagatatagaaatgcgttttaaattggcggtgggagatatgtgattcccttggtcccgctttctcgtttgattcggtaacctaaaccttctccatccaagaagacacaaacaaggaagaaattaacctacgtacgtacatcatttgaactacttatatctattataaatggaaaatctattttcttcttctctctcttttaaccgaaaaaggaaaagtcctcgaaataactctttaatataattcatgtggaaaccttctatatattttttgcatgcttttttgaaattaagtaatggcatactaattagaagaagacgaaaaataatatgtctaagtaattgagtttcgtggtcaaggcaaatcaagattgcattctttaattaagtgtacaaattatgatgtaagaaccgttatttggcataacctaatatatattaaaaactgatttttttttttttaaacttctgtaagaaatggttttcttaattaccaatcatgatctattattgtaaaatgtgtaattttgtgttgcgattgaagtgttcttagataaagatatgtcatatgcatgatatcatctatttgattttgagaaaataaaaacataacatgagaacatcgtagagagtaagatacatgaca

SEQ ID NO: 54914 - DNA, 545 bp, Arabidopsis thaliana landsberg
actaacattttctataccgattaattaactacaaactcacgagaaaccaaattaagcatcctagtaaaaaaaaaacaatggataaaaatcgaaaaccctttcttaataatcgggaatcggaagactaatgatgtttccatacaaagtacaagcatgctggatttcgttttattactaacgtgactgggacgaagtaaaccaaaagataagcgagtccagaacgaattaaaaccacatcaaaatcaagtggtgaacttgtaaattgttatgttctcagcaactgagagacttacttatctcctccaccacgactttgactgtacaaagaggaaaccacgatcaaatgtgtaggttttacttctctgctaatgtgcttgaaacctgttcttcatctcctgtggttgttttcaggatgtggtctgagttagcctcaggtgtgtcttcttcactcggaggtacaagttgccagaacattgctagatacttatcccactcttccacaatcattgcccctttgctgcttcccccgtttcttcctatgataa

SEQ ID NO: 54915 - DNA, 1187 bp, Arabidopsis thaliana landsberg
gaaaccagtttctgcattccctcccccaaactacagatttttttcgtttccagagaaacagcaacgggggtggggaagatgcattgggagagaacgaatgaaaagaggaagaaactggttcgccattagacctgctctcagaggaaaacgacagattttgctctcgatggaaaaataagactttgtattttcctctattatataaaaagaaattaagacaacaatatactttattatttatttaatgttatgcaatttaatatctgattcatccttttgtctgaaatgatgtgactttactttattttattttattttattaagtttttaacagaaaaaagcataaaatgacaagttcgtcttgggataatatatattattttttgtagttcgtgcattatgaattattaatactatttgaacaataattgattaggtttgcgttacccaaatttttatttaaatgttattgaattcttttgctatatagactaattttagcttttgagtatcacaatacgttggattgttttgtttgtcttgaaatatatgttgtctagcaatctcactaaatacgatgtccagaagcaagagtaccatcatcatcgtcgagcatctttgtttatgaattacgacctaaagtcttctttaaactaataatgcaatttgtatgaacaacgtttgcttgctttaggaagaaatggttgcttctatgaacaacgttttgaatgattattgattattgtataggcgaaaacaaaatttggaataatagtttgatgcttagatccactcatttacattaaacataggtaagcattgtgattaatatatttattgttatggatcgttatgaattttctaaactgtcattctcatggacaaataattcttcggcagtgtcaatctcacggtttaaagtcttatcgatttaaataattatgggaaagaataatacttatccatctaatccactcatgtggttgtgtcatttctttgagattagtgggtatgtattagtattacaggcatgtagttatgtgttagccgttgtccgagatttttaaattggactagtatacatttgggtcaattacaggtttattcgttttttttgaaaatgaaaacccgatttttttttattttccaaaaaaacgaaattttttaattccaacgaaacttcgttt

SEQ ID NO: 54916 - DNA, 1320 bp, Arabidopsis thaliana landsberg
  unsure (1)..(1320): unsure at all n locations
agtcaagatgtttgaattgtgtcttagttaatttgcatttcatttgatgatatacatggatccattaatattgacatggtagccccaaacataaaagacaatgtgggaggattaatttagtgttttgtttttaatgtgaagtttgatttgattgtactagttcctagacaattaataaagtactggaggaagagattatagcgcagtaagggattaaagaagtcccaaacacgaagtgtccaaatattaggaaggaatatatatggaaaatgtaaaaactacttcaatgacattgagatcattgaaatgacaaaagtaagttaaaagaataaagagacatttgagaaagagaaaaatgaacaagtacacaaagaaaaagaaaggaaacaatatttctataataaaaattatcaacaacttcataacataacttttttgatacaccggtctaatatgtttggattttatcaataagtcgacagaaacgtatgcttatgtttctatgaagtcatgtgcaaggcaattccaaacatgaagtcacaatgagaatccaattgtctttgactcgatcaggtcgaattcttttttgaaacgattaattttatcaacgatatgagctaactttgaatatatctagtgacttggtatgatggtttccaaataagcaaagcactagtaaggtagaaaatgtgattgaactataaagagagtgacagtcagaggattcctaaaccacggttattctcgcagaaaaagaaaaacaaaatcaactatgtgacaacttagaagaacaacagaaagttaaagtagatagataaagaggccacatgcctacatttgtcaaggtttcaaagattaaacatattttagaatttaaaataaaataaataataataataatctgcggtgataactaaaagaagaagaaaatgccaaaatcaaatgaaaacccaaattagttaaataatgtctcttttaatttagagtacagaaaacaaaccagaaaagggacaaactggaagaacttaaaaggtgactaattttcttatcgagaaaaaaaaaaaagagaagaagaagaaacaaagcaagaaccgaacacagatctgcaagtttcttttcctcaattttaaagaagtttactaatctgcaaaaacggtaatcaaacccgaacaaagttagaaagaaagtaaactaaaggagatctgttaccagaggaaaaaaaaaaagaaaccctanatctgggttagttatgagaaacaagagctttgactgttaattattacaaaaaccaaaagaatccgaccacaaatgtacttgtta

SEQ ID NO: 54917 - DNA, 214 bp, Arabidopsis thaliana landsberg
aagaaagtttattaatatttattagcaaacctatatattaaaaaacacacatcttatctcaaaattggctctaatacaccttaattttacttaacaaaaataatggtttagaaaaaaaaaagtaaaaattctaaattacaaaatctatgggctcagcggaggaagcggtggaagtagcggtggtggaggaggaggaggatgaggaggaggagga

SEQ ID NO: 54918 - DNA, 896 bp, Arabidopsis thaliana landsberg
aatacgtctcttcgaaaacgatgtcaacagcacattttgaaccaaatgttactctagtatcgtcgatacaatgtttgtggtcaactatttaggcagttaggcttcggtaaaaataagagtgaacatcttgaatacacatttagtcaagatacggaaaagtctcctaccttctattgttttgagagagcttcaaaagtaaccaagaaagctactttaagaagggaagacagaaattagtaacaattatgctaagaagtcgtgagataaagtctagacagcaataatatacgatgtaacgtattaccaagaagacctactaaaagacgaaacgataactatgacaagctgacccaaaaacgaaatcttaaaagtcagcaaaagaaaggtgacgacatttcgaagaacaatctaatgttcgcgtaaatgaagtaacaaaagcaaaaaaaaattatgataagcgaatcaaataatatggatcgaatttcagatttaagaagaggatttataaagtaaagaaacaataaagtggaaaattccgactttataaaataataatttattgttaaggaaatcaataccaaaattttattcacatgaataacataaaacataatcaaattaaaacaaataaaccatatatgatatatactaaaaatatagataattgttcatgattaaaatagttagaataaattatagatacttcttttacattttctaaaaaaaatgattcctaccaaaaacatatataaaaaaaaaatcgattatgatttgtgaacgtggttggatagtattctttgacaatccatgtttgactttgccattttgatgcgtgaaatatatgtagcagaaagaggttaattacatttatttatttttggagaaaaagaagaaaa

SEQ ID NO: 54919 - DNA, 377 bp, Arabidopsis thaliana landsberg
  unsure (1)..(377): unsure at all n locations
aactgatgctgccttatatctagcaaggcattaggagttttacaaatttctacatttgggctatttggctaacgagtgaatgaatgtatccttataccatttgtgtgcttcgcttgaaatttttttggagactgtaatgtcaaggaaggttgtggttaatagaggagttatagaagagttttgggttgggggatcaagtatgttgcacagattttatttcaatttgttcttaactatcgatggcccggttattacatcgaggacgttaatcagatcaaagtctctttttttccagtaccaaattacattctcaatttgtatactttttttcttctttttctccaaaaataaataaaattaattaaacncttctgcta

SEQ ID NO: 54920 - DNA, 802 bp, Arabidopsis thaliana landsberg
aatttattacttagtctcctctgttcccatgtcgcttccatcacctcctcctgtcacacacacactcacacacacacaaacgcaagagattgttcagaccagatgataacataacatttccaatcaaaaatgtttcaatttgtctcattttttttttttaatacctttcctgctctgctagcttcaagtaccattctgagatggcgtttcgcattgaaatggtatccatgacgcaacatctcccgatacgcataaccaaaatcatcccacttttcttgttcagcacacgtgtctagcatcgtgttgaacgtgtacgtgtctggcaatactcttgattcgaaatccgagctgttttttatatgatttccgtcttctgacatcttctggaaaagttcccttgcttcttcaaacaatccgccttgtagataagcttttagcattacgttgcaagtgactaggttcgggctgcagaccttcttcatctgatcgaagatgtaagctgcattcttgatgtttcccgagtcgacgcatgcttggatcaggccagtgtaagtcaccacgagaggtttatttgcaactctacatatcttcttaagctgaaattggatggtatgaacaagatcagccttgtaaatcaaattctcgataagcttaaggactacaggatttacaaaaatgtaccatattgagcccttcattacaccttcctgcgctacatagacagcgagcaaggtcgtagtaaagaacagctgatccaacaataccacggctttccatatcctcaaccgtatgtcggcctgtc

SEQ ID NO: 54921 - DNA, 964 bp, Arabidopsis thaliana landsberg
gctgaaaaaatgatggggtcaacaccaatggatctggcgagatcaaacttagccaaaagtgggcagttcagccgcaatgcactttgtccctgtggttccaaaaagagatataaaaggtaaaaactttgaagagctttcctttttcccggcaaatacataagactgttaatcaaagttgcacttctatgtaaattcatcattttgttgcttttccatttatcgttgtgttgatatatttgcactctcttcttccttgaagatgttgcggaaaggattgaagaacacagaagttgatccaaagcatctaaagatacgagctttcttttgtttgactcttttcttggcttcatttactatttaagattgtagtatttgtatttttttaaggttatcccataatcagttcatctgaatactttatttttgaaaaatagttcataacctaagttaaagtcacatgtttgctaagtatatcatttcgttgaaagaaacccaatccaacggctacaaaacagaacgtacaatagtgaatagttgatggtcaaacttgagagcagtctaaattcaaatccaacggttgagatctcttgaattgatctaaggctaaaaatcgaagtcatacgtcacgaaataagaatgctcagtgaggttctttctccctcccatttctggtaaaaattgtctctttctctcttcttttctttctacaaaaacagaaacaaaaataaaaagtaaagctttctctaaaaaatctctcctttatcttcttctagctcttctttgtgcctctttcaccatgctgagtacagagagaactaagttcagatccatggaacctgcaacttcttcaccattgccacgagacacgtcggagcaggatcccgcgctggcgcagagtgaagatcagtctcaaggaaggtgtatgtttttctcttattcttcttactctggaagcttccgtttg

SEQ ID NO: 54922 - DNA, 316 bp, Arabidopsis thaliana landsberg
  unsure (1)..(316): unsure at all n locations
ccggtccaacgccggaaaattgnnnnnnnnnnnnnnnnnnnnnnnnnnnnnnnnnnnnnnnnnnnnnnnnnnnnnnggtggatctgaaacgtgtcccgaattctcctgaccgttcaagcaaccccgtttcccctttgactcgtatgtcaccttttttaaaaatcctttctgatccacttttttttttatcttctatgcttgtgttatgagcagttaaaaccctatatattcatgtaaattaaagactttgcaaggtgatacatatgttcatagtcattataagctttttttaataatttaattttttaatttggac

SEQ ID NO: 54923 - DNA, 741 bp, Arabidopsis thaliana landsberg
acaaaaaagaaccgaaccaaaattatcatacactcaattggttcctaaattctaaatctaaacctaactaaaatatttttgttgcccaacatgtgattattgatccaaacattctagctatttatgtatcgaataaccaaattaaatatctgaaataccaaaaaatactcggcaaaatatcaaaaataccaaaaatatgtaaataggtcctaaacttaagaacaaaaaacactagaatcgaaccaaaattgtttcggttcctacatagatgctaaactctaaaaccaaagaaaaacaaacataaatgaatgaaccgaaccgaatccccaagtcaagcatatgccatattaattagagttttcaagtcttattgcaacaagggtttggggtctagacctaatcctatatgattatattaaagaagaggtcaactaataataggacaaactcttaacttaattatcaaataaattgggtatgttgtatacatcaagcctatgccatgttattcttttaccctacacataatcttttaacttataaataaattttcaaattaattatcatttgcattaggatggtcattacctaaaatttattaaattgacagacatgaactagtggatgcagtatacaaagttagaggagagaaaaaaacaacaacagaatctacagcacttgtagcaaaacaaagtattaggccagtagaaaaatttaagttcttaccgggtcttttttcct

SEQ ID NO: 54924 - DNA, 1037 bp, Arabidopsis thaliana landsberg
catcgagtataattcattgatattgtactaattataataaagagtttggtacatctcgtttatcgggattaaaatcaaaaacaaaaagttattaactataagtggtcgtgactcatgcacgatgataatacattgattcatacctaataagcttttctagtaacccaacccatatcccaaagtgcttaatattcaacataaaaaggtgaatccatttttttgtgccgtgaagttctatttgatttcacattttttcggaccaaggatcatgatgagtttaataagaatgaatctcttctccaaacgagatttaaaatccgatatgataacgatacaaaattctagccgattaagctaagaacattaaatgagtgtatatctttttttaagcataaacctatacatactatacacctatacatatatattagtgattgtgtatacatagatatgccaaactcaaagcttccaaaatgttatgacatgaaaagaagagaaaactccatggaaaccaaggttccatgcacatggctttacatctctaattttaggtttcttcttcccacaatcccttctagtgggttttggtgggatcctctataatattttctctaatataataaagaaattttcttttggcaaactcaaaaacttaactcatagccaccaatacgagtcgcttttagtttgtttactttcaaaaaatgcactttacaattgtgatttcaagtaccaatgaagagcaaaaagatctttatcattctagccaagttagtcaccatcacttggctagcatagcctagctagtttacaaaagctaaaatcgcgttattttctactttattaaagctaataaaagccttccttaatcatatacctatcacatattttattgtgatggttctattgcctaatttaactttagatatgaacacattaattgagatgcttctttaggttgatattaggagtaaacaagaagcaaggcgttaatatatggattttacatgtaaagagtctagatgatcatccatgat

SEQ ID NO: 54925 - DNA, 506 bp, Arabidopsis thaliana landsberg
gaggatcccccatcacatccatactctgattaatcctgtatgcttctccttttggccatcttggctttacctccctacttgctgttacctctggtggtattcagaactgattccaatgtgatacctgtgctcttgtcccatacctagacactccatttgcgattctataaactactgaccaatggaccatgggccatgtcagagtactggtcgctctcctggaaatgagaggaagaggagacctaccacctctggtttgttcctttggccacgttttcgtttctatttactgaattgcactgtttctgggtcccctgctcgccccaaaatctctcacctcgctggtaaactccaacggcgaccaagggtcaccctggcgcccagaccagccacggaaccacgccatcgaatgcgcaagtacggtttatctgtggccgctaaaaaaacagagaaagcaacatcccagggagagagaccattactgacgatgagtcagtgatgacatt

SEQ ID NO: 54926 - DNA, 620 bp, Arabidopsis thaliana landsberg
  unsure (1)..(620): unsure at all n locations
ggtatcctttattcttccataattcgaacttcttttaggaagttaagccttgtgacatgaaatggccataaataaatgctagttgccttgtcttcttcttcttcagtttttttttttttttttttttttttgataaaaaccttgtttattctgaaatgattagtaatctatttcttgtatttatggcctgcaaatgatagtaacattttgcctttataagacgcaaaagttgtttaaagcttgttcactgcagaaggagtttatgtgttgaaaaaattcggaacgatcaagattagatatattatacttgttcgaatcttaggtgtccacacacacacatatatatatatatatatatatatatataatacggtttaagaagtttccttaagtttaactctatggtgaagaacataaataaataaataaaaactgaaatataatagcaggtaatcctccaagtgggtgtgagaaaagaaagagttctaagatattatttgggattgaatttcttgggtttgcggaagtgtttccttcagactgtccaaaatcgnattatttcattttgctttttagtatataaataagccagacaatgagagcttttccttcactgcaaa

SEQ ID NO: 54927 - DNA, 769 bp, Arabidopsis thaliana landsberg
accggatgcaaaacgtatagttactttttctaatcaatccgattatttatcattcaggtaaaattttctcacaatgagcagattttacgaattttaattggtgacatcaattgtagtatgcaaagcctaaggtcttaaggcttatgttagcatttggtaatctgatccacatagaaacagcatgtaagaacactgtaaatacaacagatggagatttttataaattcttgtgggtatatatatatatataggaatcatgtctatgataaaggagagggaggtccaaaatcaatcgagcttaaagaaatcggtcctcgatttgagttgcggctctaccaggtacgcattctgcttaaccgaatcaaaactgttttcctcgagtaaaataatggtttgataaagaatcattctagttccttagtaacaatgttgtttctgtgtaatgcaattatttttgcaggtgaaattaggaactgtggaacaaaatgaagcagagatcgaatgggttataagaccgtacatgaacacctttaaaaagcgcaagttaatcggtgaatgatgaataaacggaacagctttgaaccctttatctaaattctgttttacttatcattctgttggaagagctgttcaatttttgtgtccttagagaaaattgcgatgattttgttttaacgtttagattataaaaacaaaattttgttgtcttcaattagtatttatcttcaaccatatactgttgcgtgagtcataataaaaaaatttgaat

SEQ ID NO: 54928 - DNA, 528 bp, Arabidopsis thaliana landsberg
ggcgacatcaaacatccgccaaaatgcctcgcaaatcctaaaactacgtcacggatcgaagagctaaccgagaaccaaattgagaccaaaccgagaagcaggcctaagctagggtttcgtcggatcgagaaggggtgggagaggttaccttaggctacctggggcggcgatggggtgtcgacgacaaggcgacgacgaaggtcggcattgacgcggtccggagtggcagccatgggcggtggctgcgaaaaccctagagatgctggttgaggaggtttgggaacagaggagccgaagcgagcggacgcgtatcccgcccgcggccccgccccacatcatgctgtcggtgccgttcatcatgctgttcatgatccagtcgctgcttgccttgacccggctacggcaggactcgtccagctcgacccgggcctcaccagcgccggtggcacggcggccacctgcgcgatgctgaggctggcgcctcgatcttcaccaagggttggcggtactcagccttgtaaattctca

SEQ ID NO: 54929 - DNA, 544 bp, Arabidopsis thaliana landsberg
  unsure (1)..(544): unsure at all n locations
atgttggaagggaaccactagagtggatcctgcgctcgaccctagactgacccgccataaatgactggccgcattaaccatgtctggcatcgagccactgcatgggtgtcggttcgctcccacccataacctacggacccctcaggccgcatagcgctcatgacctacgagcccttggaaaacgcattaatggctcacgcgtcctcggcctatggtgtacttctggcctatcggactagtcctgagtgtgcagacctcccatagggcactacacgacaggctgtgtcgagcccgaggttacgggagccaggggttggcgtacgagaatgatggcgcctgggaccatcgccgccccctcgtcattccaccacgataaatacgcgacaaccaggcaaccctagaccccgcaagtacgcatggcctcaccnnnnnnnnnnnnnnnnnnnnnnnnnnnnnnnnnnnnnnnnnnnnnnnnnnnnnnnnnnnnnnnnnnnnnnnacctataaaaggaagcgatcgccttcgggcaaggggataagaggag

SEQ ID NO: 54930 - DNA, 608 bp, Arabidopsis thaliana landsberg
  unsure (1)..(608): unsure at all n locations
gagtcgccaaagaagatgaggtccggtacgtagacgttgaagcgggggataaaacggtcgatgaagctgttcccactgccacatagcgttagctccgatcccgtgaaggaggaggagcgtgggcttggtgtggatgtgagtaagtgggatccaacagtggaagacggtgccgtcgccaagatcggaggtagatgatcggagaccagcacgagagaagctgtattggtaacatttgttacgagaagacacgtagctgaaacaactcgccattgattctcttcctcttctgatgagacttgcagagacagagacaagtacaagtgaccttaataataataatataattaaaaaaaggtaattaataagaattggattaaaaataattacaataaaattcttagtgattacgtgacatgttttgattcgttacaataacaattttttggtggacttaccgtttctgcctttgaaattttattcccacaagattagttcaaaagtaataaaagttatgtgatagagacanatttaaaattactattaatgtattttttgtttctgatacagtgaatgcatatctatgttaaatatttcaagggaaaggaaag

SEQ ID NO: 54931 - DNA, 1362 bp, Arabidopsis thaliana landsberg
  unsure (1)..(1362): unsure at all n locations
ctttagagtgaatacccagaagctgcatagctttgttaccaagtccaaactcgcgcgcgacccatatttcgctacgcaacttgtcagattctatgcgttaaacgatgatcttatatctgctcgcaaactgttcgacgtatttcctgagagaagtgttttcctttggaactctattattcgagcttatgctaaagctcatcaatttactactgttttgtcactcttctctcaaatactgcgttctgatacaagacctgataacttcacctatgcgtgcttagctcgtggcttttcagagagttttgatacaaagggactgagaggtattcatgggattgcaattgtgtctggtcttggttttgatcaaatatgtggcagtgcaattgttaaagcttattcaaaagctggacttatcgttgaagcaagtaagttgttttggtcaataccagatccagatcttgctctttggaatgttatgattcttggatatggatgctgtggattttgggataaaggaatcaatttgtttaacttgatgcaacatcgaggacaccaacctaattgttatacaatggtagccctaacaagtggtttgattgatcctagtttgttactcattgcttggtctgttcatgcattttgtttgaaaatcaatttagattctcattcttatgttggttgtgctttagtgaacatgtactcgagatgcatgtgcattgcttctgcttgtagtgtgtttaatagcatctctgagcctgatttagttgcatgttcttctttgataactggttattcgagatgcgggaatcacaaggaggctttgcatctgtttgctgagctgagaatgagtggtaagaagccagattgtgttcttgtggcgattgtattggggtcttgtgctgagttatcggattcagtctccggaaaagaagtgcacagttatgttattcgactaggactagaacttgatataaaggtttgctctgctattatagacatgtactcaaaatgtgggcttctaaaatgcgcgatgagtcttttcgcaggaattccagaaaaaaacattgtttctttcaactcccttattntgggtcttggcttgcacggttttgcttccactgcgtttgaaaagttcactgagatccttgagatgggattgaaaccggacgagatcactttctctgctcttctttgtacttgttgccattcaggtcttttaaacaaaggtcaagagatctttgagaggatgaagagtgagtttggtattgagccgcaaacagaccattatgtttacatggttaagctaatgggaatgaaaggaaaactagaagaagcatttgagtttgtaatgtcattacaaaa

SEQ ID NO: 54932 - DNA, 410 bp, Arabidopsis thaliana landsberg
actactgaatttgtttttatagatcgtcagccacttggcagtcagttctgtttcgatgacatcagtgggtctagatctgacggcagtagggtcttgatccggcatcagcagtcagatacggggtggatgggttaaattgacctgatggactagttgatcaatttcttaagaaccgataccattccaaagttagtcctactcacttactaaataaccgaaacaattctaaatgacgacgttttagcaagcccacttaatatattgtcacagaaaaatctcccatctcgtaggccttttaaggttgcgcagttacaattgatgatctcatgatcctaatttcgagtactttcaagttgcaacaaaaaaaacttgtgattgtagggtgagtactcaataaacccgttttgtgt

SEQ ID NO: 54933 - DNA, 599 bp, Arabidopsis thaliana landsberg
acccactcctccaatcaggcttgaacacttcttaccatcagtcagaccatgtcctcgcctttgaccagccatctacatcactgcttggggccgaagaacagttggataaggtttcaggagataatctttgagttgttgagtgtaccacatgtagtgttgtttatcctaatccttattagttaggagtttcctctaataatgtgatcacaagtcgttaattctctaggcactatcacgagcatgaagaatgaatatgtctgtgttgtgctgtaatttggtaaacacaaaacaaaattactcttattcccaacacactacattcttctaaagctactttatcaaaacagtaacgcatgccgcatttaaacatacacagctgaataacctagcataaagttagctaggcctggagatgatctcaaaacagaacattacaaattatcacgttagtgaagcctgcaccgttctgaaggtttgcatatttgctggtgccttgataataaagactggtgatgcgatctccaatggtcttgtcgatgacggtaatgaggtgagtgcacgggttgtgttctttatggtattttctagtgttacgttct

SEQ ID NO: 54934 - DNA, 894 bp, Arabidopsis thaliana landsberg
  unsure (1)..(894): unsure at all n locations
cttcctaacattgcaacgctcgaagcaaattaactctagaactaagtcaaggatatttcaaattgtttattactaaaatgcttcgaatttcaacatttgagattgactttaagtgattgcaatggagatacaaaaaataaagaaaacctgaaggattaatagaccttgagcttagcgccaattttcttataatcacttggttcaagccctgggcagtcgactttcaccaatgaactcagttcaaaggcatccctcacatctttgactagcgacacgtaaactccatttttagctgcaatgcaaaaccaagacaataataataaataacagccaagtgtctcacctcttctagcacactatgttccaatttacttcagtgaatgccgaacctaacacaaaacaggaaaaagtagaactaagccaaagataagatacacttacacaacttgcatataggcctaagagactttcccttcaccctgaactcatgagcttcctctttcgtcaatccttcaggaacttcttgaataagctttggataaannnnnnnnnnnnnnnnnnnnnnnnnnnntgggtactgcggacgtgtacggtaattgtaattcctacccctgaaaaggtacaccacacctccaactctatgaatgatctctcctcctgtcttttcctatataagagcaaaaagttacaaaagctggaagagtcaaccatcactactacaataatctaacagttcaaaagtaactacttctcatgtcaccaaacatctatcaaaacaaaccctctacaggttctgatatttcattcaagtttcctctatatctccacttaaacaaagtatctagtaaaacagatacctcaagaacacgacacacgttattcatatccacagta

SEQ ID NO: 54935 - DNA, 696 bp, Arabidopsis thaliana landsberg
gatcggtctgtttccaatgtggctccaagtacaaaccattctcaactttgtcacactcagaaacactggtgttgaagagacaataccggatagctggttctctggaatctcttctaaagttacttacctaattctagcaaacaacagaatcaaaggtagattacctcaaaagcttgcgttcccaaagttaaacaccattgatttgagctccaacaactttgaaggcacttttcctctctggtctacaaacgcaacagagctgcgtctttacgagaacaacttctcgggttctcttccacaaaacattgacgtcttgatgccaagaatggagaagatctacctctttagcaacagcttcacaggcaacatcccatcgtctctatgtgaagtctccggactgcaaattctgtcactgaggaagaaccatttctctggtagttttccaaaatgttggcaccgtcagttcatgctttggggaattgacgtgtctgagaataacttatcaggcgaaataccagagtctcttggtatgttaccttctctcagcgtcttgcttctgaaccaaaattcgttggaaggtaaaatcccagagagtcttcggaattgttctggccttacgaacatagatctcggaggaaacaagctgaccgggaagctttcttcatgggtaggaaagctgtcttctctattaatgct

SEQ ID NO: 54936 - DNA, 1085 bp, Arabidopsis thaliana landsberg
agacgttttcaatgctattaggtcagcttgaaaccgaatggactatttagttctgtcttttctattgtgctaggttatgaggcccttagcccatttacatattgttaatgttgtatagatcaattaggtctaagctatcttgtatataaaggtattgtcttctaccgtaatcaataagagtcttctttcacaacttctatagattcttgacatggtatcaagagcctaaacctaactactaaagggttttgtgttcgatcttacaatctctgcttcagctataggaaattgtcttctctgttcttaatctaaaaagaaaaaaagaaaaaccttcaccaaaacttcttttcaccatgagtaccgaactagcactgctgcacaagctcgtgttgaaacaagacgtactatttctccaaataaacattcctaatgttttcacatgtttgtagttgtgttcttcaagttaacctttcgtatgttgtgattaaaaaaaaaaaaaaaaaaactctttaccaattttatgttttcactttatttcaacaaaaaaacaaaaacaaattatgttagttctattttgttaattccaatatttatttcaattatctgtaagaattaagatccatcttcatccaatggtagagagagcctataaaataccacggttcaagaaaaagcccatttagacaagggcttgttaattggtatatttatggtcattaaaccaactaaattgaatttaggagattcggtttggtttcacttaaaccgataacaatgatcgtaaaatgtgaaaaacagattaaaacctcacgaaaagctttcagaaatcctcgatcctcgtgtcttcttcactctccaagaaaatgcctttctctttcttctcccgcaagaaaccatctcgtcgattcaatgatttctacgaagactggtcaaaaaccctaaccgaaaactgcctccctctcctccgtcaatcactttcctccgccgcttccgcttccgtcctctcctccaacgtagacctcgtcctccgtcccctaatattatcccacgaaaccccagatcttgctgccgatcgcaacaataaa

SEQ ID NO: 54937 - DNA, 1203 bp, Arabidopsis thaliana landsberg
aagagagataatcaacaatataaaattgtatggatacgatttcatggaataaaattctttatattttggaaaaacttatattagaatctttatagatcgagctaggaataaagaaatatgtgggtagcagaactcatgcaacctttaagaaagtcatgtgtaatattatcgataaattatgattaaaaaatgaataaattcaaaggcaaaatctaaattaaaaacgattttctacacatgtttaaatatctaaacgtgattagtttactttatgaattaccagtacaataaatatttgagaattcttttaagtcttaaactacacaattccaaaattccaaatacagtaaaagtaagggaaagaaagtcttaggaagggtacttacaaatttaagaagtattccttaatgttttcagttttctaaaaaacttgttgtatttctttgataacgccttcatatatatatatatatatatatataatatatataaagcatattttgatcccaacatatatatatttaatgttttataaagcatactttgatgcaacatttctacaagttttttttagttcttataaaacagtggtgtttcaattttattagaaatcagaccaaaaaatggtttcaaattaatatttgcaaatcgagatcttaaaccccaacaatatgttctaaaatttaagatattcgagcatcaccgaactgtatttttgaatcagcattcctagttccttgagaatgagaattataagaggatgatgtgaaagtttatgggcaaaaagttaaagatgatgttcgtggctacgacgtgcatttcttgtcccccagtatcgaataaattgttaatttcaaactcattttcgacaatgattcctataagtactgaaatggaataagaaggaccttgaggaagaatttgatgacagcttctttttaacacaaatcaatattcttacacacggacacaccaaacaacattacaaatttacaatgacatgcatggtcattttgcaaatttttttctcgttttattctaatctaatttcggtctgtaaagttctatgtaaatgtaaattaaagatttcagtaaagacataagagtatcaccatccattaggaaaaaaataaaaatgacgtctcattagaaactcttctgccatgtgacattcttattttatagtaataaaagcattaatat

SEQ ID NO: 54938 - DNA, 1094 bp, Arabidopsis thaliana landsberg
ctccaagccaaaacttatcatgaactctttcatcaagtattggaaatttaacaaatcttcaaactgtgtaagtatgttttgtagtaattattaaaacactgtttcttcatctcttaatcactttagttttctaataattttgtttggagatacaggttattgcagaacaattacataacaggaaacatccctcatgagattgggaaattgatgaaactcaaaacacttgatctctctaccaataacttcactggtcaaatcccattcactctttcttactccaaaaatcttcagtacttgtatgattttatccattttttcgttttgtttattttatcatattttttatataaattatttatggagagattatttttgtgttgaaaattgtggagcaggagggttaataataacagcctgacaggaacaattcctagctcattggcaaacatgacccaactcacttttttgtacattctctttcttttattttcttctttaaattatagtttacatatataaatctgtgtttatatatattttgtaaatgtttttcagggatttgtcgtataataacttgagtggaccagttccaagatcacttgccaaaacattcaagtaagtctatttacgagaaagaatatttgtctgctctgttttactctgttctgagaaagtaacagtgtaattgtgtttttcttttctctgtaatttatccacttttatacgttaccctaattatattatatagtttttatttaacttgttatgcagtgttatgggcaattctcagatttgtccaacaggaactgagaaagactgtaatgggactcagcctaagccaatgtcaatcaccttgaacagttctcaaagtaatatctaaattttcaatattttaaagtaatatttgaatcctagagaatatatctaaactgatttttcttttcttcttgttggtggtgttgttgttagataaatcatctgatggaggaactaaaaaccggaaaatcgcggtagtctttcgtgtaagcttgacatgtgtttgcttgttgatcattggctttggttttcttctttggtggagaagaagacat

SEQ ID NO: 54939 - DNA, 435 bp, Arabidopsis thaliana landsberg
taaataattaaaaggatagatctaaataataagagaaaataagaatctaagtatatatcttgtttatacacacaatgtgtatctcgacaaagtctaggcttttgatcgagtctcctactatactaataccacgagccagtataaaaaaaaactggtagtgatttatcataagtctaacatcgttccaaattatatccatagactaagatgatgtgatgagtttgacggtgcttagagatgtagatatactatagtatgctatcaacatcgatcagcaacagttccacagaagtcttctgtgctcaacgttgcctcagtgttcgaggaactctctgagtcactcccgcatggtcgcgggaaatagtaccagacaggatatcatcgatcaaacgcttcatggtggattcttcagagatgggttaagcagcgggagag

SEQ ID NO: 54940 - DNA, 1241 bp, Arabidopsis thaliana landsberg
tgaaacctaatgaactctccatgtatatataatctctctctctctagggtttaattatttttttctgtaattattaataaatcggagatcgcgatctgaaattctccggtaatcaattggaaaaagagaagaagaaggtattggatttgggatcaggggacatgatcggagaagagagacggaggaggagagaggaggagagaaatggaagaagcattgcaagaaaaaccagaattacagagaggatttgagaacgacaaaggtttttatatacactgcctttttaaaaaaaatcaattttaagtaattttgcttttcttatttggtcaacaaacaaacaacattttatttatttaatcgatgcgtcatgacctttttataagtgtaaaagcatcattcattattagtcacctcttcctttttttttttttttgtttttgtctaaatacaagaacaatttgaacttcctctctcaatttttttttgttttctctctcacttttttttactatgttctaaattatgtttttaaattttgagtctttttattgaattagattcggattaaacaaaattatatagcactctatattagtttataaaatttttgttgttataaatgatagtctattatttactatatacaaatattatttttattaatatataattgaaaaacatccaatatcagataattttcaagtatttgtgggtgtgtcaataccatacaatatatgtcaatttgggaatgatttgcattcgcaaattgtgaaatttgtatatctttcaaacttagttttcttattctcttggtcaaaagacaaaaattcctttaaaaagtaaaaaactttcaaagtgataattttcttttaaaatattttccaaacaatataatatttaaacatacaaagttaggtctttctttattttattttattttgttttttttttcctttaaattttgataaggcgggaaatcctcaaaagctagattttccatgataataccaatattatttacttatatttttttctatcatcaacttgcttttctgttttcttgccacatttgtgatttatattcggaaacaccaaaaattttaaaccagaatctattatacaaaatgagatatacaataagtctataactgccaagtcttatatatagaatgatataatttcatatttattcaacgagtgaaggatatgaagtgtgcttttatatcaagatgaaatgattt

SEQ ID NO: 54941 - DNA, 550 bp, Arabidopsis thaliana landsberg
  unsure (1)..(550): unsure at all n locations
aacgtaaagacttgtattgttccatctacgtcttagtacgtgtatacacatgcacatttaatatgtgtgtgtatatatcaagaagttaatatctgaaatatcaaggagtatataattatagagtagccgatcccaatacggcatgttccatttttctttctatttttatgtgtttggtatttgctaccgggtctgtaatatatttacaaatgttatttttaatgaggttatgcgtaaaataatctgaaatttacatgtgttttgtgttctctaatattgattagttaaataactagttttattggttataaaactagctattgacatgtgatttgtcgtagttgagatggtgacattgattgctttaactcttaattntgttaattagtacaaatgatttttattgatgaatcaatccactatttttcggctgtttcacttattccatgtttacccaaaccggaagagttgctctgttcatccctttatcgccagtaacgaatctaactctttagtcaatatgacttagttattaaaatttgagattgca

SEQ ID NO: 54942 - DNA, 856 bp, Arabidopsis thaliana landsberg
aacgggatcttggccggaacagcgattgcagccgcaatcggcgcacgtgcttatctgggtcgatccataaattccggagccgggtcgtcggaatcattcccgcacgttacgcttcctctcgattcgagggtaagcctctcgtgaaaatcctcggcaaacccatgatccaggttcctccatagttgtctctttttcagtatctctgtttattctctgtaatatcgctgtgtcggatctggcttagtttggcaaattttagtcgaatttttgtgcactgcctttaagttttcagatcacacattcaagtttatttttgttaaaaagttttctactttcgttaactctcaatctggtgttagataaagtttgaatcttttgtaactatatattttgtgtttctcatttttgttggttcgttcttgagcagagaacttgggagaggtcgaagttagctactacgcttgatcatattggtaatgttgtctcataatctttatatatgaaaaatctctactttatgcatctaagatctcttctatgaactttgcctttggttttgattctttctttcaacttgtgattattcagattacaagatgtctgatttctgtgtgttattaatttatcagttgtagccactgatgatgaaagaatcgcggagtgttgtcgtggatttggtgccgatgttatcatgacttcagagtcttgcagaaatggtttctttactgttttcttcatagttttggttttttatttggtgggatatagagcctctggcttaagctctgtatcatttgggtgatgtttaggcactgagaggtgcaacgaagcgctagaaaagctggagaacaagtat

SEQ ID NO: 54943 - DNA, 885 bp, Arabidopsis thaliana landsberg
  unsure (1)..(885): unsure at all n locations
tctacttctgctaacgtactacaagtagaaattctgctgaaaaaagaaaaagaaaaatctaaattcccgacgccaccatttataatgcgtgcattctgtttaaataatggctagagaagaacatggccgtaaatccgtaataacacttccaggttctttcattctaacataaatttatgtataaaataaagtttttaatctatccacctgactaattaaatttttattttcataaaggaaagagttttcctataaaacaactaaaaaaaaaataatagtatcagatttgaaatgacgacttcagtgacgataattttactgaattaccatcacgcccattattacgttttattttataaagcaatcttttattgtgtcctaacaaaaaagctaacttctaaattcttactagggttcaaagacatatttttttatcgaatcatgtcgtatgtatacaaaaataatttattttggccaatacaacagatagttgattagtgttcagaaatacccaactctccaaaaaaaactactctcatttttttgtgtatggtatgatcctagattaaagaaacgtctttttttttattctctctgaagcatcttattgacaagaaaataaataaattccttggatctaaacgtcaaatcaaatgcattacagccatttcttctcttaaaccctataaatatacatgttcttctcactttatgcttcatcaaatcaacacaaacatatcccccaaagcagaactaaagcaagcccaagcttgtctctccccattccaacacacacattttcatatcaaactcaaaacaatatttccttaatttctttcacttattcttcatttcttcngctaaattcttaaccaagcaatcgag

SEQ ID NO: 54944 - DNA, 593 bp, Arabidopsis thaliana landsberg
gctctaacgtgtgtgattctaccagttatttccttgactgagtttcctaaacaatactgatagatataaagttttaagactggttcacaataattgaattacattggatttacctgagctttctgttcaaatctcagttgctgatatatcttagggaacctcaaatcgtagcatacagtaaggcctaagcgcccgacagggctgtctacggaaacaatctttgtccctgacaaaatacaggatttaagcagcacatcagttcatagacttcttaactgtgatggcagaggttgcactaaaaaacaatctgtagagattatcagcgtaatgatgtgacggaaaaagtgttatcgatcatggatctcagtggtttcgcgcttattatcaggttgtgatacaacttaatgtactctaaacatcttattaagactcaatattccacaaacaaatctttctttactctcttaaattcatataactcaatgcatttttccaaaagcaagacgcataacagatcttttggaatggactactttgaatgttcagacattctatcaagattagattagataagaacattctagtcaggaaga

SEQ ID NO: 54945 - DNA, 520 bp, Arabidopsis thaliana landsberg
  unsure (1)..(520): unsure at all n locations
tggagattgtattgaaggggggaaaaaagnnnnnnnnnnnnnnnnnnnnntaagtaactgacttggatggttctgcaacatatacctttgccactattcctcggggaacaagaagacgaggaaagatcaaccccaccagagagagcaaacagcttcttcttcctcttcctcctccatgctgtcgtagaaagaacctctggttctttagctagtcagaccaccaaaatccaaactgagcggtctcacagcgagcggcaggacgtttcatgagagaatcatgcagtcactgaattggctatgcagcagcagtagcaccaccagattacacgtgccttcctttggtattgccttggttgtcccctctcctgtgtgtccgtcgccagctcctgcacagatcaagagaggagctcctcatcgacttccgagatggcctctcgccggacgcgaatggcggcctccacatgttatgggccaacagcacagactgcatccagtgggaaggaatacctgcagcaacgat

SEQ ID NO: 54946 - DNA, 838 bp, Arabidopsis thaliana landsberg
  unsure (1)..(838): unsure at all n locations
tctggaggatgatgaagaaaggaagcagtctcgtcttggtgttttgcagacagtttacgcgaatggtgcgtctagctgattacctaaagcatttgggtttagatgttgtttttgctaaaactggagttaagcatttacacgagaaagcagcagagtttgatattggaatctactttgaagctaatggccacgggactattctcttctcggaatctttcctatcttggttagtttccaaacaaaaggatcttacggctaaaggtcagggtggttctgaagagcacaaagctgtttctagactaatggcggtgagtaatctgannnnnnnnnnnnnnnnnnnnnnnctaagtggagtgctcttggttgaagtgattctacaacacctgggatggtcgatagagaagtggaatgagctatacaaggaccttcctagcaggcagatcaaggtcgaagttccagatagaacagcggttgtgaccacaagcgaagaaaccgaggctctgagacctatggggattcaagatgctattaattctgaaatcaagaagtactcgcgtggcagagcttttataaggccatcgggtacagaagatgtggtgagagtatatgcagaggcttccactcaagaagatgctgattctttggctaattctgtggctcagctcgtcaaaagcttccttggttcaagctaaagaaccatctgaatttctgcaagagtatgttaatgggagatttttttaattttcttgttcacctcttagcttttacatcttttgtgtaacccgaatgacaagttttcttctcagcttcttttgatttacttcgtttctcttctagc

SEQ ID NO: 54947 - DNA, 907 bp, Arabidopsis thaliana landsberg
tgtttggaacccgcgagagaagttctttaattaaattagtctttcgaaaaaagttatccatttcctttatcaaagtaaatcaattggaaaatctcgtattaacttgatcatccaaatccatatgtatattttcgaataatataaaacagaaattgagataacctatactaaagagagtttcacgtaaaaaatttatattttcacgtaacaaaaaattacaaaacaattaaacaaaaaacaaatgataatagcataggtaattttttgtgacttgaaattcagaacgtatggtaggcacaaacgacggtttggtaacaataaggagaataataataatcttcgtttgaattcaaatagaggaagaagaagcgaaagggtaggctttgatcaaccatgagacattgaagcaggtagagataattctttgaatgcggtggaagcaatcacataatgataaatgcaagattccaattttgatgaactttgcaatgagaacataatattgcttttcaattaaatattagtaaaatatacccttcaagaaaagtagttaacaagtttaatttataatcatgcatttatgcgaaattcttatttgtaggttttaatctaaatagagaaatatacacatatataggaaatattcaaaaatgatcacatgcatgtttaatttttgaaaaatgtggctttcttttataacataatttcaataagattagtttgaattgcagattatgaaatagtatataatttgtgattgttttacaagtaaaagagcgtaagaaatttggtcccaaaaaaaaaagattttagtagggaaatatcaccattttattctaacatagctagggcaaaatattttatacatctaacccacaatagcaaaatcattaatgcattacaatta

SEQ ID NO: 54948 - DNA, 835 bp, Arabidopsis thaliana landsberg
ggccaaaccctggagaatagtaaatgtaaagcagcaaggttcagcaccaccaacatatacatttatttggctccagtatctgccacaccaaaataaaaacttaaagatctggccaaaaaatggcacataatgattgcattctgaaatgctctcacttttctttttccttgtcaactaatgcttcagggtttttcgggtccatgaatctcagatagtacctgaaaaatcatgtaattttgttcagtttctcagtattaaaatcaacatccttcaacaacacactgggtactatattcaacaaggttcaagatcgaattcggcctatcctagaaccatcactatgagagagcatcaaggattctcaaatgggagatacattttttgtaacgaggaggttatatacaagaattaagaagggtaaatatctaccagcaagacccagcccattgtggcatagtgcttgtttctcttttggcaggttttcctgttgaaggatctacagtgttcacctgcaaagtcatcgatcataaccaaaatgtccatggcataggcatacccaaaaactaatcatattaaccgcaaaacatacccatgaaactgcttttgacagtggtggttcccctgttccagtgggcgtaaaatcatttaactcaggcaaagtgaggggcagttcagattctgaaatagcaatagtttcaccagactcatccaaaattaaaatcgggataggttcaccccagtaacgctgccgtgcaaatagccaatacctcaacttgtaatttacctgccaaaaaccttttgtgtaagaaaagtagaacactttttacataatcca

SEQ ID NO: 54949 - DNA, 617 bp, Arabidopsis thaliana landsberg
  unsure (1)..(617): unsure at all n locations
gattagaagatcccctgcttagcagaccaacatagaagactgtcacaaaatggaagtggacttgcgttcatgtacctctcggcttgcctcatgagccagattggtgccctctcaacctttttccctnnnnnnnnnnnnnnnnnnnnnnnctcctccaccgtctcgggcgaggcctcctccattatagtctctgaaccgtaccatcacgtcaaaagagcagctaaattaacttctcagcccaagcctcgcaacctgtgagcagaagagaataagattcaccttcgacagcgctgtagcggacggtcgagagctatctgcgtctaggctcggtgcgggcgaacctatcgtggaagagggaggcggacgacagcaagagtggctggcacgtttggcatcacgctgtccaacaccgacagaagcccaaccccttgcttccgcctctacggccgcgctggtggaagcattgtgctgaaacatgagggcaaatcatattttctttcgttgtataaattgttattaaccttttgcagatatacatttcctgctccaaagctacatggaagataatttcacagtaaaaaaacaacttaacgtatacagcacccaaatgaaaggag

SEQ ID NO: 54950 - DNA, 1058 bp, Arabidopsis thaliana landsberg
tattacaacagtaaaaaaaaaatgaagctagagagtgaaagagagtaataccaagaaaccgaaggagaaggtaccgatgacggaaagagaaatagagacggcggagagctcgacttcgccgatgtgaccgacaaagatattagtgactgagctaactccgtattggcagatgatgttgaaccccacaggagctgctatcatccacaacttggccgactctgtagataagactcgtttcacatcggtccagctcctcgccggagcataatcttcctctacttcgccaccgtgtgtaagcaacggcgtcgtcggatccatctcctcaaaatgattaaccaaacggcgccactcacttctcttctctctctctctctctgcctctctgagtcaaggtttgttgcggacttaatggttggtttatataacaaaccgttgaatcatgaatcatgcattttctctttctttaaaatcaaagaaaaaaaaatcctcgtggaagctaatgataattaaaatatatactcgtggactctaataattattcaatgaaaaatccttaaatattatttgacgatgactttccaccaatccatgcactagatccacaagtatatacatgtctcaatttctggacaagaaatctaatgtgttggttttgtttatgtcttataagattgcagatttaattcgtaacgtaacgcacccgattacctctaattatgtaactaacgaaatatcattaatggttgtgtctattttgcttgtattaatttatgtacgttttgtcttcggagtagataacgtaggtgagggctaatccgtggttcatgaggaaccacgttgctatatcaaccatccataagaatgaaagactatccgaagcatcccaataaaccttaaaagaaaaacctcttcttgatatgacgaccgtgggggcttttcttaaaatgcctttcccctttttcaggtccaaaaagaatcccccgttattttattttaggggtaccgggttggtgaaggggctttggtttaaagatatttttcacccccccaaaaaaaaa

SEQ ID NO: 54951 - DNA, 149 bp, Arabidopsis thaliana landsberg
gctctctcccgttttttattccatcgtgctgacttcgcacattctaaatcattatgacacgctatttttttttgctatcgctctgtgccggtcatatttgatgcatgagcgtgcgttcctagtgctcactcgcactctatcaacgatgg

SEQ ID NO: 54952 - DNA, 524 bp, Arabidopsis thaliana landsberg
tgattatgaaaagaagttggggtccatcacagctcgaggcatgagtttggagaaattacaagccgatctggatgccataaggaaagaaaacgaaagccttaagaaataactgattatgtggcctggggaaggaggattaaattacacatttttgtagagaatcatctgttcatgtgcttccatatctaattgtttgtttataggaatgtgtaatctttttctcagatacatggaaaatctttctgttctgatcaatctcgactactaaagagagcctaaagctgattcagctaagtcacagcaaatagtttgtaaaaagctaggaatagagagacaaactaggcaggcatatagagagcagtcacagcttcaaaaaacgtttccaaaaggatcttcccaaacattctttatgtattttctgtatagtctcgcaacacataataaggtaaaaggtttgctacattgatgcacatctttctgcccacttgtaattgtcaacctaaatttctctgagggatgatggt

SEQ ID NO: 54953 - DNA, 1181 bp, Arabidopsis thaliana landsberg
tgagtaggtttgaggagaagggtacatacaaagccaaagccattggtattagtcactctatctgtcattacgaaatcattcggataatttccgataaggatactgagataaggtatttcattgatgacatgagtaagagttccatctcgcaaaagttgtgcataggcctcaactgcattaatggatccgagcttcgcagtcattgacgtcgtagatcccccgaaaaccatctgatgatttaattgcatgcgagaaatggtcttggttgatgtcaagtttgcgctgtaacttgaagtcaatattaacaccacaaaaacccaaactatgactaagaatcttgatgacattttctgtagcttctcccctgccaagaatgtgcctttgttaaagatcaaaagtatacaaaataatgggatttccattaagactattcaaataaacacttactgtgagcaaacacaatggtggagaatccaaaccagagcatcatactaagttgttgtccccaagagccttgaaactccggattaacggaccgttcaaccaaccaaacaacaatcccggtcaagacgaagaaagctccactcgctagccacaaggatttttcaaaaggatcaaagaaagtccacatcccttggcttttcttttttactgtcaggattccaataccaatgtcagtgtacggcaaagtaaaatcaacatacaaagatctgttggaagtgatggtgatatcaccaactgctgcatcatacttgtctctctgtcaaaattgcaaacacacattattagaaacatacataatcatttttgactagaaaaatgtttttaaactgtttgcattttcacacctgagtagaaagtagataagcaagattgtcattgtttccacggtaaggtatgaattcaagctcgtagttaaaaggagcaatgcaagtcttgaaaacctctacgcagaatccagagacagtattaacacctgtatcaggatcaggacgcaccgacactagatgcgggaccttgtttcctgcggtaactaagaccctaagcaccttctttgcacctttctctgccaaaacacggtgtcttccgatctcccgagacctgccaggccaaacaatctgaattctttagctaaaactaccacccctccataatcctatccttctctggttttctggtcc

SEQ ID NO: 54954 - DNA, 514 bp, Arabidopsis thaliana landsberg
cgtacctttctcaacggcttccaattaaaaaataaaaaataaataaagaggggaatagtgccaagctggcagtccacacgtgcccatgcgaccctcgtatcccggcaactccatcacacgtggaccataaggtcccagaaccttaagattttgtctgtattgtcacgtggcgttgtcagtgaccgtctctcggctctttttacggattcgccccgttggaatcttacggccattgtcctccaacggataagcaagcaatatttatgtacgaataaaatcatttattgattcagaaattcaaattcatgcatgcaaagcaatttattatagagttactccaattagataatggcatgatttgaataatttgtgatttgattttggtttttaaaaggataaagcaatgaataatttaagatagtcacaagacttgcaagtcttgtcacatgagccacctctattgtatagtaccattatgttttggccgtttataaattcgcatttaagtatgtgt

SEQ ID NO: 54955 - DNA, 905 bp, Arabidopsis thaliana landsberg
catgtaaaatacagaaaaaaatgtttttccaaatatattacaaaatactttttagaaaaatcctaaaacttttaggagtaaacgcctaattaatggctgaccatatatatttttattggaaatatttgaatcaaacaaatattaaagtattttttttttgttaatagtggttgtcgcattaaagatttaagaaatcttttttattgaatttgttgacaaaaaaattataaaattttaatcagcatcaaaattaaaactaattagatagagttttgagatctatagctttagtaacttggaatttgtgtccaaagtttaaaagttgctgacaatttatgaataacggagttaaaaagaaaacttaaaatttttggtgttttatcattagacttaaaaggactatactgaattttggaaaagttactgggtcaagtgaataaaaaaatgttaaaatgcacaaaccatctttctgctttcacatagagatcgaagctaaaggccacataacacaacaataacttgttaggatacatatggtgagtggtaacaggaatgtcggaatcaaaggctaggtcaccaaagaggaaccaaacgatattggattaaatatatagaagaaatttattaagaaacacatcgttgtttgagacataagagatcgaagcaaaagcaaatgattttaccctaaagattggagtttgggtatggaaggtcataccttatgatatgtgatggatgcaagtgactacaggaggttgaatctacgaatttcagatctatactttgcttttttggatacgattcttctcttctggattgtgataatttataggtctaggggctaaggcattcgtattttgtgaatgtaccatagccacaatgtcaaaaaaggaaaataaatttct

SEQ ID NO: 54956 - DNA, 1146 bp, Arabidopsis thaliana landsberg
  unsure (1)..(1146): unsure at all n locations
acgttttacaaaattttggcaataatattgataatggtaaaattatatttgtaaacagtttcttccagatttagataccaattataaaatgactttctaattaatatgacaaaataatattaaaagaatattgataatggtgaatttagcaacttttttctgtaattgatagtttaacattagtaaattgttgtaataaaaagtaataataactttaaatatataaatttaaaatagtttattcaaacaaaaaataaggatatgtaaattgaactattcactaactaaacatactctcgttatcttttctaaaaaggttttagatacgggttttttataacaaattttactttaaacgttttttaattttgtttttaaaataaaacccgtccatataggagaggtcttaatctaataatcatataaaagtgaataagcaacattctttgttcgacctctctctttctagcgatgttatacatatatataaatgtgcataatgggctacgggagctcaaaatgtgttttgttttatgcacattttattgggccgctgattcttaaattaacataaacatataaaacgtggataagcaacataatacattatacatgtgaatcatggataatataacactaactttggtttataaatcttaagacgaacaaaaaaaagaagaagattagtttcaatttcattcttacgtgggttggttattatgttaatgggtcaaaaattatcacaggctagggctattataaattcttacaaacaacatatgttggggatcagatgacccaatctgcataatgtatctctgctcagtattgaaccaacaatgctaagtctaatctttgttagaaatagtatttaaaatgtggggaaattatgtttatgttggttaagcagtagttatcatgaattaaatgtgaacaggtttgaaggtcactaacttgtggttctcagcatcacaatcaaagcatagtctccaactcaccataacataaatttagatatatcgtaacataagtagaggtcatagagcctttcaattggaaaagacgaaaaacaataatagtcttatcctacgaaatataacngtaatttattttttcattcattttataatattaaaaacgtactat

SEQ ID NO: 54957 - DNA, 424 bp, Arabidopsis thaliana landsberg
tagcttttcagttttccataatgaaaacatcattaacatttcaactcaaaaatggaaaaagaaattgtttcatgaattttttcttttccatagattctatgatctaagagattaagagtcttgactggtaaaagcagtagaggggtcctcctgtaaacagagacaaataagaagtcatcgaaagaggccctcttgatatcgttcatgaattctgatgcatctacgtacgtacgctctcagtctcatgtgtaagtccacgctcattttacgtgtgtgtggaccatttttttctggaatttctattattttaaagatatttcttacttcaaactactacatgtctggatatcctgatccttctgtattgaaaaaagtttgaattacttttccttcattttttaaactgtcaatatcttatttcatt

SEQ ID NO: 54958 - DNA, 497 bp, Arabidopsis thaliana landsberg
ggaaattttacaaaaacattgctctcatcataccaatttacattactcggcagtgcttcactctagtgattctcacaattcaccatttgattatgacacttataaccatctggttacatttttaatcattatatatcatccttacaagtgtctgaaccaaatggtgaatgagaatcactagagggaaccacttagacaaaaagacaattaatattttgtacaatttaccatttgttcacactttttctttcattcttaaagaattttctcttaagtttaggcttatgtaatttgttctaagggaaaaaatttaaacgatatgtaaaattggataaccattaaacacaacaaaaagttgaaattttagtaaatgcgtttattatggattggctgatatacttcagtctatgacaaccgatacaaacaaacacattggttcattaggatacatacaccgcataatctttttattcgacacctttagttataaactcaca

SEQ ID NO: 54959 - DNA, 672 bp, Arabidopsis thaliana landsberg
atttgaatgctgcagaagtctcaacctccaaatccgcgatccaccatttctatagaggtcagaagcagttgctcaatatcatcactgaccaacctccgctttaccgtcgctacagagactattgcggtcagtttcgttatatcttgacagagttttcgggctcgactccattgattttgattgatccagaaggtagtggctttgtgaagagagagacgaagtttactgtatcggatgatttgattgtaactgctatgaactcgagctcaactatttgcttgcttcagaagtttcagattcacggagatgatctcgaggtgaaaaaaataagtatcagcaaaacagaggtatgcttgtactaatttgtagctacactttttttatcaagtagatatttttaaccgttctttcaagaatttcctttttttttttttttttgtgtgtaatcaggctacgagtttgctgagagcttccttggtaacatcctctgcattgaaaacttctttaaggaacttgattttgaagaaccccaaggaagagatttgaagaaacagatagagattcttgcaaaggaaccagattgttcatgtttagacacaaaagtgctttttattccttgggttgattgtttaaagggtgaattgccaataatccctcatttggaagatgaaa

SEQ ID NO: 54960 - DNA, 758 bp, Arabidopsis thaliana landsberg
taaccaaaacaaaagctaagtaaatccatctgtagcaaatagttgttttctttgcttctgctttactatataaaagattcgctgaaagtgtttatccaacaaaaaaaaagattcgctagaagtgaaaaaacattcactctagtaagaaaagtttgctatcaatagaaacctatcatttttatattttacaaaatatgcatatgttctagttacagtatcaaagaaaaaattatctcattttctaaatttatcaaaattagctaatcatatcatattagaggataatgggatcttggctcatttcttttcctccacacaagacaaatcttgctgcataccttaataatttagatttcctatataaatttatttagttaagaaaacctatgttacctagtatacaactttaatttattttattttggtcactgatagtatacaagttctggttaatatttacaactgaaaaaggttacaccgtttatataaaagaatatatacatctgtagcctagtgggaaatcatctctagtagactgttgataaagtattattggaagcatattttaaaagtgaggaagaaaattgaagggcccaagaaaaatataatgaattttagtgaatcataatgtgctgacgattatccatcccatcataatctatagagtggagagatggctaaagcaagacacaaagatgttcatgcaccttttgcagcaaaggttaggtacctcaaaagtgtaaataaagcatttttga

SEQ ID NO: 54961 - DNA, 607 bp, Arabidopsis thaliana landsberg
acatcttatagctctgaacaccaaacaaaaacttggtgtttactatttcactcaatagagaatacatcacttgattcaatattctaaaatggactgatacaatcaacacaatcagagtcacatctcaggtgaactagaagcatattgccaaaatatgatttcaaagactgtatagttaagttttgttctggatttatccaatataaacccaaaaaaagaaagaaaaaaacaagtcatatcttgtcattgtaaccattgtagctaactagacaagttgtttgactataaagtaacataaaacgaatcttcattggttgcctcttgacaatgtaatgttcacaacctatcatcatgaaggctggtaccaagggtcctacacaactacacaagcagcataatgtggtagatttactttaatgtccccaccagattcaccctccaaaatgggacacaagagggttaaactgtcaattttctagaccaagtttcatcttctcctccattattggcgtggaaggaggggacttagacgttaaagaactactatcatgaatcataatgagtttcacacattttttcaatataagaaaaatcaacagataaatac

SEQ ID NO: 54962 - DNA, 1012 bp, Arabidopsis thaliana landsberg
catactgaacaaagaaaaatatacaacatagtgctttggtgaccactatttttttgtttttctgactttagaatggaagtctaaatgtccgtcaacttttagttgggcctttggctcacattatcggcccttaagaatagaagtctaaatatccttcaacttttagttgggcctttggctcacattatgggactgtataaatgggcctccgccataattagttgcatgtttccatagtggtaaattattcagatcaaactcgagcacagttcgaagttttcagcttctctcagaaacattagtttttcttcttctgttcatcaatttcatcacataaaccctaatttagattttagggttcatctgaaaactcttgcaatatttacaagctattaaatcatcaacaatggataataattaccagaactatcatcatcatcataatcataatcatcaacaacaatggcgtccagcaccaacacagccaaacatatgcccgatttgtacagtgcctcacttccctttttgcccaccgtatcctcctccatcttctttcgcttacaaccccaactttcctcctcctcctcacctcaattcacctcgtcctggattcgattccttcaccggaccaccggttcgaccaccgcaaaatcactatcctccgtggcaacctcaccacggaaatcaatggcgaccagttgccgttgatgttgatagggaagctgatcggagctataaaagagctcggattgatacgatcgcaggtggttctcccggttacggtgtttctgagagtccgagtcctcggatctcttgggaaaatgaacgaaggttgaagatggttcgcgatcatggttatggtttagctgcgccgtccaatatagagatgaatcatcagtatgggagtgaatttaggaatggaggtcaatttaatggtgtagctcctcttcctcctcctccgcctcatcatccgcctccgtacggtggctatttcagcgcgtctaatggtcag

SEQ ID NO: 54963 - DNA, 1191 bp, Arabidopsis thaliana landsberg
  unsure (1)..(1191): unsure at all n locations
tatcatgctcatgttggtggtaatagcgtggtggggagaacgaatgtacgaaataggtatatatgccaaagctctttatctcttttctttgttcattttctatcattatgattagtaataaatgatattcacattttaacaagaaagagtatagtaaattacaaacacgtataatatagtactttgcaatactatgtttcaaaaaaaaaatgtatttgcaggaataatcataccgatagcaattaccatgttcccgttagtgtcagcttttgcgggagggttaaccccaaaatactcacaaggtactaattaaatagacaaaatacttatacatattacatattactattgtgtatggcactaatgttcatttgagttgtgataattctgaacgttttcttattgcaactaattatataattttttgtactttgttcttcctgattttccgtaaatgatcaatagagacgatatcgccctctgctgtcacgtgcaaacctcccgagaacgcggccatgtacgagccctctgctgtcacgtgcagacctcccgagtgcatggcggccatgcccgagccctcgaaaatgctggtgaatcaattgatttacggcaaaatatttaacattataaagataaaatccaaagtgtagtttcttgtgtgttcgttgccttatgtatgtgtcttctatgtggagactccataatggagtgtagagcggaattgatctacgactaagatgtctacttccatatcgtttttacggatgaattattcgtaaacaatctcatttatatgttttatctatttaatactttcgaatattagaactctttatgcagcacaataaaacatatctacatgaaactgaatacccggttttctttcattcaataacgtattttgctttatcagcgatgtcaaatgtttacactttaatcacagtcagaaaaaaacaaaatcaagaaaacaatttcgtatataaaaataagtaattgttgtaatagttaggtcctacgcagtaactggtgactgagagcattctcaattgagaatttttagataattttcttaaatacaaaaactattattattttaatacaatttaattatataattatattaaaaatttaatggaaaaattgtaccaatatataagataagngtatatctttttatttatataaactctc

SEQ ID NO: 54964 - DNA, 771 bp, Arabidopsis thaliana landsberg
atcaaattccactatacaccaatagtcattttttgaaacttctcaaataaaaaatccggcaaaatatgaaaacatattcaatcttttacagaattcgcgacagtttatccggtaaaatttaactcaacgaagtatatatatagggatgaaaaagtccagccaagttctcaaaaggtataataaaactaccatcatattcctaattgtacttttaaattgtcaaagtttttcatgtatatataatcagcaaccatttttgaattcattgaaacgaattcacttgtgaatagttatgttatgacttatgtgtcaaaaagatagattgttcagaacttgtaagaaaattgtaaagttagtgaatggtacgataaataaagaaaatacatgaatactttttttcctttccgaatcttcttccaaatctttagtattttaatctttgtcagacttgtcgatatatctactcgaataaagaaagttttaggtcacaatttaattattattgattattttatttttttccattaccttagcaatccccattttatatgtactgtatacagaccgatgcaatgctttataatctgttgaaattcaattatttgttatcgttgtctcaatcgaccgatgcaaattaaactgttataaaaccggttcatgacttcataaccgaatctaaaaccaaattagattgagtccggttaaaatgatgaaatgacaaaaagggaaagaaacaataatgaagaaaaatgagggtgggtgggaagacag

SEQ ID NO: 54965 - DNA, 927 bp, Arabidopsis thaliana landsberg
  unsure (1)..(927): unsure at all n locations
agagaaaaacttgatatggtattgagtgacgagtgtggtctactgactatcgaatcttaccaaaacagacaaaaaaagtgtacgtacggatcccacttgttgtcataagtcgtaaccacgcgcacttccttgtgagttgtgggctccttgttttatctttaccgttaagttggccacttggccctatttcacaatcgcttcttctttactactccggggattatgattattttggtagagaacttttctattacgttttggcttattactaagttttaagctgaggacaagaaaattgaaagttttttttacgtatcatttactgctaattttagaagaatatctgatttagcttttcctacgcattttaacttccctaattagaagaaataaaataccttggagtttaagttttctgtaaacgaagattatagttaaagggagggaaagagggaattgtggtaaacttttgataagtacgctttacttcttatattttcgatagaaaatcgacacatgtagattagattgccaaagcattaactaccaaattagaaaacaaaattcaataattatatactccattattccttaaaacaaccccttccctttttagtcaaaacttgtaatcatcatttgttaaaatctttcccaaaaaagatagttttggcatttgcattaatgaaaaaaaatgaaggaaaaagatttgcattaattcaatatttctctgacattnnnnnnnnnnnnnnnnnntgtgtataaatatatctctgcatgtaaattgttgatgttggcattatagacagggagagaagagacgtaacacagagaggcaggagatggcggctgaaacagcaagaggcagcaacagaagtatctcaaactctcctctcatagaaaactctgagtctaatcagattcaagtcc

SEQ ID NO: 54966 - DNA, 992 bp, Arabidopsis thaliana landsberg
cagaaacacgtaatgcgctgttccttatgtaagttgttgaagtcttgctacgtagtgcgacaggttgactgggtggcaccaacaattcactttaatgttgttttgctattgcgttacttgtttctaacgtagtataacttattaggagagaggtctagcaagtgatagctgcagtttttctctatacctttgttatttggtatatgcacccttgtaccttgcggggccaattataagctttaatgcatttgcttctcaggtatgcggttcttgtcatgcctccacttttctattcctttcatatctttgtttgtttttaagatcccgattctcttgaataaagttctatttactatagttaagagttcctaaagaatcaacacctttgtttttcatagtgggtcttgttttcatgatctctcattacaaacctacatttttacagctagatatgccacagaatactctttcattcaaagatgttgcttggtatggagtgcgttggttattcagcttcttgctgattgaactcatgacacacttattttattacaatgccttcgtgatcaggtgaaactctttcaggactaggataataataagactttatcgttactttttcaagattttaattatgctaacttttttgcatttgtgacagtggtctgtggagagaactatctcctgtggaaatatttattgtcggatacggagtaagacattattgatatctgtattgttatgtttttgtttagcagaacaaactacttttttactagacaatataatatcatctcaagaggctcttggaaattttagctgtgtgatttaactagaataccctaaactgatccgtattgctatttgtactgctgcaggtactaaactttatgtggcttaagttccttcttttatggagatatttccgcttttggtctctggtatgctccttcaaagtcttgactcttgagatcgttttattattttatgat

SEQ ID NO: 54967 - DNA, 1289 bp, Arabidopsis thaliana landsberg
  unsure (1)..(1289): unsure at all n locations
atcgaccaagctacacggacatttaataaaatgaataaacggaacccgacttccatgaatatatttctaattaatttcctaggattcaaacacgaattaaccaagattctaagaaaacattaagataatcacgaacattcttatgtgtttaagaaccaaaacaaaaaancgaatgattgagactaatatcataatcagatttcctaaatgtaatcctacaagataatgtatcatcatcatcatcatcatcatcatcatcaaacaaatagaaatggttttcaaacacgaaatagattgaatgcaaaaagattaaaaaatcgataataaatttacctgtaaacatggaaaaagcaaacgagttttcttccgagagattaaaagatgaacgttacgcgaacttttgttctcttatacacgctcgcacaacgaagcacaagagaatttaattcgtcgaaacggaatcgatacgatatatacctatcattaattcgactgtttaaaaagaaaaatcgttttgggattaaggaaagataatcaagaaaaaatatttattttaatttaaaacaatgcttaaaattaggcaaagtcggagggattaagattaggatgtttaaccaagtcggccgttcctctctcgcttgctgtaaatccttaacctatcctaattttaagcgttatggataaaaaaacttttaaattttaactattttacagcatctctatggtaacaaaaatttagaatttattattcacttttttcttatccaaaggatatgactgatagccacaatggcagaattttccgaaaagtgataattataagatagaataggattattattaatttaacctaattaatatttcaattccctgtatttgataatattcaagatttaaagatttgataacatgatttgtattttctcatgacattatcctaaagtttgtgtttgttatctaaggtcattgtgatttatgcaataatgtcagattttaaagcataatttagacaattaaattaaaccacaatggattacgtttggatatatattctttaaattttataattaattaacactctttagtaaaacaaaacataataagattacagaataaattcaccatttacatatgttagatgaattttttactattgcagaaacttgtaaacacaatggtacagtgtttggctgataaatatttgtggatatgaaatatccaaagtgagagaaaatgctaagatcctaaaaaaacaggacaaaaattcctaaaggaagaaaaagggtcaa

SEQ ID NO: 54968 - DNA, 622 bp, Arabidopsis thaliana landsberg
gctctaacgctattaatgcaaaaattaaatttaacaaaaattaaataaaccctccatattttacctttaccactattcaaatttttgcgttaaaaaaataaataataaaaagatatttttatttagcaattaatattcaatttattttatctatcgatttaaaactttgtaaattatttttaaaatttggattgaaaatttttcagtgagactatgcgggtaagactacaccgctcaccactagaaactgactttacaggctccgatagtggtagcacaaagcaaaattacaagctagagaagactcagaggggtcctggtcagcgtaacatcttcaacgagtgaataatttactgtaactgatcggtgctggtttataccagtcggttatgtttgattttttaaaccgatcaacggttttatatttttaatttagaacttatcattttccacattaacaaaagaatattgaaaagtttgaaacaaatattttatctcattgcacataaatagtaaatttgaagcgatcaaaagtttataaactaaaattttgatattttaagattaatagataaaagttaccaaattttgaggttaaattcgtgagatcttttagaaaatc

SEQ ID NO: 54969 - DNA, 1262 bp, Arabidopsis thaliana landsberg
taccctgctctgtcttgcaccaataatcttgtccttgaactggagggaaagagtgaaagagattttgtgcagtaccctcaacttgatagaatttggtaaactaaaatgctaaaacagactacttccagtgtgtgttacttacgccgccgattgcaagaattctaacaagttgcaagagttgaaattaactcggatcgcatacacaatgcttcaatatcgtagtcgaacatttgatttacaaaactaaagtatgaagtaaacttagtaacgtatacacatttcacatccaaataatgaagtcaaagaattaacgaattatcaattcttatgttaacatgcatatctcaaattcttagaacatgagtttggaaaaaatcttacttaattatataagatcatttagcataaagtactttcatgtttatatttatttgtattgatgaaaaagaaaacaaagaaaatatgtaagtgatgtgagtcttataatctatagtttaaaaaagaaatgatacagataagtagataaccaaatctaatgaaactaaaatacaatgggttttcttctgtttttgttataaaaaaaaaaactaaatagtggtattaagataaaatgaaaagaggaaacatatcacaaggagatatgtcacatgtcaacttcttagaacattcatgagtttggaagaaattttactttattataagagataacttaacataaaataatttcatgtttatatttatttgtattgatgaaaaaaacataggaaaagtaagaaatgtgtgtctctttattatagttttttaaaaataatgatatatataactaaatctaagaaaattaaataatgttttttttttgttaaaaccctaaataatgggattggaataaaaatgaaagaggaaacatatcacaaggagaaatgccacttgagtttggatgagaccttaactttattatataaaggtttagattattccaattcactaatacaatcttaatattttactacacacacaattttttcacatccaaagcaggcaatgggtatttcttgcatcacaagaaacggatattatatcctccattttcttcttcttcttatactaatcataactccttcgtcctcttccttgtccttcaaagacatcgtcacaaaagagctcatcaacaatttctgttcaaatttggaaatgttcgatcgtcaattttgcgccaaatggttcaacgcggatcaaaaaacaaaatcaatcagcgtccaagc

SEQ ID NO: 54970 - DNA, 1196 bp, Arabidopsis thaliana landsberg
aaattgcattaattagtttatgtatgtcgaaccaaactgttagatttttctaagtttatatagatgatgtattgtcctaatggttcattttatattgagatcgacggtagacagaaacaattacaaatgtcgggtctcaatacaaaatgaatcgctgtgataaagaccatgccaaaattaaattatgtttgtgatcgttttgttcatggaaaatggtgatgggtggtgtaactttaattcgatcgagtgtacgaagacgaaagcagaaagtataaatgaaagtgctttagcacatggttgggaacgcacgtggggccatagattaacatcatgacataatttttgattagtttaatactctactatctatggtacgtaagtgataaaatgataagctaattattttaaaacgttgcattttatattaatcaaacgacctcattattgggtaaacatgataggtttgttggtcggttgacattggatccccgtatcctattcgtttcttaccaatatcatgatgatgatatgacttaactttatttggcacctacctctgtaaagtccctcttatcaaatctaaaaaccgaggttgatcacattacctttttaaaatgtcaaaaaatgtgatatatggtatggttgaaaagaaatctatagacataagtcacagaagtaacatgttatatttgaaagagactaaggcgttggtttaactatatcccacttataaagttataacaaatcaggtcacatatattataaggatgtaaattacattcttcaatggtttaggacttaggagcttagaaagtctacactaaattagttaaaataatatgcagctggcatacaaaatttacaaaataatgatgaacgaataaaacattgattatggacttatccaacatataatgtttagcacaaatgacaaaactatatattatcatttgaaatccacatttttcatctatgattaagttcattacacccgtagaatatcgactagctaggactactataattaattatgcattataaagtcacatgagcagatctttatattattgggacatggtacatatctatccttttttggaccacatcaaaaactttaaacaatactacaattttactataataaggcgtggggggtgtacacgctgacgaatgagcctcattagaagtgttaaaaa

SEQ ID NO: 54971 - DNA, 647 bp, Arabidopsis thaliana landsberg
  unsure (1)..(647): unsure at all n locations
catcgtagagaggggggtgcgccgttgccatcctgtccctcggtcgtcgtgtatcggtcggggtgcatcgccaggccatggcaaactcgtctgtggcggtggttaggtgtgtaatcggatcgaatacggacgaacatcactaaaatcatatttgttttcgtatttttattcggattcaaattcaaatactgatagcttcggattcgaatacaaatacaggtattctcggatgcaaatacgaatatatgtgtgtcgaatacggaacttatcggacacggataatatcggtagcgaataattttatgagataccgagtaatacatcattcgacacatcctagtagtatagacaaataaacagctaaacacaacaagacccaactacagtctacaaggaagcaattgcaacctactagaaaacttaagagtagaaaattacaaatgtcatccaaaaagggtttataaatccatcttaaaggcatcaacagcaaggccatgaaggcatcaacattcaacatcaaggccatgaagtgaggcgataaagtcttactattaaaattgtccaagggancaaacattacgagtatgaatagtgtaagtcgatcacccgtaatttgagggtttggtgattaatgccaacgaacagag

SEQ ID NO: 54972 - DNA, 568 bp, Arabidopsis thaliana landsberg
tcggtttactcctaattctacccttggcgctccactaggaatcactaatttgatcggaacgccatcctagagctcggttcacgcacaccgcggaactagagtctttcccgtcgtgttcccgacgacatagtatgacaacatacaaattgggggcacggtgagcttctgcaacgtaccagaacccaaggatggtcgctaggaaggcgggtggaaggccaggacagcgggtcgacggagggggtgctcacggcggcgcagagagtggatttgggggaattccaaattagagcgctacggtggacgatcagaggcaacgacgggtgctctggcttcatgacaacctaacagaactatcgacacactcaatttatagtgtcctatggcggtggcgtctaattttgagaaggcgcactagcgaccgaagagaggggaaatgtactagcgcgggtgatcatggttgtcaccgtggcaagtcctccggcgatggacgaacttacttcaacgatttactgtcatgtgttagagccctagcacgtggcacaggtcggtagaggcaacaaggtaaggg

SEQ ID NO: 54973 - DNA, 1191 bp, Arabidopsis thaliana landsberg
ccagttaagaaatactaatatttaaaaatgattgtgcaaatctaaacacctaaaagttgtatagacacattatttacaagtaataatatattctaaaggcaatcataatagagacaaatgcttctttattctactttaaatagtttttttttttgttaaagaataacttaatacttttgtgtgcagcaaaagatcctaaacccatccctcaactaacaaaagttcgaagaataattacattttttttgcagtagccgaaatttatgacattttttaaaaaaatcagattattgtgatgactcaagagaatcaaataatatgttctgattccgcgtgtttaacatcgatcaagacaaatacataagtaaagaagaaaacaattggaaacactagaaaagcaaaacaaaattgaaaaatataacaagaaaatggaatcttgacagtcacgtgttaagaaaaagaaaaagagattggtttctatttttagggttttgagtgatgatggaccaatctaaagcgtgtcgcgacatgaaaactaaaactatatccaaagtaaaaaagataaaatcgcaaaaacaatcacgaatcacgaaaaaactctgttttgatatcaaaagcaaaggcaaactgatacaaaccccattattattctcacctcagaaaacgacttcttctttttttcttaatcattacaatccaaaaaataaaattttgattagtgggttttgtttattactcactcacctttgtgtttcgatatctgagaaatgaagcgatatgatctgagattattgagatactagatagctagcttctgctttattttcctcttgaaggctttggtctatttaggaagccggcacgagtggggttagttctgagtctacgtctataaatagaccatcaatggctgcagagaagattagtgtagtagtgttacagacagtaattgtaataaatgtgttacaaaaggacgaaaacaatttatgatactacaattttgcttttaatgtttttgagaaaaaattcggcgttttctcaaaaaagtaaaagaacaataaataccgggaaacttttgaatgaaaatgaaaatttatattaatattgaagaatgaatacacatttttcggtaaagcctcttgattttgggttagtgaagacaaatttggtatttaatcaagaaaaaaaatg

SEQ ID NO: 54974 - DNA, 542 bp, Arabidopsis thaliana landsberg
atgtttggaatatcattcagcttaccattgcaagtcgtttcttgtggagatcagttggtacctgcaagttgctgacttgggatcaatatctagcaaactcatgttctttctctttttcttttattggacattcaggtggtgatgcacattcacatatactttctgtgcttttaaagagttttaaaaagaaaatcacttacagtttttgtttgacgtttatcctcacttgagaatccaggaattgtcaagtgcaagtttttctctgcataaagttataactcagcaaacagtaaaatgagtaacaatagcaactacttagaattcacattgaacagagctcatcaccaaattaagtacagacctaggtggagtaatatatccttgggctccaatacagatgatttacgatgcttatccaagctacatgcaaaagatgtgacctgcaatgaagtttacgtaagatagagataggttttcacacatctgtatataaaaaagctgaagttaatactaaataattgatattagcttctaaccgaatc

SEQ ID NO: 54975 - DNA, 892 bp, Arabidopsis thaliana landsberg
  unsure (1)..(892): unsure at all n locations
tgttgcttcactaaggtaatacagacaaattaattataacctgtttagcaaaagagaatacaaaacatggggttgggttagataaacaatttgtgaaagaaagatagagaagatataacgaaagaaaaagcatttaatgtccgcgtaaataaagtggactcatccaaaattttactacaacagtccgtaccaccaagtcaacaaaaaccatgttgcactctttatttcttcaacacgctattatcccccttttctcaaaattgaccttgaacaatctctctacctacttaaaaccaactcatgttcccaaaccaaaccaaacatcattattacatcaaaacaaaaaaatgggaaagagaggacaaaaacagaacaggttcttgagaatcgtcaccatgcctcttaaagttctatgcaaagctcgtgatctctacatgagaagcatcacaggttgtgcagctcgaactcactactcttcagccgtcgacgcnnnnnnnnnnnnnnnnnnnnnnnnnnnnngtacttcctccgccttctcttcctctgcctcttctcggagaagatcttcggatttcactttcgacgatgattatagcgagctgcttagagctgcttccgttaggagtttaggtcataagaatgagatggacatgatcatacaacaacagcaacagcagcagcagcaacggcaggagaatccgttgcgatgggagcggttacggttaaaggcggtttgcctaagagctcgagtgttgggatgacaatggctaggattgatgaagaagatgaagaagaaggatctgtaaagaatcaaaagaagggatctgatttcttatatcctcgtagcagatcacatgctgttactattagaggatccaagttttaatatata

SEQ ID NO: 54976 - DNA, 665 bp, Arabidopsis thaliana landsberg
  unsure (1)..(665): unsure at all n locations
aacgcagcaactggcgccttattcatccgcaagggatgaattcagcggcgaagccagggtatttctcgatgcaaattagaacagcctgggttcgccgctcacaaaatggtacaaccgttatcccgatccgcaccagcgtgctgtcaaggagaaactgtctgccattaaaggtatcgacatgcaacatatcttcctcgggaatggaagtgatgaatgtatagacctgttattccggagtttctgcgaaccgggaaaagataacgtgatcatttgtccgcccacctacggcatgtacgaggtaagcgcccatatcaatgatgtagctgtacgcaaagcgccgcttacggaagatttccagctggaccttgtgcatctcgaaacgcttacagatgccaacaccaagatcatctggctttgctcgcccaataatcccaccggtaattccctgcaccgcgaggatatggaaacggtgctcaataatttcagcggcctggtggtgattgatgaagcgtatatcaattttgcccggcagaaaacctttatacaggaacttaccgaatacccgaacctggtggtgatgcagacattcaagcaagcctggggactggcgggcctgcngctggngatggcatctgcatcaacagctattatagaggtgctggata

SEQ ID NO: 54977 - DNA, 1162 bp, Arabidopsis thaliana landsberg
attaagtaaaagtgagtattaggcttataagattctctgcctctcctcgtgcatttagaatagctctacgcatgggtcctttaagagtggctttggcttacaagtctcatttcaatcttattctcgtatttccctattagattgaagatatgtgtcggagaactagggcttctgcagttccaatcgttgctgattctgaaggtatgtaactatgcatccattctttgatgtatttcagttaacaatcttcttttctgctgtttatacggtcatcttcaatttattccatactatttgaccttcaattgatatgatgaccctgtgaacgttatgattatgaaaggttgaaggatgaattatcttttactgaatttgctcccgttttttcatgtataaatataaggttgatactcgattttctgcatatagtcggaagtttatacttcgcttaaaaacacaaagagttgttctgctttattttctcaattactgccttgcgtcatcctctgtattctttgtgatcttttgcattatattaacatttgcccctctatgaatgcacaggaaccgatacaaatccatattcacttgatgccttggctgtattcatgttccgtgtacttcaacgagttaaccatccggtatacagttgcctcttatacacagttcaacttcaactgcatcatccaactttcatcacaaccctacatctttaacaaactatcttttcttcatgtgcaataaatatttagggaaagctcgacaaggaatcttcaaatgcaggttatgtgctattgatgttttatcacctttatgagggaaaggtattatcacatactccacaacttattcttttaagtaaatctatgatttgatctaactgaactttctttaaattttagaaccgtaatgaatttgagagtgaattgattgagcgctttggctccctcatcaagatgccactattgaaatcagacaggtatacagttgacatcacatgcgagctaacaaactcgaacttagcacagctacaaattgcaacttaatatttaattggttcataagcaacttaattgtcttctctttgtgcatatacaggactcctttacctgatcctgttaaatcagttcttgaggagggcattgatttgttcaaatctcat

SEQ ID NO: 54978 - DNA, 178 bp, Arabidopsis thaliana landsberg
ataacagagggcgggtttatgattatgtataaggtgaaaacgaccgatgatcggaagagaatttgggctttttggaaggggacggcgtgtacaagttacaggaacgttaactacccgacgagggtaatttagcctgccccacaaaagacctatcacacatgtaaaggtctttttccct

SEQ ID NO: 54979 - DNA, 767 bp, Arabidopsis thaliana landsberg
tgagatgtcggtttgagtgatgagattgattaataaccgttcgattgttttttcacttcttattttagccgttgatcttgatctactaaaatctttaactcttttatgagtccagggcctttttttatttgggcctcaatgtttctaatttggatttttgggaatgtcaaatgtgtatggatgattactgttacttagggtttttgttctattttttcttagttagtatcagctttacttaggattaggaattttaaaataatcgtgtttgtattatgttttttttttaatatcaatttaaatggaaatattacattagttgttgaatactactaatggtcaatcttcaactcggatttcggttcggtttgaggtcaaaattttcagtattaaaatttttggtttatgaactatagtatacagaataaacaatatatgagttaatatgattttacttttgttttgtttttttcttactcaaaccactagtgtgaagttttttttcttttcgtaattgataactcccataaaaaaaattactttatagtgacagtccaaagtcacaaccacaatatttatctcatccaatatttatcttaacttaaaagggtaaaacttcttcaacttgaggaaacttgttattttcattaaatatatcgaaagtcagaaaaatattttgtgtaacatattctgttaattacttaaatagtccgtataaatatgtgatgtgcacaacacaagaaaattggtttccacttcatacatga

SEQ ID NO: 54980 - DNA, 545 bp, Arabidopsis thaliana landsberg
ctaaaaggaagtgtctttaatattgaactatgttgtactccctccgttttaaattctaagttgttttgttatttctaggtactttattgcccatgtatatagacataacatatatctaggtgcatagcaagatcgatgtatctagagaagccatgacgacatataatttggaatggagggagtaattcttcaatggaagtggctctaattatattaaagaaagatgttgtaagttcctaatcatctcccaccaaatttctcatgtggataggctggatatttaaacttgaactgaatttatgacattgcattaagggattagttgtgcttgactggtcttcaaagtgatatgtggcccctctttcactatgcctgatttcaccaatacctgaaaatataagagaaatacaatgtctacaggtctggcctttgagtatattttgaccaccagtaggcatgtttaggctcaggatctgaaccagatcatgtgataaatgaacaggtctggagttcagctattttagtttggattttgcaacacacag

SEQ ID NO: 54981 - DNA, 585 bp, Arabidopsis thaliana landsberg
ccgcccgggtaaccgatctggatcagacgaccgcgctcgtcgtacgtccagttcgtgacgaagctcgtcccgtcaatcacagcggtctggctcgccagctcgccgctcgacgtgtagctatagctcgtcgtgccactgctgtcggtggcaccgcaaaggcgcccgtggccgttggcgcaactatcgtaggtcaaagtctggctttcgctgcctgccatcacggacgtcaggcgattgagcgcgtcatagccataactcgtgagtgagccgtccgctcgcagcatggaagtcagccggccaccagcgtcgtagctgtactgcgtcgttccggtatcagcgctgctctggctcaccagattgccgagcccgtcgtacacgtagcttgtttgcaaaccacgagggtcggtcacctggtccaagtgaccttttccatcgtagtggtattgagtgacgaggtttcccggcgccgtggcctttgtcagacggttcagactgtcgtattcgtaagtcgtataactgccgagcgaatcggtggacttcgttacattgccgtcgttgtcgtactcatagcgcaggttctgaaga

SEQ ID NO: 54982 - DNA, 253 bp, Arabidopsis thaliana landsberg
  unsure (1)..(253): unsure at all n locations
cacaaaaattaaacaccgttgaagattgtttgctatactttatttttatcaataataagttgcggtacttggttaactgtatacgttcttctatttcttatagttgtgtgataattaccacaagtccaaaaaagtaannnnnnnnnnnnnnnnnnnnnnnnnnnnnnnnnnnnnnnnnnnnnnnnnnnnnnnnnnnnnnnnnnnnnnnnnnnnnnnnnnnnnnnnnnnnnnnnnnnnnnnnnnnnnncgcaaa

SEQ ID NO: 54983 - DNA, 498 bp, Arabidopsis thaliana landsberg
gcggctgaacaacctggcggtgtggcggatcccggcggaggtttcgcaggagctcgccacgctggcggagtctgtcgatgcagctgcaggcgacgatccaggagggagtgctgatgctggggaacgcgcagaagcacgtcgacatcgagccggtgcggtggaagtaggcggcaaacgccggggggcgccctccccgtaggctggcggtgagcgccagcgaaccccagcgcttcaaggcatcgcccgcccgcaattccagcacgactcgaagccgccttccaccagctccccgcacgcgcaccgccaccgtctatgcggcaggctcagcagctggtcgatgagagccctcgcctgccccagctgctcgtcgtgcagcacccagatctccggcaggcactggtccggtgggatctcgccggcgacgctgcccaggaaactgccgcagcacgctggcgcggatgcccgccttctgaacaggttcacccagagcgccgcgat

SEQ ID NO: 54984 - DNA, 785 bp, Arabidopsis thaliana landsberg
aaagaaacaccttatcccaaactttgattttttctatgctcacgtagctaatattgtgttgatatctctgttctggcacatatacagttttagtgcccaaacttttttgttctttacttctttttcttcctgatcaattgtgaactttgagattcagttgtatattctagaaagtaaaaggaccatattctcttgatcgttaacttttggattagaaaacgtcaatatattaaaatacatcaatatctattttgataaattatttaagaatataacagtataaccaaaaatcaacgattaatttgatagaaagaagtccggttatatcaaattcatagaaagcgatgagaatttaacatgagaagaatattttagcgaatcttgtgataatatatgttattggaatatcagcatagtgattagaattttcttaaaaagatattagtagaatatatactaggatttgataaatatattagaatctttatttctatagaagatttattagtcgatattagtgggattttgtgaagtgatgggatcatatgtttccctattttatctaggggtttctatctataaaaggggattgatcagagcagtctttctccataaatatagccgataatatgagtaagacttataaaccgttgaataaagaaaccgtgaagttacaagcaatgctacaaaggtacgggtactatgaaatggttctcacttcccttgattcaaaggttcattagtcttactcgtattgttagctatattaagagggaaactcaaaa

SEQ ID NO: 54985 - DNA, 562 bp, Arabidopsis thaliana landsberg
  unsure (1)..(562): unsure at all n locations
tgttcttacacagagacttctgttctgttctgttcttaatgaggtcggtacaatacactacggcaaaacaaataggtaggacgagggcgtaggcggcggcggcgtgacgatcgatctccactccaggcgacacgcactagtgagcgtgagtnccaccgtctagtggccgcccgatcgacggttcctcgtcagtcgcctgcagaaaacaagtttcagtcaagcatgattcgggcagcgaacagaatcaagagttctggtttctgagatgcagctcacatctgggcatcgggatggagatggagagctgggtggtggaggaggagaaggaggtcctgccggcccgcgggcgccgtccatctccggcggccacgagtccgcccgcgtcccgggccactcgtcgaagaagggccgcagcggctggttctggttctcctgcttcacgttcccgagcatcccaccactgaacggctgctggcgctcctgctcctgcgccacggaaggcgatggtgacatgcccgagctcccgcggcggctctatgtgggagtgggactgggagtagga

SEQ ID NO: 54986 - DNA, 587 bp, Arabidopsis thaliana landsberg
tcgaaaatctccatattgcaacaaacatcatcaacatagagatatccagaagctaaatgcttagagagactgaaagagagttcgggaacttcagacataccaaacaagcgaaattgcatcgctaaagcaaatcggagcaattctcgggtggtcgggacagagatacaatcgttagatccagaagaaacacgattggtatcaatcggggaagaatcatgacgcggaatctctcgagttgaaggagatctactagcgcgaggtgaaacattttctgattgtaaatcctgagcttggattgtttcttcgtcatcggagaaaacatacgatcaattgaagaaatcagcaacgcaatggagcaaattgctctgatacctgagaggattttatatgaagaaggagaaatgaagaactgatttgcttatttctcacttctcagtaactctcacttatatatatggaggctttgactcggtttcatcaatcaatcttaattacgtggtttaagtaaccaattactctcatcattaatatctcggtcgagttttcgatctaagattttgaatttgagtttgagaaataacgtagac

SEQ ID NO: 54987 - DNA, 731 bp, Arabidopsis thaliana landsberg
tataagaaatgaaaaaactaattttcatattattaatttaattttatgtctttaattaccattatttagtcgtgacttaaataaatcaaacatattgagaaattaattataattttttgacaccactaaactttactgagtagtggtgttagttttatatttcctagtatttagttgtatttttttttttttgtagtttgacatacccgtatatcagttacctaatagttaatatctttagaaatatatactattagcatgcccccgcatagtttataacaaatatatagttaataacttaatacatatagaaacatcattcatatgtggtatatacatcatcacagttacatataaatatatatatatatatatatatatatatatatatatatatatattggttactaatcccttgcaccgagaaaaacagtatattctatacctacaatttcaaaaaacaaatgtttcatataactttacttaatagttgttgctttttttctgttaaagaactttaattaatagttctataatttgttccatagttcaaaaataattcactacctactcgctatttaactattctcattgttggttgttggttttaaaaagaaatggtctgcaaactttaagatgccgtgtttattttataaaataattatcccacccccctagatgttaaatattttcaactttcttcaaaaccaatgttttttggatcaaagtag

SEQ ID NO: 54988 - DNA, 407 bp, Arabidopsis thaliana landsberg
aacggtctacgactttacaagctagcaatgcagtacggttaattgggtggtttttacgtcgtctttttttgtggtttttcaacaaatatttattgggtccagtcaaggtaaaacaacgtgaataagtttcattttctacttctcgttttctcaacgcaagaaatttcaggctctttatgtgcctaatttttgcgtgcattcctaaatcaccatgtgaaaccctaagtttagagttttgaatagatatacatccttttctaaattagtgttatttaaaaaattaaggtaatttgcgaccactataaaatatctttattgattgccctatacaagaagatctccttatttctctatatattattagactcgaatactttagattcctaaaaaagccgatgacttggctt

SEQ ID NO: 54989 - DNA, 543 bp, Arabidopsis thaliana landsberg
ctgcgtcgcttgcgcctctcgcgccccggttactacttcctcgccaccgatacgccgggcgtcatgcgctgtttgttcggcgagttgcgcgatgcgggcgtcgaactgcggctggcgacgccgttccagcatgccgaacgcgagcgcgatggctggaacgtgcgcgatgccggcttcgcgcgtttcctggtcggcgccgacggcgcgaaatcgcgcgtggccgagcgcgccggactcggccgtgtccgcgatttcctctacggcgtcgaacatgaattcgacggcctgcggctcgcgcgaggcgatgtactgcactgcttcctgtcgaagcgcttcgcgcctggctacatcggctgggcgctgcaggcgccgaccggcgtgcaggtcgggctggcatcgcgttaccgcggcatgcatgcgccgacgccggatgccgacgccttgcttcgccacatcgctccggtccttcgcattgacgcaggacgaaaaccggatgcaatccgcgccgggctcgtgccctgtggcgggccgatcgacgacatc

SEQ ID NO: 54990 - DNA, 831 bp, Arabidopsis thaliana landsberg
caaatcacacccattagcaaaatacacttctgctagactctcagcggcgaatccggggaactgagaagcgagaaaatccacagggttcacctccatatcccctggactctcagtaatcatgtcgttaacaaagccatgtcgagatttcccactaaaagggtttctttccctgtcattcccaagaagctgctcagcattcatgatttgcttatcccaaggctttggactcagttgcatgaaactctgtcgctgaggatcttccccaaatgaagaaatgggatatctactcttatcagccaagctattaccattagcattatgtgaagctaatccagtttgatctgaaaagccatatcctccactagcagaaggaaacttctcagcttcattaccgtcaaacaacgacaagttagctagtgacaaactaccagatccataagaattgtcatcttgagtcatcaacccaaaatctggagttatatcatcaggaagttgatgactccagaactgacgtgcttcttcatctgaatgatgtgacgcagatgattctgtcctgtccaaaaccgctttcccaacagaactagaagaagctaaaagtcttgtatccaaagtacttgtacctccagatgaaggagaacgtagagtaaacggaacaaactcagcagcatgagggtttaaagttgttggcttgatactagtaccacttagctttggttcacttgctttctttgttaaactcattcttacaagactagtaaaaataactgcttttaaaccaaaatctgcaaaaaaagagtttgcttttctaagtcaatactcaagaagaacctg

SEQ ID NO: 54991 - DNA, 454 bp, Arabidopsis thaliana landsberg
taagtcattttgtttgttatttatattaaaaatatttttaaaactatttaaattgacattataaactacaactctacactatagcagaaaccaagagtcatcccaaacaccccttaaaaaacaaaggtgagtgtccataggggcgagcccatcgtccgaccccatcctcctaggtcccgctcacaatgccccgccgtgagagcccgtgctcgcctcccctatcgtgagagcgctcacgtctagtcgttttggtggagtgataacattacaactatttatgataaattttcgagattcgagaagctgttccgtttcttttttgttggaaactaagatattgtttagtttgagaagtcaatctattttagatgaggtgatgctttatgagtccattccataaaattgatataatgtactcattctccatattattactaattattagcatatgaga

SEQ ID NO: 54992 - DNA, 587 bp, Arabidopsis thaliana landsberg
ttttggcagaattgaatgtagtagcctcgtagggccaacatgaccgaactcaaaatgtgcagcccacctccaatcccgtagaagatagtgctgccctgccgaatgccgcccacctccaatcccgtagaagacaaagagagagggagagaactggacggcgggcgggcggcggagacgacgatgcagtggtacttggtggccgcgctcctcaccatcctcaccagctcccaggcaatcccccaaaccctacatatttcgtcgattccccttccttgctttttggtttgcttcgattacaccatagtgtcttagatctgtcgccaagctgggattggttgtgaactttcggttgcttcccatttggggtctttgatgagatgcactgtggattaggcgtcctaggttgctggatcggcagtttagggtttcgagcggagtcggcatacccttttgtgaagaaagacgcggttcagatgagtcgtgattgttacccgggatgtcagggcagattgaatgtcgccaagaacttgggaatggttacttggtagatcatgggatgattgggggacgaactcgaatcgtaacat

SEQ ID NO: 54993 - DNA, 1088 bp, Arabidopsis thaliana landsberg
attttaagttttcatcccttgccaatcaaatcatacatagttattaaagttccaaatatctctgctttggcttaattgatctcgaggcttattttttatatctcagctctttcactcctagttatgtgctgtgtggacccatgtttgccttgcttttgttttgcaagactttcctgctctagtatggacttaggatggttcttgatcatgtgtatggattttacatcattttgactttcaagagtgtaaaatacattacataacaccttttgtcatcatttgcaatggttagcaaaatttccttacgattcagtgtcagacgaatttattatataattttaggtggcagtttgcaatttccctacagttaaggatgctgcagacgtggccattgccactatgatgtctggaatacaggttagacctctgcttttgaattatatgatttaaattttttatttgaatcttctcaaccgcaccttaacccccatcaggtgtcaagagtggaactccttgacgaggttcaaatcagagctattaatatggcaaacgggaaaaatttgactgaagctccaactctgatgttcgagtttataggaacaggtgatgctgcatcatatttcttgtactttccaagtgatatttcaagctatctaagattatacatctcttgtagcagtttactctttgtaagcaatatctgtagatattacagaaatcatattcactcccctgtatcctctattttattcggttacaggattctcatgctcagtgttgccactagacacagaaagtgagaattgttgccttctaataccctaaatcatttttttccttttctctatctcttagaggcatatacacgtgagcagacgcaaattgttcagcaaattgcttccaaacacaatggatcagactttatgttcgcagaagaacctgaagcaaaaaaagaactctggaaggtaattctttgtcccactcccaacactttccccgtaccctgcaaccatccagcataaaatgagaagcagaaaagaagggaaaatatgtacttgttgttggtgtagtgtattcttgctcagtag

SEQ ID NO: 54994 - DNA, 425 bp, Arabidopsis thaliana landsberg
  unsure (1)..(425): unsure at all n locations
cccccccccncccnnncccccccccccccccctctccccccccccccccccccccccccccccctccctnccccccccccccccccccccccccccttcctcccccccccccccnccctctttttattcgtccccccccccccccgccccccccacccacccaccacacacccccccccccccccccccccccctcctccccccccccccccccccccccntactctctccccctcccccccccccccccccccccccccctctcccccccccccccccccgccccccccccccccccccccccccccccccccccccccccctcccccccccccccgcccctctttttctcccccccccccccccccccccccccccccccccacccccccccccccccccccccccccccccccccccccccc

SEQ ID NO: 54995 - DNA, 467 bp, Arabidopsis thaliana landsberg
tacattaaatttttgcacttgttcttgtttattttataaaagagttttgaaacaattataatttagatttttttttcttctttcttaattacttagaattaggagtgacatggtaattgctgtaatttacaaaaatataaaaatgatgattaaaaaacaattgtaatagggagtgtaatattttgtattgtttttcaacaacatgaaccattaggctacatatccaatatgaagtttattataaaatcattaatttgttagttatgattgaaattatcaatacatttttaaaactcctgcgaagatatctactaaatacgcaataatatgattttgagattgtggaacatttcatacaattcttgagagggtttggttgctttttttcaaaaaaaggagaagaggggggagatctcatatttttatataaataattcacacaaacccatgcgcggggttgttttttg

SEQ ID NO: 54996 - DNA, 556 bp, Arabidopsis thaliana landsberg
tgcctgtaacttccattatagctttaggatcagcatttttcaatcatcaatgatgtaaggttgtcttgtcccatagatctctttttccataatcattcaagatcttcctaattattggttatgtaagaaaatgataaattattagttcaggttataaagagttcataatttacttttaatacttgaaaattgaaatgagaaaattgtgtttaagaaaactaagatcgatatgtattacatatatataggtttaagatacctgtcttaattctcatatatatgaactgatatcgaaaaaatgggttgtcaaagttacttcggtatacttcttttttttactcctactagaaaaacattattctgaacttgggagttgctttctgtatcaaaactgggcataaaaactcggttccatctatctttcgccagcttataagaccactggtcacaatatcagcaagatcgttgcgttcttataagtagaagagggcagcaaatgaggacaaaattaggtagacaaacaaaatccacaaacaaatgcttgaagtgactttgt

SEQ ID NO: 54997 - DNA, 1120 bp, Arabidopsis thaliana landsberg
ctcgttggaggtgcgttaaccctcggtgcttattctcagacatatgttgatccgggcaagtctattggcgctggcctctttgtcctcttctttggcttgcttgtcagtgaaggtttcatctctctttaaataacaatatttctgtataagcaaatcaaaccttcttcttttgtttatgtatatgacaaatatacatatctatgagcatcttgtttcatttatattttatttcacttgttggatcttggacttttgattaaagtgacgaacactatattgtttttacggattattgtttatttttggcttgtaagaatatgttttgatctttaatgcaaatttgaaagaaaaggatgcaacaatgtaattttgatccttgataatatgtatgtcacgcaagtaatatgaacggaatgatactcttcaacatattgggctaaagttgactttctttggggtacaaaaagttgactttgacttggtacatgtcttagctgtaaattaaggaaaagaaactaaatttgatgtaaaatatgtaataaaataaatcatgatagtcatatacatattgaacaaatcaacgctatctaaaatgtatacttaaaatatttcacatattaccacaaagaatatatataattacaaatattatttctgcagtaacttaactaaataaaaacgatcatcacctatctttctatttatttttatataatataattagatacttagcaacgttacgtgtatagtatttaataaatcattaccaccttcgactacattatcaaaatgaaacaccattacacaacgacgatcgtgaggaaatgtccgggccgtatataattttgcgttagattcgttattgggtcgctttaatttgacttcttatgtgttttttattttatgataaatatttttttaaaatttccatcagacacttgactttgtaaatatacacaatttctttatgtatacaatatatatgctaatgccatcagtctcataacataaggacttaggaaacatcattttcatatgctgtgtttgaacttaaaaacatgattgactatcattaaatcaaattaagaaaagcattatacatttattggatgaagaacgt

SEQ ID NO: 54998 - DNA, 761 bp, Arabidopsis thaliana landsberg
cggcgttctttggcaaactaacagaaaagcggcttatatattctgtttaggtgtgaagagatttgtgtatatatcagctgcggattttggtgtcataaataacttgattcgaggatatttcgaagggaaggtacttattcttattctttgtcttcttggtttttgttcttagttatttacatatctctttgatcaatttatctatctattttcagagagcaaccgaagctgagattttggataaatttggaaacagaggtgtgtaaattctcacttttaatcaaaaactccatttctatatacatgcgtgttcactgataagtcgttgttttttcctctgctttcgaaggttcggttttaaggccaggattcatacatgggactcgtcaggtcggtagcataaagctgccacttagtctcattggagctcctctcgaaatggtaaaacacgatttgcatcaatcttggtaatctttaggtgaaagtaagaatctttttttttttatctcaaaaacattatatcatttacaggttttgaagctgttgccaaaagaggtgtcgaaaattcctgtgatcgggccacttttaatacctccggtcaatgtcaaatccgttgcagcaacagcggtaaaagctgcagttgatcccgagtttgcttctggagtcatcgatgtgtaccggattcttcaacatggtccctgaaaacaacacctgtcttaacaaagttcacctcaatacggttttaaatgtcaaattcaaat

SEQ ID NO: 54999 - DNA, 1308 bp, Arabidopsis thaliana landsberg
agaaacactatctataagtagttaagtactcaaataaagtaagagtaaaagtgtaaaacccaacttaaatcaatttttacaattagcaacaaattatttgtcataaataaattaaaattatataagatgttgtagctactattaaaatatatttatattttgaaattatcatagcataatgtaatggtttttgtagctttaaatgattaaaagaaaagaaaacaaattaatcaaaaattcactgaataccattaagcttccatgttatcctttattttaaacatgattattgattccaaagtggctaaagacccaaagtgtaacattggggaaaaattatgcattattttgtccggctaatatacaatatttatttggttcttttaaaaagaagtgcgtatgaaaccgacacctataagacaaaaacaaaaaatattataagaaccacaaaacagagtgggaacagtgcaaaaagagccaaaatttggtatagagaagagtgtgaagagagccaaattattctctcaaaaaagcctctctctgataacacctctttacctcacgcgctttcggatccatcttcttgacccgcccatagatccggatccattatcctcttgggtcagtctttatttttcatttccccaatttctcctctttcataagtattctactgctttcggttctgttctttttccccagtcggtacagattgagagaagagattacaagatccatgtaagaaaacacatctcagaaattgatttctattcacaaaaaaagctactctttcaaaacctagaaagttaatttcacattctcagtcagaaaaatggtcctgattgatagtactttttatgtatatgggtcaaatttggtttctttagaaaatgcattggactaatgttgaccaaagttataatctttgcatgttgtttcttcaaagttcattttttgtttaatatatacattggaataaggatgaaaaattaacattttgttttgtctgttacaaatatttctccgctgatttgaagctgaggaattgaattaaggaatattttggcatattctttgaaaacctctctttctctggttctttctaagatactttgcttttgttgtataaaaaaagagtaactagaataccacatagcacggtacttatgattcaaaaacttatctgatgctaattagtcggctcaatccatatttatgaatctctctgatgttttttctgtgatactcatgaaacagattgaagatgaagaaacatcataaccgtagaatgctgaagacaagagcaat

SEQ ID NO: 55000 - DNA, 345 bp, Arabidopsis thaliana landsberg
gcactccgcatgtcagatgtagccctgacagactgcgcgcaagggctctgcccgtttggagtcgctatccctctgcctgtgtgtgcgtttctatggccttctatctgatggcatgacattctgatctgagatatgagagaacctccgctgtttccttggtgttggctcgtccttgcccccacttctgttgtactgggggtctttacagctgatccattcaaattgttcagacctactatcatgagcttatgggttgcagccttcgttactgccgagagtcgacagataccttctgccaacatatgtaactaatgactaaatgattaggttcgcattgtagctatg

SEQ ID NO: 55001 - DNA, 583 bp, Arabidopsis thaliana landsberg
  unsure (1)..(583): unsure at all n locations
tctacgagttcttctccattcaccacctatctcctccgattcttcgtaagtttaacactcactagttctctatggttgatactcattttcacaagtgaattgatttcatctttctccgtcttcgacagatttgaagaaagttgatggtgaagaagctggagagaagcgtgatggtgactattttggacttaaggttaagatttgcaatggcaaggttatacatgtgattgcttctgtaaaagggttcttcgccgttggaaaacagctctcacattgtcattccattgttgatttgctccagaatgtcagcaatgcttttgccaaggttattattaccttaatgctttgcatattacaaatatttctacttttgccacaaaggaactaactttatattgtactgggcattgatgcaggcatatcaatctttaatgaaagctttcactgatcggaataaggtggctgattttttctttgtaatgattgtatttctacaagtctttttgagctcaacaatntgaagtttggtttcattggcttttcagttggcaacctcccgtttggattacgctcaaacacatgg

SEQ ID NO: 55002 - DNA, 579 bp, Arabidopsis thaliana landsberg
tacgtacatgtgtaatatcaacactaaatggtttatattccatccctgttaaatcaatttctacatctttactcaacgttatatggaatatattcaaccaattttgaaattacagggtcttcttttacatatacatatttatacaccattgctttttgcccatttgtaaatacaaaatcaaattgaaatttatgtaaaccgtttactaaacttctatagtagcgtattttattaccttgaattaccgtatctttccatatttgtccccaaccattagaaggtgctgattggattcgtacagatgtagaaattacttttgaaccaaatccagacaaattaaatgcgatagaatctgttgtaattgtgtctgtttttttaaacaaatccaatacttcctgatttggatttgccaccaccggaggtggtgttggtttaggtgtatcaacaggcttatccactacaggtgttgatgtaactacttaatccattggcgaatgaactgcaccgcctttaacattgctaaacaaccattcgaagacattcattttagggtcacacaaaagagttgcagagactaac

SEQ ID NO: 55003 - DNA, 877 bp, Arabidopsis thaliana landsberg
ccacaataagtcacttcttcttgttttttatttgcataatctggtttatatgaaaattttggaaatttattcatctactttaagttaatggtacacacaaatctgctctaagctgcatcttgttaaacgacttttctgcccatgagttcgtgttgtagagcacatgcttgtcaagtgcgtatccgggtttacaaacgtactccaccaggtaatcggagaggacacacgggatttcgtggcgtataaactcttggatccagacgtcatcccgcggcatcccggggcttatcaacgcgaaatccgtgttttgattcaagaaacgcgtgtaaggaggcgccgttgcaagtatcgtaccatccccagctttcacagctcgctttagtgtatcctgagtagggagaaaagaataaatatagacatcaaaaaccaagaaaaaatgacaaggatgtgcgacacgtgaagaatcattctagtgtttattgtactgagacgaattcactctgccaatgaaatcaagaactaagaaaattggcagagatgtgagaaatatatttcttaccaaacaagggatggtgcagtcaccgtatacaacaatgcgcagtccatataaagcaccgtgtcctgttttctccctgacgagccgccatttctttggggactcgaggtttatcgcaccatcagcactaagaccagaactgtgccattcataaggctcctcttgtaatagtttcccagcttcctttgaatcagccacatagtcagtcttcagaatccaactgcattacggaaactgatgagtcaaaaatgaaaagataaccgtttttcataaaaccaaaagttccccccaagcggagtgtttgaaaatcaaagattagtt

SEQ ID NO: 55004 - DNA, 663 bp, Arabidopsis thaliana landsberg
cagtcagtgttgccatcgattcaataactggccgaacagaagaaacaacaccaacgattttgaaagttagcttgattcaactttagttttccttcaatgggttaaaaatccctagcttgtataatttttattaacacttaaatcacccatccatggttgagcatctagtgaatatcactctaagcgatcagctacagagactcttaagggtcatatcttcgaggttaaatttgttaagttatgattagtagatacgaaattacgagtaagagaacagaacatgaaattacggaaaagataaaactttactacgaaattagtaacagaacataaacatgaaattaaagaacgaagctttattacgacttctttgataaatggaactaacctagagaagagaagccaaaatctaagaaattcttttgggcgatacgacgaagaagacagtcaaacattaatttggtcactaataccagacttttttgggtaacccagactaaaccgaaatcaatctggctctcttaattgaaccgattcaaatccttcatgtccagtccgattttaatcaaaaccagaagaatcgagttttgcgaattaaaccggttcatccggtttcggatccatcaaacgatagatgagttaaaaacccagaagataagtgtg

SEQ ID NO: 55005 - DNA, 1239 bp, Arabidopsis thaliana landsberg
aacgtctaagacatttgctgctgctttaaactgcctttcacaggctgcacatagtttaccatgtggcttgtgtagtgaatgcaaatcatacttctcaggaagaggcagggacgtaatggaaaccgattcgggtaaactaaaccgacctagctacctaagatctctcatcaagagtgcatctcttcctcctgtttcatcaagatttaaggtttttataatcgatgagtgtcagttattatgtcaagaaacttggggtactcttttgaacagtttggacaatttctctcagcattcggtttttatactggttacatcagagctagagaagttaccgcgtaacgttctctcacggtctcagaaatatcatttctctaaagtatgtgatgcggatatatcaactaagctggctaagatttgtattgaagaaggcattgattttgatcaaggggcagttgatttcattgcttctaaatctgatggttcacttcgggatgctgagataatgcttgatcagttaagtttgctcggtaaaagaataacaacatctttggcctacaagcttgtaagtttacacttctttcttcatatttgtcttggaaacattagatagtttagaagtgaaagatcaacatttctttgattctgcagattggggttgtttctgatgatgaattgcttgatctgcttgatcttgccatgtcttctgatacttcaaacacggttataagggcgagggaacttatgagatccaaaatagatccaatgcagcttatttcacagctagctaatgtcattatggacatcattgctggaaactctcaagaaagtagttcagcaaccagacttcggtttcttacaaggcatacatgtaagcaccccagtgatgattactttgaatatcagcttcaaattaaaacctgatctcactctttatcatatactgttctactacatatagctgaagaagaaatgcagaaattgagaaatgcattgaagatactatctgatgctgagaaacacttgagagcatcgaaaaaccagacaacttggctcactgtggcacttttgcaacttagtaacaccgactcatcatcttttgcaacagatgaaaatggaagaaaccaaataaacaaaggtcctaattcataaattctcgtttcctaaatttcatgcttctttttcgtgttgtcttggttactaactatatataacttacccttggtcatgtatctagacgtt

SEQ ID NO: 55006 - DNA, 504 bp, Arabidopsis thaliana landsberg
tgcactgtcaatattgtatgagtctttaagtgtagtagcaaaagtcttggcacatcattgttttagttattatgatctgaacaacccattatatatatggagctcgtggcaatggcagcgcgcaacacgacgatggagcccgtagtgcgctcaggctcgcgcttctctgcaacaatgcactgttccccataagggctcccgtcactattgcgttcacgcctccgtcgctagaaccttgagcaattggaggctcgttaatttgtgttccgtcgcaacgcatgggcacatacctagtaagaaaagaaagtgaggaaaccactgattgggctaaatccaaacattggcacatttgcctctcaactatgtagggcctcctccccgtgccctagcccacgactgcgcctgccgttgtgaggcagcgctgaccgaccgggcccgcatgccaatgtcacctaggcacgctccatttcaattactcactggcacatgggtcctgcaggtaaa

SEQ ID NO: 55007 - DNA, 1145 bp, Arabidopsis thaliana landsberg
attctcacactttcttgatttttggcatggttcagaaagttaagaagccaaccccccttccccatctctctctctcgttttttttggtttatgatcgattgtgttgcttgtgtgcttatatatagagattacggtgagattacgtgaagaaacggaaatgacacattacatgaattaaagggtacaattttaatccacattaattataccatttatataagccacctcatgagttcgattaaagaagcaacaaggggaatgaattgggttttaatcattgaagatatttatcgtaattaagaacaataccacaaaggggaagagcttttatcaaaagaaaagatgatgtgtgtataaaattggtaagttagtaacgtttggtgaagagcacattattttagccatgaatggaattgcgtgagtaagttaattaagaaggagatgtacgtaattatgaatttataatcacgattcacgaatattattactgcagtctggctgtatatacgtcaccgtctcattcaattataccatgttactttccgtttaagaatgaatattatattttttgcccaaagaaaaagaatgtatattatttacacaaaccagaaaacgtaagagaattaatgaattagggacgtgaagaaactagtaagcatatcaatatatcatgaagaaaaatttatgttggcgtttaaaaaaaaaaagttatgcctcaaaagtcagtccaatgttttccacatgctatgctctgggcaagtatatattctttgaaccaccatcgaaataagtaataaaaatttgagataaaatatttaaaaatacttccggtgtcaggaaattgacttatataaattgtagtttataagaatttttaaaatggagttggtttaattaccacatgttgccatggattaattgattcctcctaaaactttatgttaattaccacatgcactacgaaagtacaaattaattgatatcttattacagttaaaaagccagctaatatcatcatcccagttttttccgctataagaaaattaatccgttttatactccacacaacacaacaatatccaaaacatgtttatggtcaaaagtagcattacagaataataattacacgagagaatcaagaagag

SEQ ID NO: 55008 - DNA, 463 bp, Arabidopsis thaliana landsberg
tacattgaaacctatggcaaagtaaatcataactgaatttgatggtacatatcatactacgaagccataaatagaactatgcattaaattttcagcccttcggccctttttcgttttccactgacatggtactcaagttcacatctttatacttttgagtagtctaaattcaagtattaatttactgtctatcacttggagtataaactttccattgaatacttatatgattgtatttattattcattaggttacagtttttttagattctcctgcagccacgggatggtggcggccttcgcgcgggcagtatggctcaaggagtaccacgagaaggtgctggtggagatctacaggtaacctctccttctctctgcctagatccagatccatcctatacctctgcagcgctaccctctctttgctcgacgcagatatatccatacctcgcggagccaccctc

SEQ ID NO: 55009 - DNA, 523 bp, Arabidopsis thaliana landsberg
cagtatgaagtccgttgacgtgaaaaagcggcatgccaagcaaggctgcgtccggataatgcggctttgattgccctttgggcgcgccaccgtggattgttgccaaaactgccagatcaagctcccaggacaagagcgccgcaatgatgttgcggtgcgtctagacggaccctttggggtggccagtcgatcccgatgtaaacaagatgaccgcatcatcatcgggttcgatttggatatcgggaagctcgccgtgctgacgcataagctgatcgatgggtgtggcacggccacatggctttgaacggaccgaaataagagtcagaaaatcaagaccactttggagtttgactctgtcaagccgttcctggtcgactatggccacctttgccccgatatgcctaatgccattctctagctcgtccgattcccaccatgcattgagcctcgggactatccctccgatagaagttatcgccgcaaatgccagcccccattcagggtagttgcgaaggccaatttg

SEQ ID NO: 55010 - DNA, 503 bp, Arabidopsis thaliana landsberg
tcgacacaactatgaactgttggttggtcatgactacaacttccgccttcggacaactgctctttatcaactctgagaacggtgcctactgcaacggaaatgagctctggaacaacctccaggaccacagagggatcgatgaaacgaaagaagtggcatgttaggatgttaaccaaaatgacagttatcgctcctttcctgagaatgatgactctgagattgataaatcaacggttattgaagccacgggggcgatccataaggtagagtctcaagaacaccgatgataaattagagtgggagatgagacaaagcaccgagtgatctcagaaatgagacatgcctttttctagctctcaatgctggtccatgtccggtgctggtactgaccataaaatgggcgatggtatgggattttctgatgcctatgcttgttggagagcgatgaacaatgcagtaatttctcctggtgtcgaagagcgaacgattaaacctgacaagac

SEQ ID NO: 55011 - DNA, 723 bp, Arabidopsis thaliana landsberg
tactttcatctacctaacggtttcaaaacatgttaaccttgttttttttctttaaacaaaatcccattagttgtcactttaaatctctattattatagtaattattacaatctttttttaagaaacacttagtgacccatattaagaaaaaaataactttatttttaaacccatatcttatattttgtatctatccaattccttcctattatgtaaatttaattctatattattatattttgttgtgacatcttctcataaaataaataaatagctatcacaatttgatagcacctgaatacttcacctgaaactttccccacctctctctctcatcttatctatcaccattgcttcatcgccaaatcttgaaattctctctttttttttcaagaaaagacagaaagtgaaacaagtctttttttttttttttttttggggtggaacgaaacattgatatttgagtgacgatgtcgtacagtgacccaaaccaaaatccgattccagaaacttacgctccatcaaactcaactgaatcagagaaactgaaactttaccaagcttttatcttctctgttccaatctgtttcacattcatcgttctcttcgttctttacgtcatttaccttcgtcgaaacagcaccaccaatgttgattggtcttctcttggcatgcgtggtggtacctttgtccccaccaacaacaatctctcaacggtaacac

SEQ ID NO: 55012 - DNA, 619 bp, Arabidopsis thaliana landsberg
  unsure (1)..(619): unsure at all n locations
gagtgtccccaaatgcttgtcatattgaaccctaggtcaggacatggacgatctatcaaagttttccataatgtcgtggaaccaattttcaaggtaccgttcccatctttttgttctttttggatgttgtagtactacatcatcacattatttccacttttaggtaccctagagaaccatttccatttctccaatcccattatgcattttttttaatcttgtttatgattttgtgaactgtcacagctggccggaattaagatggaggttgtcaaaacaactaaagcaggtcatgcgagagaattggcttccactgtcgacattaacttatgctctgacggtacctctacttgttccaacacttaatgatatgtttaacatatctagcttctaatatgcatatattttatcttacatatctactattacttacgagttcttaataattcttccaggaattatttgtgttggaggggatggaatcatcaatgaggtgtgataattacctttcctaaactatactcattttttcgccctacctcggccaggagttaagttcatgaagtgatgaacntaatataccatactcccggttacttatctgctacaagcccggtgc

SEQ ID NO: 55013 - DNA, 354 bp, Arabidopsis thaliana landsberg
acgggggggaaccgcactaccaattctacgagaccagttaggattttttagagggagcttgcactaagaggaagatgcaagacgctaaaaagggtccccagagcaggcgcaataatcgggttgatggacgttcctggcatagaagaagctgtcacacatacaatcatactcaattcgatggcatggttcgatctgagcggggagatcctatagtttcgaaggagaggggatcctatgaggagctgtccaggcaataatcacacgatcatttttagagaatagtagaaagaaagaacgctcgtaaggagaactattggaaccaagaaatatagggcgtgcctggcatgcacacca

SEQ ID NO: 55014 - DNA, 1280 bp, Arabidopsis thaliana landsberg
atactagactgacgtctgataacgtatgatctcctaccacaagtgtctcattcatcatatcagattaccagtgaaggtattaagaagaataatcaaaatcagtgcccccacacacaacaaatctttatacgaacagtgaaaaaagatgcacctctaatggaagggcaccaaaaactcgaaaaacttacaattgatggaggcaagtgttgagctccctagcttgcttacgacatgtccataccacagaaaaagttcttcctgttgcgcattgagcatacttggagacgtactgatcacattccattaatgcctttgccttcatcattgtacgcagcgctaataacaaagtatatacataatcaatcaaacaaccatttaacaaaaaaaaaacatcaccatttcaacttcaacacaatctataagctcaattcatagaagcaatttgacacactcaatgagagcttgctagatcagatgcaaaatatggagttactaccaagggtttatgagaaccctaatcctcaatctagcaaaagaatctgcgtctatgataagaaaccaggcttaaatagtatcgatatggttgatctcattttcgaggcaataaaaaaaccatttgggggtttagggttttaaaacatagcgagatgaagaagtcacgacattgtcaaattaccttcttcgaccttcttcttcacgtgattttcacgagcttgctccacatagctacccattgacgacggaccttgagcttttccggccttctccgatcaattcgatcaaaagggcaaaggggactagaaatgggttcagggcaaagggtaaatccgtcatttaccccaaggaaacttaacttatattgccattttgcccccttaatatttttgtattatacgaatgaccttattaacttatgattcgtcacatttcacccacttcaatttaaaattatggacgagaattaagtcctttgacggtcaacagattagcacgtgtcgtattttaattgggtcgttgcccctctctctctctttactcttttcccatttaatggtcacgagaccgtctcccccaaatttctcacttcccctaatttcgcttcgaattcaaaagccctaattcgaaaattcccatttctcaaggtacggttccgatcttccttgctcatacttcgacaatgttttttctgcttctcgttttctgcgtttattgttgtatgttgctgatcttcgcgttttggtcatcacttcaagatctgtaggattcaaagttcgctctat

SEQ ID NO: 55015 - DNA, 620 bp, Arabidopsis thaliana landsberg
gtttctaattaagaaaatcttaattattgcttaattagatcagaaatctttaaaaaaaatctagaaaaatacccaccaataatcttgtttcttcttccaaaaatacaacaatttgatgtattaggagaagatatatacttacaagttacaacaacttctaataatagctgaaccattttggatagtctaactgtaaagacaaactttgcaactactaacatagtcataaacataagcatacagcccatatagcttccaacagggtccaaagaaggtccaagaagaagataggctcaaagacgtataaaaaaaaatagggataagatgaggatacatgttgtggacacaacttttaccgcatgtaactatgtaagagattttaaatccgatgaatcggaaacattgcaaggatccggcaatgaatcttctctttttttctcattgatgatgacaataactagttacaagacaaaccaatctattaattcatccggttgataagctaagaaatagatggaagtaatccacccttgatgatccacttgaatctttaaatttttctaaaattagcaaaaggcaatcattttttttgcaatcaacctcccaagacttcccatctt

SEQ ID NO: 55016 - DNA, 423 bp, Arabidopsis thaliana landsberg
tctacttcagcgacttgtggaccggaacagctacgttagccgcggtgcttctcttgcttttgaccctagttgggacgattgcttctgtcatccaagcttacaaaagcttctagtaactatatatgtttttatcgtcaaaaacttgtttccatgttttccttttggattatttatgtactttggtgatatgattcttgacttctctaaagattgtcttttaacacataacaagtatacgaaattttatattaattattccacttggccaaacatctatggattattcccatgctacttatacgaaccaaagacttgatacccaaacccaaatagatattactctatgtatacttcttcgcactaacctagaaggggaaaaactaactacgaattccattaacaaactcttaggcttctactctt

SEQ ID NO: 55017 - DNA, 650 bp, Arabidopsis thaliana landsberg
tttggctagaatcatcaatcctcgacgaattgatccttgaagaacgcttctctaatgtttctttccatggtggattcctctttggagacttcttcttagagattatgcaacccataacaacttcttttcgatagagaagaatcaacaacaacaacagctcaaaatcctaatccctaattcatccataacaaagacaacaactttaatggctcagcgagacccaacaccatccctgaatacacacaaagcaaaaaacaaaactttgatgtcaaattcaaactcaatcaagaaagaaaactgaacccatcaacaacaacagctgaagaatccaattcatacactgtagaaccctaatacctccatagcaaaaaggcaacaactttcagagaaaacaacgatcttgatgaagaatttgaatctgatgatcaaatataaagtctttaaacacaattcaaacgcaaacccatgaaaggggaagtggaatcaagtggggaatttgaccttttttgggagagaaaatttcaagagcaagtgatgaagaaagggtaagagtttaatggaagatggagagagatgtacgcaaaaataaaagtagattggattattattttctttgtttcagattggtatcatttgaccgaagaaacact

SEQ ID NO: 55018 - DNA, 913 bp, Arabidopsis thaliana landsberg
attgctgtttgatatagtgagaaaaagctggctgtgggtcccaccgtgtccttactccggcagtggtggcggtagctcaggtggcggttcagacggagaggtcttgcagggttttgcttatgacccggtgcttactacaccggtggttagtcttcttgatcagttaacacttccatttcctggagtctgttagtttttagactttaagataaagagactacttgtggtttccacttctgacgttaagactgcttgttgttttctcaaaattctgtttcttttatcttattactgtctgtatgtagtaagtttatatttctaatgtcaaatgtctaatctttgacaacatgtcaacaacatatacagacagatttctaattgcgtacaatccaatcctaaatccatcaaactcaaaaacataacccttgggagaatggtttcacttgagcttaacctggagaatgagatgaactttgcggttcattattctcctgagttcttcattggcctcaattcctatcctcctgcaaaattagcatcaacataagatcatccttgagtcattgattagtcaaaagaatgaattatgaacgatcttgtatgctcttacccgatcttgcaaccgcccttgcctacaagaatcttgcgttggctaagtttaggagtgatgagatgctgttcgattctaagagacccatcacgcagctctttccagtccactagacggtgctccagaccatatggtatttcctacaatttgtttcaatcaatcctgtaatttgtcatcttggaatagacggaaactgatacaaaatgttatactagtagaggttgtatcattacctgatggacatggtctagtaatctctaaataacaacttcaagagaaatgttcttcaagacttcttcactc

SEQ ID NO: 55019 - DNA, 1064 bp, Arabidopsis thaliana landsberg
tctatttatgctttttttacatctaccactaaataagaaatataaaacatttttctgcctagaacacaaaaaaaaaaaattataaaaatgataactatctttttgatattgaaatttacaattaaatttagaatgcttttaaatcgttctttatttaggagtagtacatctaacgactaacgttttatgtggaaatattaattaattgctttaactgaggaaaaagttttttgaaaaaatctaatttaagaaagttttactcattcaaaacttaaagataattaataaagatttagtcttatactaaaagggttgattcagtcttacatatcaaaatcagtaaaaaatagaaaacgattatagaaaatcaagcagaaatatgcgtcatcttaattatttctttgaaaattaatcatttaattaaaagccaaaaccgttagagaaaaaatagaagatcaagaagaaaatcatatctaagatttccaatttaaaatataaacgagagaatctacaatccttcattctatctctctctctctatctctctagagtaaccactgtgtggatattttgcagcctttcactgttattttaatggcgtaaacgacgaaacgattatacgttttcttctttataaggtaaacacacacaaacaaatctagctaacgttattgttttcttcttcttctgtacatatttttagatgtaagatcttttgattacggtttgagatatatcatctatgtgaaagaaataattcgttgggttagtgttgttgttacagagagatttataacaataatgaagatggatgagtttcgtgaagcttcttcggtctcttcgtctccttcgactccactacgaacacccttacattctccaaacctctttaatggagatttctccgttagcaacagattctctttcaagtcttcatcagactattctttatcaagttccttctctaatggactctgttctcctgaagatagttcttctccgttttcttctccttcgtttaacgggatcattcctatgcacaatcacacttcatcatcacctgt

SEQ ID NO: 55020 - DNA, 521 bp, Arabidopsis thaliana landsberg
  unsure (1)..(521): unsure at all n locations
ctataacggtaagtaaatattggtaatataacatttttacatgactttggtgtcttaatttgtcgtttcgcatgtgttttatttagtttctgccagagcatctgagaggccattcttaatatatgatatgatgttgctttgctctaggaatttctacgaaaggagggacgctcgacgaccacaagtttagtacttctaacagaaggactagaaaatgccagattcaggtcattttttaacaaatggcctcagaccgtggagtctagcctctacaatgaaggtcgagaaaaagtggctggtctgtatcatatttctctggttctgtaaagaagataaaaaaatttgcttaagaaacaaaaagatactaaagtaaaaatctgaatacttttgtgcagcgttgatcaaacaaaaaggatatgacgttgaggagcttcctgatgaagaagatgaccctctttacacanactgccgagacaacctcaaggtacctcataccaaactgtcacatatctgagcataag

SEQ ID NO: 55021 - DNA, 341 bp, Arabidopsis thaliana landsberg
tatttttaatttgctacaggttatgttatgttggcatgcactatgttttgaagtttttaaagttttacatggaatataactgaatctaccaacgaaaatgttattcgtattactatctttgagatattgatttttttactaatctgataattgtggacataattgttctatttcaagcatactttccgaattctgatataaaatcattaaatatgcgaacgggttctatactttaaaacaaaaaatataggattccgattcgatccgatctaatatatgcgttaaatttcaaccttggtcaatttgattggctgaagagatgaagaaaaaatgttgggaag

SEQ ID NO: 55022 - DNA, 775 bp, Arabidopsis thaliana landsberg
aaaactgcaaatctataacagtttgtgggtggaaaactgatcacatgcttgtaacatattctgataacgatttttatccacgggctatgggaagttcaccctcgaaactatatagagatatattacacgtctttgattatagacttaaagttggagaattctttcacacacgttttcaagccgtaggagatcaaaccattcacgaaagattagctacgcctttttgtcgctgactagattattgggaaattagttcctgtatgactagagagttatctaacaagatatatagttttcttaatctttttggatgaaaacattgtttattacgttttggttaaaaaaaatgtcagcatgcagcatcaaagtgttctgaattttcaaacaaaatttggaccttttgttagtctttttaagtttccaacataattgagtttttttttgtaagggttttattttgctttacactgggaaaagattgttaaggtttcctccaactaatcaaacagttgtattacttatttgtatgttaatagatgaaagaactattccaagaaaaaagagaaaaaaaaaaaagaagcaaaacagactttttgtaagtgcccttgattattatttcacattttatagtcttgaaaaaagagattccctatgctaaatcatcatctttttgttgtcgtattacaatgatgatcaaccatttcccccataagaactgaatctaacttccaaagccaagaaagacaactacattggatatattttttgcgtcatt

SEQ ID NO: 55023 - DNA, 529 bp, Arabidopsis thaliana landsberg
tgttggctagaataaggtgaggctgctgagatccttccgctccaccgtccatcgcaaatcggaaagcttgaatcggatctgagagagagagagagcaaatatataaaaagaggtttgcttgagcaaggaggaagagcttacaaagatttcaggtccgatggtttttttttttgtgtatgtaaaaaaaaaataagtttcgcattaccttaaacacccttatctttttttacatttaaatttggaatttttaccataagagaaaaaaagtaaaaaacatttacatttaaattctcgttataaataatttaaacttaagatcgttgaattcaagtaatggatatttatattttatatctctttccaatggaaatcataaaagaaagaggcactcattattaaatttctcaagtttttccaaagtgtagaaagatgatagaattatttcgaaagaagctgaagctatgacgacgcatcacaataagggatgtgttctaatgtcaggctctcaattccaagtaagacatgaatg

SEQ ID NO: 55024 - DNA, 581 bp, Arabidopsis thaliana landsberg
  unsure (1)..(581): unsure at all n locations
catgatgaacacaagaacagagctttaaatacaaattatggcaaactgaatcaaacagattaaagatacactcaccagtagagacggatacagttcaaaatcttctaatttccataagtttccagtgagcggctccggaagctaaatagttcactcataaacacacacacaaatctctataattagaaactccttgttttttatgtttttccagcgacgcgcatatcacagttttacctcaaaattgggagctctagctccagttttactccggctgactcagttctagcggcgcgaaccacgaggcgcctcggcgaatggtgcattgactctccgccgcagattactgaagtccaacctcgacggcgagaatgaagaaaacctccgggaagagactgctaatgcagttcgtgaaggaagtatagatgaagctccgtgtgtcacggtggttacgacggtggaggcaccattgtagtctctggtgatttcgcaattctacggagcataaacacgcgcagtatcnagacgttctagatgatgggcgaatagagataggctagccaatatgttacaccacaagt

SEQ ID NO: 55025 - DNA, 511 bp, Arabidopsis thaliana landsberg
  unsure (1)..(511): unsure at all n locations
tgcaacacggtgaaccgctcacaatcgtttacaattttgaggtgggtcactcgcaagctctcnnnnnnnnnnnnnnnnnnnnnnnnnnnncaaaccgtctagtgatgtcgatcatcaaagagtaacaagcaaaaactcccacttgatacgttcaaagctaatgaaaatggggatgcacacaagctactcaatgcattaatgagaccgctaatcacgtgattatcaactctctagtttctcactaggtaaaccagtttcttcatactccaatgggtagctcatcaaatatgcaaaatctattagccattacactttaggcaaaatctacaaccaattgaccgtccaacgatggagcgtccgaccattggcctcggtccgacaagacacaacgatcataatgacattattgtgttagatacagtcgttaaagtgtattgcatagagtgtatggccattgctctcatcggacaatctacactcatgaacctctttgctcacttattggagggcg

SEQ ID NO: 55026 - DNA, 1663 bp, Arabidopsis thaliana landsberg
cattctcgagcggtctcaatatgaagagacatcatcaaaactcaatacataagacataagcaaatcaagaatgataagaactatttcctcactgtagagctatcaaggaggtaaatcaagttcagctgtttttaatgtctaataatgttctatatagctaagctgagactcttgagattacctatttctctattgttgaaaagcctgagccactctgctacaacatctggcacagttttctccatatgggcaatgcatctttgtgttatctacaaaatccacagagaatgtcaacaaaagaaaataaaaaacaataacctgttaaagaaaactccttacatcctgttcatggcgattcatttcatgggttatgaatggaatccttgtaattgtgcgttccgagatctgcagaaatttgtgagaaataatgagaaaaaatatcttatgaacattatcatgcaagcgactggaggtaaatgtcaaaaatggaaagcaaaaataaacaaaactatcttgatcatagtaataatcctcaccacagtgacattttgcattgcaatacctcatagatagaaacgaaaagctaagttgaagtaagagttttaagatatcagtcttaactacatcattctaactcatataacatacagcagtatcaacataaccagcataggtaaacattcgacaatcatagctcaacctacaggtctaaaagtttcgcgaacgcagactggaccacatacaccttgtgtaacattcttggaactccagtaagcaccgcaaaacgcgctatcgcatcccttgcctgcaataaactagagtcaagtgtgtatatatataattgtcagagattcctttcctactgaacatgtttaaatattagtctcttatcagtccaaccttgcaatacccagctctaagaaacatacaatattattctctgtattctaccagcatcccatttttttcccccagtttcgcagacgacatattagatatcattacataacatgtttaccaacaggaacagcatccattcactcggtacaaattttccgatgtagagcaattgaaagtaacaacaacaatgaacttacaatatcaagacgggaaaaaagtacagtaaccagtcttgagagctagatgttagattatttaaacagtgaacaatgcaaaataaagaatcatgtactgtaacttacagtgtaacggcacttggagattggctctaaagggcatcattccttgacacaggtggcattgcagatgtgcaccatgatgttcacaccgataaccaccaatattagcaactgccaacagagcccatgtcataaaagaataaatcaacttcaggaagacaggaatgctgagataaaacccgtgaatgacagtgctcgtctattttagatttctcaagtacattttcttctttactaggactagaatcactttattttttggtttcgtctgaatcaatttatcttcaataaactaggagattagcacgaaaagagatctgaacaatgggttcaagttctagtctcaaaggttctctgccatcaacaaatttgtagcacaggtttaggttcttactgtaccgctaatttggaaatcacctcatcatatactaaatttaaaaagtcaaacactaaagaactacaat

SEQ ID NO: 55027 - DNA, 1372 bp, Arabidopsis thaliana landsberg
  unsure (1)..(1372): unsure at all n locations
aagtcggtctctcgtccaccggtccatcttgagaagacatgttggagttcttaagattaaagatctcatgtatatcaattcatattacttgtaatctttagagtctccaaacataggagatctcaacttaaaaatatttatggttggaaagcttgatcctaatttacaaacaacaaaagttgaattagttctcgaaatcacattgcagtgatatttacgtgtgaattttttagggcgtatcaaactttgattcacgaagtttgataattgttattaatttagcttccaagtaacagacacgcaccctctctctctctttttcttatgtccgntacgtacggaggaccaatcatgtgtcttgcaacaaagggaaattatgcttaagaaaggtattaggtgtgatactaaaacaataattttgtctttgattttaatttaaggtactataacaacttatttatgctaatgtatattttttaagtagcgggagttttccatgattatttttcactatatcaagtagaaaattcgtatctcatatatataccacccgtgaacactataaaatatttcatcataattacgtaaaatcatcatcactacaaacattataaatacaaaaagaaaatatttccaattcttaggtgatacaaaaaaaaaaaaaaaaagtagttatgttattttgtagttaagtgtccatattcacttcgaactcttctacctaaaaaggatacaacaaattgaaaaaaaaactggtgaatggtatgaggtttaccttttagcatatataaaaattggaaaatttggggaaatataatatgaaatttaccaatcatttttaccaaattgcatgaaatatatgataaagaaaatatgactttttactgtacataagaccaatagccgaaaggatgatataacgtaataaccatgatcataagctataaccggttctttagaaactaaaattaacatagccattactagaataccaaattcgtattacttaaattcaatacacatcaatagttatcataggtccatagcaagagacgatatagcaattttaaagggcgaaaattactgatagcaactaaagagtggtcgtcccaacgcgcttcaatggagcgtggtaacatctttatcagactttaggggtgagaacatcatctttatccgtacactatgaactatgattgggcagtgtgaaccacacgttactaaacgcaagtggtcttagcaataactatattttggtagagacacattgagggaaagggcgtacaccaaacatttaattatggatttgtacgcatgactttttttacataagacatactcaatcttctatagttacacatacaaattatgt

SEQ ID NO: 55028 - DNA, 432 bp, Arabidopsis thaliana landsberg
atcgcccttcagggatccaccttctccacagccatctccacgaccatcaaagaaatctaaagtttttataccaaaattagtgtccccattcgagaagaaaaagaagagtaaatccactgctggcacagctcgttttttgaaagggattggacgaagcctcacatcagacactattgatttggccgatctcgaggagtccgcaaaaaaggctgaggcaatggccgcaaagataaagaagccaactaagagcatctccaacaatgcctcaaactaatgcctcaaatcgaaatatagggctctacacaggaaaaaccactccaatagtgcctcaattcaacaaattttgtcaaaatactatagggctacctctcaagtgcctcacatatactacactgtactgggctgcccgatgatcatagatttggggcttta

SEQ ID NO: 55029 - DNA, 624 bp, Arabidopsis thaliana landsberg
ttgtcaccaaatgtaagctcattattttttttctagtcctctgcttttcttctgtttcctttgggttttagggagaagattttgaacctctgacacatgctttgctttcaggctctcttgtgaggccaaaggttgttaaaagcgttcacttttgtgcatcaaccggtgaatttaccaatcgagattatcgacacataacatctcacgctggtttacccactggctctgtctatcccacaagggtaattacatgttttttgttttcgttttgttcatttacctgtactgctggaagatttgcctcttactgaagattgagtttttttttgttcaggatgataagggaaacttattggtgactgagtatgggctgtgcaaatacaaagatcaccagaccttgtcaattcaagaagtgcctgaaaatgctgctcctggtcagcttccacgaagcgttgatgtcattgctgaggatgaccttgttgactcatgcaagccaggagatcgagtatctgttttcggtatttacaaagctcttcctggaaaaagcaagggtagggtaaatggagtctttaggtgcgttttcttacacatctgttagttcaagatgttttcactctgatagtc

SEQ ID NO: 55030 - DNA, 1245 bp, Arabidopsis thaliana landsberg
aacaaatgtcaataagaaacatcttttttagtgaatggacaaatcttagctgaagccattttaatctacatacattgggcagctactggatagaaaacatttgaacccattatatgtgatatagctccagtgaaacaagtcttagattgtgaccagattaacatttgtggaaaaaccaaacttggaaaagttgacccacacggccacacaacaaaccactgtccactgagtctaaatagagaggtcaatatcgagtttggtaatggtaagaaaattgaataggccgcgtcaagctgaatggaatcctatgcaattacaaatttataacgtcaacagtttcatactcttgtttcacaggagattatatctgttcttgacttttttttggagattttcaagtcttattttccagagaagtaatactataatagtatcatgcaagtaaaagagtcaaattctcaattttagacaatatgaaactttaagacaatcacattttctttaatagcaaaaacttcatatccaaattaattactcatagcaacaacacaatagtgaaaaaacatcaccatcatccataattaatgacacaataggatctccgtcaccgccatctcagtacactgacaaaaaactcaggctatatgcattgtttactggtccatgatttttgtagactaatttccacatattatatgaaaatgatttttgttcaaatgattttaaataaggtacacagaagattgcaggcccagcccaaaaactaatattaatgcttcgtgtttattagcttggttcactcatcatcctatacaaaatttcttggcggtttaagtattccacgtgtcacagtgtagtctcgttgattaactgtctcatatcacataaccgcccgatcttcataaccacataactaaaaaacaaaagggtaaaataaattactcggcacatacgcggaaaaaaaaaaaaaaagcgaatcgtttacttacccctctttgaaaccgacggtggtatttttcgccggagaagatgaagcagagaacctggccttgtagatctgaaagatctggattctcctccttatcgaagctgaaacctcacgacaaggataaacggagtagaatttcattaatcaacaaagcaacggcgaagtcaagcacaagctcaagggatgcttcttcttcttcatgtcctccgactaatgagttcggagatttctcgacgcttccagctgatatactgatg

SEQ ID NO: 55031 - DNA, 956 bp, Arabidopsis thaliana landsberg
ctcgttctttatttcatcatctgaagccatttctttcaaacttcactctctcgctctctctgtgtctcctagagagagaagctttttgttgtgggcgactggtgaagacgaaggcaagtggcgggaaattgtctggtttagggcgggatgttggctaatgcccttttctctaaccttcttatttaatggacccgagttttaaatgggccttgaattttgaacaaaaacaaatgggccttgaatatgataaacgttaaatgagtgaaaggtgaaaacagttcaacagaaactgaaacggttgactaattccgttgactttttgcaacacggaaaatagttcatgtagggaatttgaataaatattttggtcagactgaatttggctagattatcaaatttggagtatgaaaaacacatgtatatattaaaataggctatttaccttattgcttagctccgaaaccaacattataaattatcacacaaatttgtagggaattaaagaatttggtttttggattttgtaagcaaattgccaaaatctatctaaatccagattttctagatttgttttttttttaaactatttttattattttagaaaacctacttttattacaattgtgaatgggcaataaattagattttggtaaataaaaaaactaaaatatttttacctatttcctactaaatattttcccatgattttccttctaatttcctacaaaatttcttatacaaatgtaatcttaggaaaattgaaggaaagtcgtcccttaccatttttcgtacccaaatttattttttctcaatgacttttttttttcccaatttttccctaacgaagaatttttcttacctaacaatttctattttctgtagggatttttttggtagaaaaaattttttgttactaaaaatttttgaacagacttttttatttatatggaaatttt

SEQ ID NO: 55032 - DNA, 642 bp, Arabidopsis thaliana landsberg
  unsure (1)..(642): unsure at all n locations
atcccgctggtgctcaacacgaagacccacttggactnnnnnnnnnnnnnnnnnnnnnnnnnnnnnnnnnnntacagcagccgaccttcctccacgatgacttcgtacgccgccctctcgttctgctcagcagtcaatcagtcagtcagtcggatacatacgtacaattttctagggtcacgccgcacgtactggtccgaggtacatgatgagctgtgagttgagcttgcttcgtgggcatttctggtgatgcaagtctctgcctttgccgacatccaaccagtagaagaagggcttgcagctagagctcgcgcacaagatgtcgtagtagaggtgcaggttgtggtcgtagcggtggcacgggtcaatctgaacaagcaaacagatgatcagacaaacaatccgtccaagaaaaaggcatttatatatatatgaaatgtatgaaaatgcttacagcttcgagcgagtgctggagcgtgatcttctgcgcgttgtcgtcattggagaatccttgcagaccttggcgaccctccatgaaataaannnnnnnnnnnnnnnnnnnnnnnnnnnnnnnnnnnntgaaatcttgggtgaagttgcacagtactgattatatatgctgctatgatcagggactgaagt

SEQ ID NO: 55033 - DNA, 617 bp, Arabidopsis thaliana landsberg
tgatcatattacaatacaacttttttttaacaccttgcaacagttatttgttccactgacacaccatggtaattataatcaaacagcttatgatgcaaaaggccctttgatcaggagcagggtgcctttgcatcttgtgccaaaaaaagagagagagagaaaaaaaaacaggtagcaaaaaaagacattgttataggacaggtacatgttcatgcatggcttctctcttctgtataggacaagatgagacttgatggacactgactgactcttgcactgacaagctgggcacggagagaacagttgacacaccaaaacgacttcattgatcagggagatacagaggcctgaagggcagggacgacgagtatgatacagagacgagcagagctgcaaaagccatggagatttgttcttcttgcatccatccagccctggtggtgctgagatgcaagcttccgtccgtccgtcttctcctcagcttctgttcttgcatttctccatggcacttggcgctggaaaattcagagatagagaccagatgaaacaaaagggctgcttactaccttagaaagtctcttttgttgttgagagtagtaataataataatcatatat

SEQ ID NO: 55034 - DNA, 132 bp, Arabidopsis thaliana landsberg
acattttcgacatagaatgtagacagcgtacttattgtccgaaatagtcaaggttgcagtatttaggatcactgaacccgaatcagctcgagtcagtccacgcaaatataagtcaggggaaatcagcagcag

SEQ ID NO: 55035 - DNA, 1049 bp, Arabidopsis thaliana landsberg
gctgaattttaatacactacaactttttcctccaaacgttacagacagcacatcacaaaacgagcacaagttagtatgaaccctcttaactctagctatatctttgattccagcttcttcaaactttctcagtagagttgccacaacaagtttccaccacaatcaaaatttctgaaaaaaatagcaaagtatgaaaagttgtgatgtttctctttaccaaccaaatagcatttttaaatgaaatataatcagagtaaggttctacagtaaagtttagctataactttcatcatttcccatgagcgtaattgcttctacgatcaattccccagaaaagtgcgattaacaaacagacctcaagatctaatcgactaagatttcagtgaataaaacgcaagggactttgcattccgagtttaatgaatcaagcaccgttactttaatttagatctgagttctgttctaagagaaattcacatgatctctagacaggaaatggatacgtttccagaaacgaatccaacgaaaaaaaaaaagcatacgaagagtttatccggaaacaaaccctaaaaatcggtaaaacagagaagatgacggctccggtgagagtgatcagaaggaaaccgccattagcgaaagcttgttgtagccgaagaagcgctctctcctctcgctgtctccgttctaaatccgaagacttttcacagaactttccgaatatttttttcctaaattaatttttctacctttaattttattttcactcctcagtggttcaatactaattttatgacacatcctatccaatgagtcgttgacacttaatcactattctcacttaaaaagttaaaaacttaaaatcatcctcgtttgttaaattatatagatcgagttaaattatcaaaaatacccatcaattttggaatattaacatttgaatattatatgggcctagcccaaaattatgttttgccattcggcccatataatagacaatctgcaaagtgaagaagaagaagaaccactaacgtaatcttaccggcccgatc

SEQ ID NO: 55036 - DNA, 435 bp, Arabidopsis thaliana landsberg
aaaaaaagaggtgccaacagaagaaccaagcgctgggccagaacacaaatgatcaaaacttaaacccttaggataaaaccgtgtgggcaccatacacttaggccaagaccaagggactgctgtgaagtaaacatgacaaacctttgagaagataaggaggaagacaaaacacattataaaaaatcaagacaagactacaaatttgaaatgaagaatcattgctgccggcacagacaggaaaataagcccactctctagacttagactgctacatggaagcaaagccgcacaaagaaaagctttaacaacagatacagacctagttgtgtatcaaagtgactagagacacctaagagatcaccaccaacaactttggtcatgacacagctttaacaagagccaaaacattgaaagggcttttagacatcgggagag

SEQ ID NO: 55037 - DNA, 392 bp, Arabidopsis thaliana landsberg
ttgttcacgtgaaaatgattggaatgatgttcataatcgaactatatattgactccctcacatgggggttcattattttaatgaacaatttgttaccatggccaagaggcttttcacaatgtccagcattgtgagcaatcgacgtcacggcatgatgatcaatcggggatccgttcgtaatcttcccacactaggggctatggctcacgtcaaggtgaccattatacgccgcctccgtgactctctccggtatcactccctgatgacgattgttccaatgatccgttaccgctaagtactatgtccgaccaatcgagtgtggtctactaacgggtattagatctccgatctgattcaacttgacgatcgatgatgcctaattactccccggt

SEQ ID NO: 55038 - DNA, 548 bp, Arabidopsis thaliana landsberg
  unsure (1)..(548): unsure at all n locations
cccccaccttggttccaaaggcatcagtactacttacagatattttctcttcgacccgcatctctcccttctccatattggcgtccgacacctcgagggtccggagaaggagttgcagctcccgggcaaagtcgccagcagtctttgcatcatgcatgaccggttcggtgacgagctccatgagagggacccctgcccggttgtaatccacgatacttccctcaccctgatcatgaagcgatcgggcagtatcctcttcaagatgtacacgggtgaccgcgacaccattcaaagaacctccgctcactaaggggtaaaggtactggctgatctgatatccctttggaatatccggatagaaataattctttcgatcgaattcagtatatgaagcgagggtacctcccaaggcgagtcctaccttgaggacatgatgtacagcctcttcattgatcaccggcagcgttccaggatgacccatgcagatcggacacacatgcgcattcngttctnccgcatgtggatcgttcttcgagtcacagaacatc

SEQ ID NO: 55039 - DNA, 610 bp, Arabidopsis thaliana landsberg
  unsure (1)..(610): unsure at all n locations
ttttggctattatcttccatttgttataaggcataaaaccaattaagcatcgctgagttttagatactctttcatgatataacaaattttcacctcaaattccgctttctctttttgcagcacttcttcgagttcaccaattcgtcgcctgaaacctttctctgccaatttgactaatagcatttaatacttcagaaaacagaagctctgctctctctatcacctgtttaataaaaaagagggagaactcagtcaaagtattcactttcaaaactccatccaagagaatcacatgtatttcacctcgtctgtctctctctgtatccaatcctgattctcgtagttgaaactaagaattgatggtggaaggtagaccgaatgaacatctatagtagcgtaccggaagcaagcaaccannnnnnnnnnnnnnnnnnnnnnnnnnnnnnnnnnnnnnnnnnnnnnnnnaaacaannnnnnnnnnnnnnnnnnnnnnnnnnnnnnnnnnggaggagtggacgcaagaaaaaagtaccatagaagcgaagacaatctctatgcagagaatggcacaacaaagctctctactagcagctgcgtgatttgagaactg

SEQ ID NO: 55040 - DNA, 440 bp, Arabidopsis thaliana landsberg
cagccaggggccaaagcaacagtcaccagatggggaaaccacaaaaccaggcgcctagacgattttgatgcccaatcggtaccctgtggaggccgtacgagtcgaccatggcgtctaaacaatggttggcagaccaaggagagcttaccggggacgaaaatctcatggttggctgaaagactgtgatgagagagacgacaggcctgagaagcgcggaatcagggcgctagatctgggaatcggtgataggaggcgtaaaagaccgcaactgagcaacgtaataacggggctcagaggactgagagcggtgacggttcacccgaagatccgacccaaatgttcgacgctaattcaatggcgaccctggactactctaagccctccacgaggtacaagacatgaatctttacacaatgaagcaccattgagagaatgacctt

SEQ ID NO: 55041 - DNA, 486 bp, Arabidopsis thaliana landsberg
aacaaattactacatactttcatcaccccacgtaaaaaacaccttgctttctcctccggtgaggctcgtgtctgaccgaactgacggaggatctaacatcaccggcggaagttatcggtcaccgtccaaaaacaccaaaaaccaacggttccgcacaattattcgtcgccctaaaaaaattctatgggttcacgctgctagtgcgcctcggttaccacatggggtcagacttaaccaacagcataatcgttcagccaatgaggtaacgagtcgtggcagaaatacccagaagagaatgattcgggagtaaattaacttaatgtcaagcgttggatctaaagaccctctaggctccgggtggaggataaccgtacagcccttctctgtccaaactggaactgacctttccggtacaggacgtctccgggaaaaggaaaacgaccggtgatagtctcatggcaaaggacatacccggtgattgattga

SEQ ID NO: 55042 - DNA, 325 bp, Arabidopsis thaliana landsberg
  unsure (1)..(325): unsure at all n locations
acacaaggaacataattttatatgtaaagacgnggcnccgaaaacatnagcattagttttcatatttcctcgccatcatcacccacctccattctcatcatcatcctctctgtttgcggcggatacaagtgtacctaaaacttgaaagaataagaagaatacgttgcgagattaccaggcccatattgctctactaaactcattggaacttctcccggtatatgcccttctttttcttcctgtcttcgaggtcactctttacatatatactctttccatttgacttttgttaggaacgaaatatgataacttacctctgagaaag

SEQ ID NO: 55043 - DNA, 530 bp, Arabidopsis thaliana landsberg
  unsure (1)..(530): unsure at all n locations
ggcgtccatcgccaacacggccgtgggattcgtcatgttcatctacgtcatcgtgccgctctgctactggcagttcaacacgttcgacgcccgcaggttccccatcttctccaaccagctcttcacggcgtcgggccagaagtacgacaccaccaaggtgctcaccaaggacttcgacctcaacgtcgccgcctacgacaactacgggaagctctaccttagcccgctcttcgccatctccatcggctccggcttcctgcggttcacggccaccatcgtccacgtcctgctcttccatggcaggtattttatactgcatcagccctttctctcccactttgatggaccgtcgcatccatgagcggtgtgctgaccagttgtcgctgtacgtgctccttgacacagcgacatgtggaagcagacaagtcggccatgaacgcggtgaactggacgtgacgccaactgatgcagaggtacaggcaggtcccgcagtggtggntcctcatgctgctgctgggcacggtggtggt

SEQ ID NO: 55044 - DNA, 445 bp, Arabidopsis thaliana landsberg
gacggcggcgcgctgaactggtccgtgctccgctccggcggcagcatgttcctgcgttcgctctgcgacgttttcaccatcgacgtcgccgagagcggtggcggcctgacgctgtgggccaagaacaacgtcaccttcaggcaggtgagcacaaccggcagcggcgacatcgtcctgcgttcagacgagggcgcgatcattgcgctcggcaccgggctggcgaacgtcaatgccggcggctcggtgacgatgaccgtggctacgacgatcaccggcgcagaggtgagggcaggcggctcggacgggatgacggcgaccaacggtcaggtcgcctggaacgccgtcacagtcgggaccaccgtgaacgtgcgctcgtccgccgacgttatcgatgtcgcgacgatcacgagcggtggagctcagaccctgtgggccaagaacaacg

SEQ ID NO: 55045 - DNA, 720 bp, Arabidopsis thaliana landsberg
gctttaaaagtcgaatggttagtgtaaaatactaaataggattctatgcatgtttgactatatattgtttaacatactgttgagatttttatataccgtgtatagtactttttcatgctaagcataataagatgatcttagtcacaaatataaagatcttccactaccccatgaaaagtgttgcctaccaccaattttcttcctgttgttgatatgcaaagacttcgcaatgaaccaaaactctttgaataatatttagagatggcttaccgcttacctttaaattttgtgtttatttcgaatgtcatttaagtgatattccaatgaataagaaattttttttgttttcaatatacttggaatacatgaaagtttggttattgtggattcaatttttttggaaagttccaaacattgaaggttgagtcgtccatattataaaaacatcatatattgtttgttgcattgctcatataaagaatatatatatatatatttcgtcctctttctgaatcttatatatatactaaaatgttaatagtttaactcgacaaaaaatgcgataccggtcttcaattgaggagacgaaaatcgctatatatgaacaattttattgacttgtagtttgtggatgttattgatttccttgccaactcgcatgtgtccgacaacgccgccaagcttctaaggaatataccatttccaaataaataataatga

SEQ ID NO: 55046 - DNA, 760 bp, Arabidopsis thaliana landsberg
  unsure (1)..(760): unsure at all n locations
acctagacttaagagaatcggagaggtttactttgggctattttgagttgggctaaggaaatgacaaaactatattatttttagaaattctaatttttttatgatttatagatttttgtatttgtccaaataaattttggtatttttgtcctaaagcatcgttcattgatctagagacagctaaagctaatcaaataagaaactccacaattaatagcaactggaggaatcacaaatagttgtatcgaatttgataatttctaagccaatcttcacctttctcgtcgtaatccatcttagtaaaggcattccccaagaagttcaaattagcagcaaatgcagatgctcctcgccatgcatccagcactggatccatagctctaaccacgttaatgggtgatccgcaaggtcttatcatcctaatcccacattccaaccgctcgttcatccctggaagaaggctacacccgcccgtcattagtatcgagctcgttagcctctcctctaactctttctcgtcgtgcggtagccttctgattgatatgccagccatctcgtctaagcctacttggtcaataccaataaggtttggatggaacaggatctctgggcaacggaatctttctataccaatcactatcttgtagtcttcctctgttaatgggcgtacgcgtggcacctcccctgatgtctgactcaattctccttctactttctgcacatatgttggatcaatttncctgaagtctagatgataaac

SEQ ID NO: 55047 - DNA, 720 bp, Arabidopsis thaliana landsberg
ttcaataggaacacttattttttttcagtgtttaaataatttgtgtggtctggattgctagacttcttttgcttactgcagagagctgttttgatcaaaaaaaatttctatctttgctcttgtaatttcttttgcgttctgttttctctttgttcttattgttctcggttctttataatttcaggtgagggatgtgcgattgatcatggacagaaattcaagacgatcaaaaggcgtcgggtatgtttcttcagtttctactaaacttagttttgtgtatgtgcacttggtacgtaaattttctgcatattcagttttctctgcaatttcaagaattcgattctgtattcttagatgcactagcaatgcgataatgatgaggatgatggcaataccttgcacagttgtttaatcattctgcgtggtcaaggtagatgtcagaaaacctgaatcctatttcagttgttactttccattgcaagcactctcaggaaggagggaatcctatagcctatcaatcttattcacattctttgtttgatacttcctcctagtccttggtgctttccctgtcctctgtttggatattcactggtggaggagcttgcttctgtagtcattgctgttatagacttgattattgttcttttatcatgatgggctaacattttctattactctaggcctccaacccaccaaagagactcagcttgaaccccc

SEQ ID NO: 55048 - DNA, 732 bp, Arabidopsis thaliana landsberg
cctaatattgtcctcccagtcatccattgaaaaggtgaccaaagtgaggattatgagcatatggtttcatgatatatatgccttaactaactccgtgtagttgcagacaagccctgtccttggacatgttattttacctccattcttttccgccatttccttgagagcctgcaagttcatttacccatcaaataaataaaaaaagtaacccaactttaaattttttgaactgtataggatagactgatgtaactgatcaagctaatagaaaaagattctaaaaagagaaaaagaacagagaagctgaagttgtacaagaacagaatcaaaccttggtgctgtagacgtagccattgggcagcacctgtggtgggttctctgtgtccattagctccttagaaatatagcaaacaagctttgaatggtgctgcttggagaacggtaaaggcaaagctagcttccgaaagttctcttgtgagagagggtcctctttggtacaaccttcttctaaaccatatctgagtcatatcaaggtacaaacgcaacccaccagtaagaatcacattagggtgtcatttcgaaaacttactttctgcccctttatcagatgcagaaaatagacaatcaaaaacatcaattttgatagagtttgatcgttacggagtttttagcgcagacaagcctggctgtaagtagatgttgaataagggttccatcgtcatgccatataac

SEQ ID NO: 55049 - DNA, 1071 bp, Arabidopsis thaliana landsberg
tatcaaaagccactcacaaatcaaataccaaattgcacaaattagcaatagcagtattaaaaaattgaaaatttaaaagtgatggtcgacgatgaaattgatctgttttgtatgagggaaatcaattaaaagctatggaatctaaaaggttatggatcgatctgtaagaagaattgaaaccaaaagagataaggaatcaattctgagtatgaagaagagagcggagaaaacctgagtaaagaaaagcgcaggagagagaggaagatgaagtgtctacgttttgtttaattagaaagctttgttgtttgattttgagtatagtgacaatttttttggttggtgtgtctttttctcaaagacttgttaactaaactatttgagcttagttacggccgcagctagtttttgtttttctccatatatatacgtcgccctagctagattcacaaaagatttttttttttcaaaagtaaaaaagattaaaagttatcgattcaatatataatctatttaacttattttctcattactacataatagaaaaattaaattattcgatataaactaattttataagacaagaattttggtcttaccgaaaaaaaagacaagatataaacatatttatcaaaacatatatggttatagtatttgttaaaaagataatttatctttcctaaaaactaggttagtaatcgtctaattttgtttagacggtttactttacataaaaaataaaatgcaatatacaacccaatataaaataataataacaatttttacatatagtcaaatgcaaagcaaaggaaaattttaaataagaatttttatttattcaacataaatagatacatttttttttggttactaaatcaagtttgattattctctagaatattggtatttttgtaacctctttagaatttcaacacagaaaatggctaaaaaaaaaaaacattcggacttccccgggcacgaaattcgagagggatactaattttttttatagtttacccgtcaaaatcgacattttgctttcgtcctttaaaaaaattatctcttgggaatctt

SEQ ID NO: 55050 - DNA, 980 bp, Arabidopsis thaliana landsberg
tctcatccttaatgcttaaaaaacatagttcgtggtgtggtttccaaaaatgttgtcaaatcaaaactaagtacatccttgttaatacatgttgctcaagactccctgcatcaaagacctaatggatttaacatcaatgtacatggtccaatatgtaccttggatatctccctctcagatttgtacagtggatctctgggggcatcaataggtggttcagtgacattgtaacatccatagtcactcattgcacatcgaatatactgtacttgtaacatcattaaacaagcccttgttagcaccactcactcattgtaacaacttgcttataaataaaccttacaatgtaaaacatacgcaatcatgaaagcagcaaagagtacaaaactggccacagaatgaaaggaaagtgactaaacaaacacccagctgctacattctgactctctaatcatactaaatgctgaccatttacggcactttttgagattatatgttcaaaattccagtctatcagtgtgagtagaagttccaaacaataccaaacgtgtacagctctgtgtagataagatttcttaagttatacaattactaggtagagtgaaggtatatgggttatacaattactaggtagagctctgtgcagataagatttcttaagtgatacaattactaggtagagtggaggtatatgggttcaattagcaattaagcacaatatgaaaagcaattatcttgctgaacaaaaggaagtctcacaacaacgcataggcattacaaaaacagcaaccgataaggataaatgactgaccttttgaggcataagagcaagaactctcggaattgagtaaatatgtgtatccggaggaggaacatacatactgaaccacccacacaaaacaatttacaattgaagaatgagcacagactctagagaaatcgaagaaatgaacacttagagttactgggaattcacacac

SEQ ID NO: 55051 - DNA, 1039 bp, Arabidopsis thaliana landsberg
gactgggcatctttacccatacccgatccccgaacccgaacccgacccgaattaaggggttcagtacgggtatggattctattaataacccgatcggtttatagatttcatgtctttggttacccgtacccaatcagttattacccgataatcgaaccccatccgaactaacccgaacatatataagcatttcttagacttagaaccctaattcactttcctttcttcgatttctccactactcagcggcgatctccgaaatttgcgagccatgattcacaaatcctatatatatatacccccactaagcaaactagaaaccctaattagcaattttgcagcgtctcctccatcaaagaactcgaagtatcattcacaggtactaaagtcttcctcttcttcgtaattttttcattatctttgtatgatcattagttggatgatattctgtattttgtaatgtttggtgctagttgtcgattttctgtataatgtttattgaccttgaagtaaggctaatggtattttgacatagtatatggcttcatgtggagtttgatgctacttggtagatgtcgtgtttcttgaaactagttggtggcttcttctttactctttcgtaactagttaatgttgctatgtttgtctgatatttaaaaatttatgtttctatgtttgttattttgttagatttcgtctttctatgttaatgacttttttttagtctctgtaattgtttatatgcttgcctttgttacacatagtttgtctcatgattgtctttgtctaatcacttgattgatgttctgtttttttatatgtatgttgctagatgtcgttattgtctttgtctaataatagatggcttgttagatgacttattatcatttgactgtatttcacatagtggagtttgttgtggcaataattcaacgtagataatttgaaagaataagtagatattttgtaactagattcaagtttatgcattcatgtgaagtttgtttctagatgtcgtgcttttctactcggggtttca

SEQ ID NO: 55052 - DNA, 798 bp, Arabidopsis thaliana landsberg
aaaagctaatatatagaaagattatacgccaaaaacgaaattatgtgttttctgccaaatttattaacaaatgtagacttaagaaatgacagtatataatgttataatttaagtttaacatatgttgtgattatgttaatgactaattttgagaaaccaagatttatagatgtctctagcaacctcaaactgaaccatttaatatgtatcactttcaatatttcgaattgtttttcttccatcgaacattatatttgtctactgaaatattcattgaatatattttggtcattgaccgactaatttcgtaagaaatcaattctacaatattttcttttgactatatatctataaggaaataaattgaaagttcatgttcctttttattttttaccagaaaaattacctttttacatatgtttgtgttatatatataatcagtcatctaagctagaaaaattcattaaaccaatcttaagaacaaatatcataaaaatggccataaccatgagaactttagtggcatttgttttcactatctttttcatcatatcttttgttcacagtcgtacaacaacttcaggtgctgctttatttttatacctcactttttaattatgggtttaatttgattttgttgatataattaattaatgtgcatattggtttaatgatttattgtttaattataaacaggttatggaatgttatttgactccgaggcttgcgagggaggatttgaatattgaccttgtggtggtgggaaccaccagctcactaccttttgtagaaggcttg

SEQ ID NO: 55053 - DNA, 408 bp, Arabidopsis thaliana landsberg
caactagttaacctaatttttttcctctaaacaaaccatctatcatctgatcaatttgaagaacagaaacaaaataactgtttaattgagaaacgtataatcaaaaccacaggaatcaacgtatgaaaaagattgaacaatatacggtttgcgttactaaattctgaagattcatactgttctcgagctaatactgtctttgataacaacagaaaacttaaagtttgtgtacagagcgagcgtttgcacatatattataattcatgcatatgtatggactattgaaaacacgatacgtgatacgtgtacattattatgttttggtgaaacacatctttatttatttgttctccacatgtatttataataactgaaaatcagctctgcccgatgaaaaaaatctaaaat

SEQ ID NO: 55054 - DNA, 1195 bp, Arabidopsis thaliana landsberg
acatggttggtaaccccagttatgatttatttttatgaattatttctcctaatcaagtgcatatcttatgtaattttgatgttttcatgttatataattttaggggaaacatggaacaggctgttttaatgtaaaatgtccaggatttgttcaagtagccaaaaatggtccaataagtgtacctctcaagtttgattatcttctctggcttactatacatcaggtacagaatttcttataccaaatcataagtttttttcttatacatatgaagatagagcatagactaagagcataatttggaatcaacaattgaaaacaatgaattatgcttgacaatactattagacgaatactttgtaattatttttgcaactgctaattcatgtaaaaggacaaggaaacaaaaaactggtggcttacacaaacaaatccagatgatgatactaaaaatcatttgggatattggccaaaggagttgtttaatcttctaggagatggtgctgatttcgttggatttggaggaatggtttcaggtgatccaagaactccaagcccaccgatgggtaatggtcgtcttccaaacaaagatgaccgtctatggtctggttatcttgaccatcttaccataatccaaccggactatgaacatgccggatttaattaccctatgatttagcctttggcggacagcaacgtatgctatgatgttaatttagtaggatatgttgatcatcaggttggtattgctatgtcttatggtggtcctggaggtattaaatgcggtgattaaactattaaagttatcttcgtttgctaattgttggttttatggtatctaataataagttaattgaatattaagccagaagatgttttaacattagatgatattatgaagcagctcaaatacagctgaaagaaattgtttactacacaattaagtctaataagcattgagccactgcaaggtttctgacctctggctcgatgtgttactaatgaaattactaaagtactgaaattagaattctaactactttttctttcaactgcgcctttccggttgtcaccccgaaatagcacagggctgctccatctttagacaaaatgtgttagactggtcatatgcacataaccacaaaagctctgtctatgcaatgagcctcagacacaccggtgtggagagtcaagc

SEQ ID NO: 55055 - DNA, 1083 bp, Arabidopsis thaliana landsberg
agataatacatgataaatcattttttacctttttcatgtatcactcacaagtatgggcatatcattcttttgtatcaaccctatttgatgcgggtttataatttatacttggaagcattcaaattgtctggaaaacaccaaacaaaaatgtaaaggccgatctatattcttacatcaacagttgaattgatgtggtttataatttacctttggaaccattcattttgtttttcagaaaatttcgagaaccaaaatatcgaagaaggtttttgatataaaatccattaaaactttaatttttccgatgattcttctgatgtttgtattattatttttaattttcaaataattcacgaagactatttaaaaatatgaaaacctagtttgttgaatctacccatataaaaaaaaaaaaaagatcaggagggttccttgctaactcctcacctaaatgcacgtgacctgactcatcatgtacacatggcatcgcatgaatggattgtcgcctatctaacgacacagactcgttagcatatcgtcacagaatcattttgaggatccaatctcaagctttcagacccgacagcattgttcacacgatgaaagcattactcaaagacaaagagaagacaaagaactctcatttgatcttaatcataattgcgtaattctaatgatttctaatactagtacattattattttcttccacactttcatttcatgtattcttatctttatcaaaaacaaacaaaaagttggaaaataacaattttgttggtttttttcttataatacttaaaaaaaaaaaaaaaactgaatgattctttttagaatttttgtttatggctctgagatcagcaacaaagcttacgcttttcagtcctttacacggtagcactagtcactaattatgattcgtaattatccatattcatttttttcaaacttgagatttatttttcagtggaaaaataaaaagttgttatctttaagaataacaataaaaaaagatttttttagaagataaaattttggtgttgcgtggatcaatttgattgatctgcaaaagggacaatctttg

SEQ ID NO: 55056 - DNA, 762 bp, Arabidopsis thaliana landsberg
tgtcagcaaatttgacatacgtggggccaatgttgtatgaacttgtcttagagacttaaacgttttatattggaatagtctacatactttgttatctctattatttaacatatacacggtaccgtagatcacgtaatgctaacatgagtgattagttacaaattttcaaagtctaggtgttacttgtcaatatatcaaataaattaaaaggagtttaggagtcaaagattaataagtcagcgtatcgagaagaccaatgaaaaagtaagaaaccataatttagggatgatatatgtatgctaaagtatctaacttttttcatattcaaaagtcgaatgcagaaagttacaacttttgtctgcatttctcagagatattgagaagagttttatgagttgatatgttctgtctacatttagcataaaaaaggggaatccatatttacagagagttgtttgtacccactttgtcttgagaataaagtaaataatcagtttggagaaacaaacaaaaaatttaaaacaaatatactagcccataaattgtcagatatatcacatgctagtttggagaaaattgtagattccatttgcaagaaataagaagaaaagaaagacaaatatttcatttctttttattttaaactgaaaaatgaaatcaaataattggcgattgttagatttgtggttcggtaaaggaaaacagtacaattgcgagatttgtccttgtcaccgcaacaaatatatttcgcaataataaatg

SEQ ID NO: 55057 - DNA, 837 bp, Arabidopsis thaliana landsberg
gaaacctaactacccttccatgaacggccatgattattgggctttctaagcctattttatcttccctattctaacttcccattagtttgatattgtctttgcacaaatttgtttggataccttcccaaaaggctccagtaggagttagaccttactttttttctaatattctaatgtgggtcgttggtttgtatcccaacaacgacaccaaaccattcaacctgacttttggtagaatagtcacaaacgtcggtatgacaatcgacttacaaagccaaagtactctgatcaaaactcaccatctggttgtttcagatttcttgtcacttaagtctatgtactagaagaggtctttcacggttacggtttcaggccaaggtcccgaagctgacaaacttgcatcgtcacattttatatggtctgatggagtccattctgtgaaatcctatcgttatatatgctaggaactaatgtgtcaaaatcagttcatatctctctataatttatgattcattttgattataatgttctcgtttgctctccatctcctttagattttaaagaaatagcatcatatctcactaaactaaaaaacgcgacgttttaacaaacgaagcaccataaaacggtgtcgttttgtacgtttaacactaccgttgtgtgttttatgttattgtgtgatacagaggaaaggcgacgattcaaagttcacgcctttgagagatgacagccattcgcgtctgctcgcgaaagttcccaactttcgcttcgattttcttccaaaacattacaaggaatccgtcaattcatagaatttcattctcgaatttaaaaccc

SEQ ID NO: 55058 - DNA, 200 bp, Arabidopsis thaliana landsberg
  unsure (1)..(200): unsure at all n locations
ccggtaatcggaaaccnnnnnnnnnnnnnnnnnnnnnnnnnnnnnnnntactaacttnnnnnnnnnnnnnnnnnnnnnnnnnnnnnnnnnnnnnnnnagaaacaagagccggtttagggctgagacatatcacggaacgtgttagacaatcttaccatttaaatcaattaaccagatatcattagggacatattatagtg

SEQ ID NO: 55059 - DNA, 803 bp, Arabidopsis thaliana landsberg
atcgatattttggtagccacccctttaaattggtcatgcaaagtcaaaaagagatgaatactgttggtcttttgcgtaacctatttgtaatattctgtggtactgattaagagttgatgtgctttgatctatttaattgatttcgtcatgttgcacatatatgctattgttgtagtttagagtgttctgcaagtccactgcagatttattatgacaacttggaattgaaacttgaatcaagaattatccaagatttaaggaattgacgtagtaccaatagttcaatacaaagttagaaatgttatgttcagggaaacaaatcctagtaattgtctctctttggtatacaactagccttttttcctagcaattagccatttcaaaaatacaaagtcaaagaagtctttatcaatcaagtggaggataataaaactaagaagtcaaaacatgtaatttacatatttaattgatccttcaaaacttatccatatagaaaatatcttctcctcgtttacaaacctttgccttgtcaataatattatacatctgttagagacctatacagatggataatccaaagcattgtttaatttcccggctttagttgactagttcagaagaataccttttatatttttttcccccagtaatcaagttaatgatgttattctctgaagtttaacagatattttattgaaatttaaaaatccagaaatcaagcccaaatttaatttttgaaagtagcccatttatgagaaaacctataagagccaataattgactcaaccggtaattgagaaacc

SEQ ID NO: 55060 - DNA, 444 bp, Arabidopsis thaliana landsberg
tttgaggagtccagaagttcataccccatggcaccgcaatggccgggtaggtattcccttttgacatgtcgtatttagagtcagtacccatcagcgggtttatataatcaaccagcgaagttttattggtttgggcgattgttaaaacaggcgtttgaagcgccagggcgaggaatatttttttcatcaaaagttaataatagaatacgctgtaaatataaaagaccggctgtgataaccggtcttttatattaattattttaccaacctgcgttttgcttcagcttgttgttggtgtcgatctcgcgctggggtattggccagagataatattgagccttcatggtcaccccctgttcgttcggggtgctggttgcatcaccgaacgtattgtgaaccacatcatagaccatgtgagtgcgctgtatatcaaaataggcttta

SEQ ID NO: 55061 - DNA, 658 bp, Arabidopsis thaliana landsberg
atacccccgtggggagaaaaaaaaaaaacacgggcccccgttactattggtgggtaatggaatatgagtaacttaaaacgtaacaaaggaaataaggaacaggaccagccttaaattgtaaaacatattttcacagcttttgcatattgtaaaacactagtctcctttttactgaacaactaatgctttgaaaaactagtttttgtgggtgaaagtaatatacaatactgatgggtttctaaatcttgacccaaactaacccatattaagttattaactattaagtcttgtttccgttacaacgatcgaatagtatttaaaattaggaggaaagaagtctaaatgtatttttcgtttgagttcttatttcttaaggtagaaaattttagtactcatctttataattttgaagtcctctcttcttcaatacgcagggttgtgtctattccctaaaatcacaattctttcatatatacacaatacacatatccaacttgtattagcatgactgcatgagctcttctatatcctagacgtacattgtgggatttagatatgcactccaccaagtctatggcataaattggatatgtgatacaacatagacgtgaaagtttgaaaacatttcgccatgatatcgcacttgagatgtcttact

SEQ ID NO: 55062 - DNA, 599 bp, Arabidopsis thaliana landsberg
tcccctgtaattccaaataccaatataagtctgattggatttttttatatatttatttgatcttatgtgtaaatattatcttctcttgtttcaattctagcattttcctttaggatttaaattaacatatttatttttacattattgtcacaaaatgcgcacaaaaggaaaaaaaccagcatgatgtatgatttagtggtgtcctttgttagtcatttatttgtttaagtgatgtgttcacatggaatgataaatagagatggcacacatgtatatataaagaaatatagtttctccttttagtttttttttcttacaaagtgggtaccgtacttaagaatagaaccaaacgcgcctaggacctaattggttccttgtatcccacccaaaccaatctctttggttgcttgtattaggtgttgtgcctgactcggtagtcatgcagaagcctccctcgccctggttcatgacatgcgagaaaaaaatctcgtttccggtcggctcggtgtgggaggtgagcgtgcgggacggggatttcacctctttcgcacaactctgccagcggcggcccattatttaaaggtggatataaaatccta

SEQ ID NO: 55063 - DNA, 591 bp, Arabidopsis thaliana landsberg
gccacgggagtaacacaaatgtttctaccaaattgtttttataaattatgaaattagaagggagcatagctgaagatctaacaaatgttgttcgtccgaatcatatctagtaagcaaaaaagtaatacatctatgaatagttgattatgtgactaaaactaaaacaaaaagatcaaagtgactaaaataaataaatgaaacacaaatgttttactgaattatttacacaaattatgaaattataagggagcatatatgcaaatctaatgaatttttgtcgtcgtattcgtatctaatatcttatgaataatttaagtgactaaaactaaacccaaaagatcaaagtgactcaaagaaataaattaaaaaatcatccaagggaacaatgattaaacccctttatcatttagacagtatggaatccactcctcgcaccaccaccgaacgaactcttccattttgtcttttgcttaacctaaaagaaaaaaaattatagttgccaaatcaataatatctaactatgaatatatctaacaaaattaatttctttctttgcagctagctagccctctcaagacattttggatcaca

SEQ ID NO: 55064 - DNA, 359 bp, Arabidopsis thaliana landsberg
tctttctatgcccatctctcactatatatatactgctgcgtcatgttaattagctcactttttcctttcttcatactacactatatagagtgagatctcacaaaaagaagatagaatcactggcattaatggtgaataatagtccatacgagtacacaaagatggagaacgaagaccctcaagagctaacacacagactagctcattttgtaatacaaacggtgatagatcgagccggtggcgggaccagacagtctcaacagaggcggagatcatctggacctgagattatgatcacaggggttgcgataagaatgatgatagggcacaagctcaggaagctgcggaagaccaacact

SEQ ID NO: 55065 - DNA, 732 bp, Arabidopsis thaliana landsberg
actatgaaatgagtgggtccaggacccctaacatgttcattgtagcttatactggcttagttcttatctctattacttaatccaaatgctcaatgttgaaaactaaacttttttgtgttgttgttattgctgactggccagaggagacccaaaaccgaaacgaaaggtatgttgaaagttatatgtgtattcgctcgcattcttcattttaacgagttgtgtttgatctaatttctgtaaatgagttattagaaaaccatgtgtgtggaaggtgatagtattaaatatcgttcttgaaaagcttttgaaatcttgcagcttcttctcctgaagttgcattccaaccaagcttgtcaccacttgcaataaggtcctttggtgttcctaaagaagatgacaagcccaattctgatgttaatccgtcttctcctgctagtattcttcctgctgtttcgtctgttactgctgcccaagaagatggagaagaggttcataattttgttacaagaactggggatgactacgttgaaccttgggtaactagaatcttcagatagaaaaagattttccctcccattttctcttatgttggtttatgtgacataaggtttggctcattttatgtgccaggattatagaaactcctactatcctactgttcttcctttgagaaagcctaactctggtgatataggtatgcttgttcccggctttgcaatagtctttacgccg

SEQ ID NO: 55066 - DNA, 741 bp, Arabidopsis thaliana landsberg
tttgaaactttaaacgaaacattttttatgaaaaaaaaattactttattccgtaattataagtgattgaatacagatgaaagcaatatcgaacactctccatatcggctaaagcaatacatcaacaaaacaataatatagagaaagataaacaaacttatcaaaatttgaaaaaagaattagaagagatatcactccttggtggaatcaaaaaatcactccagtttttgcattctatacataaaatcttttcattgtgtctttactcttgtgttgttgtatgatcatgacctaatgaccataaatgagtggtttcatttatgggtgatggttaggatatttaatgtttgattcataattattaggactaaaatctacatagagctcgatgctagttgagagttgatcactcttaatctagatcataagctaattctcaatgcctaacaagtgcttgatgaaattcttaaaccactcttttgtgagcaagtataccctagctacctaacccatgattaggatgcttgtgttttaatggacttgtacctaaaatttcttagcaattgtataggtaggcccgacccggagctaaagctcgtgaagtaagggttttaggcatcaaattaatataagctaaattaggggtatatacttacaaaaaattgcggaatagattgattaagtccttgttttcttcacaaagaaattaagagtgttgagtcttcaagcatccatttctttg

SEQ ID NO: 55067 - DNA, 1101 bp, Arabidopsis thaliana landsberg
tcatgtacctttaactgagtgacctcatgttccatttttctgtttttatcaagaagaagcgactccgtgttgctgatctcttcaccagtggtagcagcatcccagtcttcagcctcaattgaattgtaacctacagcctaatatgcaacaatgatattactacatacgatcgtaccgttaccagaaagaacaaggtatggatctgtggcaagaagttaataagaagttaaactaagtgagcaccaaaaaacacttgaaatgatgaatacctgcagaattttcacttttttgcgcaaatcatcaactaattttgctgatggtctttcttgaagctctttcttcatctcttcaatgatagtatcctggtttaataccaaatgacggtaagctaatattagacattgaagggaccggaaactaattttcagaacaaaatataatttctcagcataaaagacaaaacatagcacaaatttcacctttttattgagcaaagaattcaatttctttatctcggcaacatgactttctcgctcattagctaaagctgtctcaacattgtgaatctccatattaagctccgaaataatcttctcttttgcagttaacgagttctccagcatactattcgaatcaatattatcactgtagagaaagagcataacaaaaaaattaaaacaaagcaaaaacttagataaaagttatttgactccttgttatatggacgcataagtgtcacctcaccttttcttgttatcagtatcttcattagctgtttgcagctgagaacgcagatgtccctgttacaaaccaataaacaaaattagagagctaaaaacggtggtttatcttagggcattcccttaattcaaacaaagagagcatgatatgaaagaccttttccctctcaagagtaaggagtcgggtctgagcacgctccacttcatccatcaatagactaacttcagattgcttccccgcggtctcttcgtctaatggtttagacaaaggtgacatatattaacaagacaagaaggaacaatatgtaagggagaccattccaattatgaaagcacaatatgagtaaccatattaaggctc

SEQ ID NO: 55068 - DNA, 1523 bp, Arabidopsis thaliana landsberg
gaataaaatgcataatataccttggaagttaatcttggttattgtgaaacttaaaacatttcaacgaagtcatatactattatttaatcattgatttaaaattgctaatcaaatcacgtgttgttgttatatatggataaagagttaaactataacacagctgagaaaaaaataaagttatcaattttgttaagaatcaatgaaggtttcacaagtctgggaagaaaaaaaaatagatatatggagtacataaaacattaaaattttgctaaattttacttttgaactctattgattcgggttgacatgatgataatgttacattcgtacaatttcacaatgaaaaaaacgagtactaaatattgtcaatcaaacatatgaatgtacaaaaatccataaactctaccaaaatagaatgaagattctgaaatcaaacctactttttctttttaattataaattcaactatattataaatttatttatcacaaataatagaggagtgagaatattttagacaacgcaaatttcttttatttagttcttatactttattttttaccaaacgttaattaaaaaaatcacacatacataatttctaaaaaaaatgtattcttcaagtaatatatctttctgagtactagtttatctatttatctccgtatttaataatcaaaagttacgtttaaaatagaaacaacttttatcaaacaaaatatattagaaaacgcatggtactggctactggaaagaatcatgacctgtaaatttctacagttttcccgttttatatagtacttagaaactttggattttcatagcgcaaccaataaacacatggacttaagacacaaaaaaagttgggtgcaatgtcattaatcaaactaaaaaaataatgattaaaagcatggaattccgaaaacgcaacaaaatgattctgtgtttagacaaatgcagaaaggcctcttaactaatcttaaataaagtcttagttccaaccacataaacactccttagctccattaattttggttttcttaattacgtttctacacaagtacacgtacttacacatacaattccacagtctaaatgataaaactatgtggtttttgacgtcatcgttacctttctgtcgtctcacctttatatagtgtctctaacagaacgtaacaaccaaatgttttaaaaaataaaaacagcaccccttaattaggctcattcgttttgcactaaccatactacaaatcatctcgaacgatcgagcaaagatttgaaaaataaataaacgtataactctagagattttcattagctaagaaaagtgaaatcgattgttaatcctatttcagacgggacaggaacactcattacccaactctatcatctctcgaacaccaaactatatctaccgtttggggcattatttcccactttcttttgaagacaatttcccatatattacatatacacattattactaatatatttttataaatttttgtcacatcccaaaaaaaaaa

SEQ ID NO: 55069 - DNA, 632 bp, Arabidopsis thaliana landsberg
  unsure (1)..(632): unsure at all n locations
atcaaactcaaaacagtaatacacaataaaacacaaagtatacagtaatacgatctcaaatcaaagactcttgctaagtaactcaagcgggcttcatcaatattcctccctgaataggcttcatcaaattaaactgctcgacttacttcgagtctctactaactcaagaaccaactgacaaaaaaactgaaagcagaaaacatgattaaaagaaaataaaaaaaaagagagagcgatttgatctatttgcctagataattctttttctccacccttatatagattgtacaatcaaaactgaatctgatgcatcttattatctatcgttacatgtgagaatgttaccgagattgtacaattcataatagtatcaatttggaaagttgtggatgttttaaatgagaaactatatgaaattgaaaaccgttggcgcgtggaagcaacgcatttcctctttttttctctcgacgatgagagattgctctcatgtccctttcaggacatcaaacctctgatatttttttgtagtctctatatccgtttgtgtgttaatgaaaagtagaaagatgattttaccttgtaatttataaatagaaaacattaaacagaaaaaaagaaaacaacaanaagaa

SEQ ID NO: 55070 - DNA, 1230 bp, Arabidopsis thaliana landsberg
gctttttaaacaagaagcgtcttcacagaaccaacagcttcggccaatcaataccgtgtttcttagagacctatgattaggaatctggccccagcaccatccagccattttccgcttccatgtcgaattgttcaatctgaaccccagcggtcctcctttccacatccttaccattttccttcccagccagttgatgggcgacaacatatgaatgaggaatggcggatgcctccaaatggatgtagtgcagatcctcaatatggagcctggataggtgtaagaaacccatttccaggctctcgtacagttaccgacggtatgcatatgcgagaaacatttcaaacctttgtatgtcagtttgctcacatacatgtctgcttgcgggcattatactacttcagttggttatgattcttcttcaattgatattggtcgttttatttgcaacgacaggtgtctttcagccacctccagaaagaccaccttcggggacagtgaggtatcagcttgctgctaataacttacaaggtggctctacgatttcaggtgagacgatctatttcaattgtaattgggggatcctatgcgtttcactgcaatgtttaacgttttaatttgccattcaaggtaatattgcttcgcagatgcttctgtctcgaccagatgtaccttccgcggctcagtacaggccatcctgaagttaaggtagactaccttttgtatattcttttacactttgattagcaagctgcgagtggtctctctctttttcgcttcttcgtctctgattttcttatttctggattgttatcaatcagttcgaaatcgagaacctgcattctcttctatgaaggactttttggcggtatattcacatccagaggcatcaaaagttcaaaactctgcagactattgtcaggatattgctatatattgtaattgttcctgacgaatgtatcaccggatcatgttcttcacagtatatgccctaggttctaatttggttagtacttctgttcctcagatcttgtaattaggcctataaccatacacagatttttctccttgaacgaatgtcaagcttttaagtcctaatatattgggtgcacatctttttctgataagaaccatctaattaaaaactttttttcctgtcatctgaaacacgactcttttaaaaatgcacatcccatatgtatagtgtctgcaccccgaagtagttcggctcta

SEQ ID NO: 55071 - DNA, 804 bp, Arabidopsis thaliana landsberg
cgacctcgaagctccactagacaagtaacagtataatagcatagatgatagcattagaaatgtgaccgtgttgagttttcacccacagccaatgtgaagtttatgagaaaaactgaagcacctaagagctattttgaaattctgtatagcattcctaactaatggtaatctctaatccgtattgtaacagaccaaaaactagcatataaaacaaatttacataacgaaattctattgtacccggcaaaggcagccactaaaagtgaagcaaacatcccaactgatccgtcacccaaacctttcttcttccgtgcaagagctgtggcttcagctcgattccgaaacacttggtagaagtagtagtacacaccctgtctcatccaaaattaacatccactttcaagcctatattctaaacttcataccaaaaaaatggctaaaattacagattctccaaatattcacaccaatgagagaacatacctgtgatgcagccgttccagcaagagacggcgccaatccaccatataacctctcccatccttcttgtttgacaaccttcaacacaaatcaaagctatttaataacaggtcatacaaatgtaagacaacaaaagaatccattacacgttctttctaaaactagaaccaaatcagagcaaatcaaggctcatatactatagcaacactcatgtattgaatctctgatcatgagattgagagtggaaaacaaaaaaaaaaacctgacacatgtgttcgatagttccaagtttcctcttctccctcttcagatcccgctccgtct

SEQ ID NO: 55072 - DNA, 140 bp, Arabidopsis thaliana landsberg
acgaaacgcactaacacaatattaattagttctgttcacggatcttgaaaccgatttaaatgagcagatctttttcttgttctctaagacgtaacgcctgctcaggaaccacacgagatttgttgagagacactaacata

SEQ ID NO: 55073 - DNA, 111 bp, Arabidopsis thaliana landsberg
atgaactcgatccgcattatcttcttcaagtacgccttaaggtgcatgaggcaagcatcttagactgtttgatagctgtttctgcccccacccatcacacacaaccaatct

SEQ ID NO: 55074 - DNA, 672 bp, Arabidopsis thaliana landsberg
  unsure (1)..(672): unsure at all n locations
nnnnnnnnnnnnnnnnnnnnnnnnnnnnnnnnnnnnnnnnnnnnnnnnnnnnnnnnnnnnnnnnnnnnnnnnnnnnnnnnnnnnnnnnnnnnnnnnnnnnnnnnnnnnnnnnnnnnnnnnnnnnnnnnnnnnnnnnnnnnnnnnnnnnnnnnnnnnnnnnnnnnnnnnnnnnnnnnnnnnnnnnnnnnnnnnnnnnnnnnnnnnnnnnnnnnnnnnnnnnnnnnnnnnnnnnnnnnnnnnnnnnnnnnnnnnnnnnnnnnnnnnnnnnnnnnnnnnnnnnnnnnnnnnnnnnnnnnnnnnnnnnnnnnnnnnnnnnnnnnnnnnnnnnnnnnnnnnnnnnnnnnnnnnnnnnnnnnnnnnnnnnnnnnnnnnnnnnnnnnnnnnnnnnnnnnnnnnnnnnnnnnnnnnnnnnnnnnnnnnnnnnnnnnnnnnnnnnnnnnnnnnnnnnnnnnnnnnnnnnnnnnnnnnnnnnnnnnnnnnnnnnnnnnnnnnnnnnnnnnnnnnnnnnnnnnnnnnnnnnnnnnnnnnnnnnnnnnnnnnnnnnnnnnnnnnnnnnnnnnnnnnnnnnnnnactgactgaaagcagattgcgaactaatgaggagtagtcacttgccgagagagaaactgaggcctacacaggactgacaagaggctcacacgagatgatgt

SEQ ID NO: 55075 - DNA, 1175 bp, Arabidopsis thaliana landsberg
ttaattccagtatctaattatgcgactagtattctctaattatgacacatctaatcaacgcagacttcgtccaaagtgcgaaggaatggcaagatgaattgatctattaaaaggtggacacacaagaatattatcaaacaagccaccctgaaaatagaggggtctatatcccatatgctttctattttgtcgaaacactgattcagaatatctactatcaaaaaatctattacataattgctttaataaaggttacttaattcttacatcaattctaaagatgatatacatcaattcatgctatcagtatcaccatgaattatccttgatactagaaaattgatggcacacttcatataaaaacttgtattttaatatagatttattctatacaaaatatatataaaattcctagaacaagtgggtagaaaatctctaacaagtaagtttcaataaatatacaagacaaaataatttatgtgataaatgatataaagagacaaattaaacgatttttatgggataacaaatggtttgtcagataagataaaaataaaatgtttatactgaaaatgatccggaagatatgcaaagccaaatctaaaatacaaaagaagtgaagtgttacacatatgaaaagaatcctagaatgttacattattgcaattttaaccttataaaaagaatatcaagtaattttcgaaatcagtatcctgaaaatggaaaatgtaagcgatagaactagtctcctttttaggaagagtctcttctcaaatttggttatatgattcaaacgatgggctcaactagtaaactttgtcattcagagttgtttcgaaatactagaaatctctcattattgttctcttttttcgtaaatttttcaaactatttcgaataaaataaccccaaaagggaagagaaaagaaaccaattgaagtgtataaatagagacccaaaaggaaaatgccaaatgaatcaatctcttaaagaaaggagatggtaggggtccatctatgatgtgctcacatacatgctccacgaactcttgtttcttttactttaacttcttcttttttaacaatttgaatgaaacatatttatacatcttatctatgactatgactcacacatattttctcagaattttatttatttaaatgaaagccaatctc

SEQ ID NO: 55076 - DNA, 124 bp, Arabidopsis thaliana landsberg
cggcatgttatcctggtgctcgtttttccaattatgaagcatggctgagtgtccctactcacatcggacctagcgcgcaggtggtttggccaatagtgggccacgaaatcctgaatggagatgc

SEQ ID NO: 55077 - DNA, 449 bp, Arabidopsis thaliana landsberg
ggagctccatgtctggccatcagctagtattgaatggaggggttttacatctctaggagaggccaccacatttttcagttcaatgttaagaccctgtacctatgctactcgccctgagatgccctcaagtgttgggcctgatagaaggatgcagcatctgcccagtgaggtagactgccagagttcaatccccaagggagtgggcagccctagcagcctggcatccagcactaactgagcagaattccacagcttcaccctgagggagctgtccctgctgactgagctgtgttaatcctgctgacccgtggccatgatgctgtccaaatctatttttaggtgacctcgcagggaagaggctgtgaggttggacctaccctttctagaaataagatatgtggtatggtcagctcgagggggactgtacccttcaggtattcagggaggtg

SEQ ID NO: 55078 - DNA, 279 bp, Arabidopsis thaliana landsberg
  unsure (1)..(279): unsure at all n locations
gaaatctactccagctcctaggataaggttgtggcttatggtcttatacccaaacagactcaagatataaagccanacgcgaccccaaaacaccaagcaagcttctacgggccccacacagccccgccggcccagccgaagaccaaangagcccacagccgcagacccgccaacaaggaaacaccacccaggcangcaggacaaggccccggccnaaggccccaaacccaagcacacacangacannaagncananncgacgccaaaacactaaccaag

SEQ ID NO: 55079 - DNA, 308 bp, Arabidopsis thaliana landsberg
gtgagggtgtttgcaagcaactgcactgaatgcttcattccatgtatccaacaaaatcaagagtttgttccttacttcaaaatcaccctttcacacacattttcaacactcacacatatcaagattattattattatatccacaaactaaaaaagagggtgccttggagaagttaacaagagagctcaggataaaagaaaaagaacctttttcctgacaagcttaaccatatcttcaagaagatgtttctcagcgatatgagaatgcacaaagtcaccgcagttcttcagcattgcctccaacaacta

SEQ ID NO: 55080 - DNA, 830 bp, Arabidopsis thaliana landsberg
tatgtattatctcgagatgagacataaaaactcaagatctgaagcagcttacttgataagcgagcttagtccggaccaggtcaagaggataggtgaagagaaccgcagtaccaccagcaaatgatccagctacgagatcaagcaatgggcctcgagtagtgtctgggaaaccaaagataatccatctcctgtattcctcataagccatgtaatgaagagctgcatagggaactatccgagcaacacttgcaccattccctctgttcacaaaccaaaacgaaagttacagaatcatctgactgaactagatcccaaaacgcatctaacactaaagacaaacgtacctgtagaaacccatcaaaccttcagttttgccaatcttgttgattgatccaacaagtcctatccttttaaactcatcccttctggtctgacaaaagatcaatacatgatcatgagcttctataatccagcaattgtgtaaccaattcagaatacaaacactaaaagctttctaatttcgatgcttgaatttgagtacatgactcagagtcagaggacaaatcaatcttagttctggtaatctagaatcaatacccataatgattgttggtacctggaaaagaatcttaattcgctcgagtggagcaacggcggttttagctataccacccgtgacgccgccggcaataagctccttagcgaataaaggaatcgaatcaataattccgttcttctcttcaccctccgccatggaaatagaagtggagagagaaaagatagatacggtttaatggatcttcttcttctccttttaccaatctttgtca

SEQ ID NO: 55081 - DNA, 804 bp, Arabidopsis thaliana landsberg
atctcttagcagtaaagagtaagtactgacttagaggaaatgatcacatgtgcattttgcacagattccgtaacaaaacgtacctatattttacgactcaagaacattaaacagaaccaaaacaacatcttatattaaaaaaaaaaaacgttaaaccaactacacttgaatttctttttattcttcatcataaatgaattggattgttgggccagttaaatacattatcgtgttcggctaccgatcacagttttatgtaacactcacgaggagatatgatttgtttaagaagatggtttagatgatgtcttatctaattaacatcaactataaacctctaaccataccacagaaataacaagagcacaaaagtctaacatataagatattttgataaagtaattaaaatgttcaacaaccaactaggcacggacatttgatggtaccaaagtcaaatatgcggttcgtatatatccacttactttatattttgctatttagctccacattcgcattatacatttaaccaacgataacgttatctatttgtgttaatcttttggaaaaatgttaacgaacatgttcttgtccccatcatcatatgatgatgattgcaaacctaatattgcatttttattttattttgccttttgttatgttttttggaagcacttttgggtccatattttggacacgttgtcgccatgtgttctccaaaagaacaatacataataaatttggataatggtataactagtctttagaaactagatatagatgaggtgattagttgtgatatgctaa

SEQ ID NO: 55082 - DNA, 664 bp, Arabidopsis thaliana landsberg
agttctactactaaccctccaaataagctgaagttttcgctcccatccactttaccaaccaatatttcaccagaaccacatgctttccatgttttaggagaagcatcatccgtggaattaccatgtgcatctggaaatttaactgatctgagactcacatctccctttttcgtacatgtaagcaatgtgcaagatctaagaataccaaattttgtttagaaacgtcaatggcaacacaacataaaaacataattcaatgggaatttcaaagaattagtgtaaagttatatacctttctgtctgatcatctatctttttcctgaataagtgcagggcagaaatttcgttatcctcaggggaacaaccatcatcaccaaatacagagtatgagaagtgaagatcaccattacaagggttaataacctcaacctatggaaaggatagaaatgaacaaaatgattgtataaatgttggccaggctatggagataaatatattactcaaatacacatagcttaaagtaaggaaaacttacattgccatcttttcttgcaacagccaaaagctgcaattggaagaaaagaaaaagagagaaaaagttatgagttaccattttgacgcaaatacggaaacaagaagaaatcaaagataagaactcggaatt

SEQ ID NO: 55083 - DNA, 500 bp, Arabidopsis thaliana landsberg
aaaaaatcttgaaagaccacaaatggatttgaatttgttctggatttgtactatgataatccattttgctttgcttgattagtttttactttttaccattggtaataatttgggatcatgtttagttgtttactagataaccaattttgttgggcctgatccaacaattttgccgattataaagtaaataagtgaatagttaaagcccaatataaatttacgagtgacggatcatctgtgttctcgaaccatctttttaacgaactctctagaaccctttttctttttcacccaaaacccaacctcgtataaatctcaccaatccatttcttctcttcttctttgcgttttttgtttggaactgaatcgaaaaagatggatgctaatttcgagatgcctccagtcggtggaatgaacgacgacgacgacatggatttcggtgacggcgcctcgtttcttaaagtcggtgaagagaaagagaccaacaaggtttgaagaag

SEQ ID NO: 55084 - DNA, 201 bp, Arabidopsis thaliana landsberg
  unsure (1)..(201): unsure at all n locations
cgcgtgagacacgacgaccgactcatatcacgtgttcaccacacattgaccaccnagagtctaaattatttaacaaacccacgaaaanaaaggaacagacaaactcgacagaaccaaacccacccacacaaacagggccaggcccaaaccaggacagcaaccggcacnnagaaaagcnggggggaacacgaacggaacaaa

SEQ ID NO: 55085 - DNA, 177 bp, Arabidopsis thaliana landsberg
ctccacttttgaattatcaaaacaagaactttatgtaagagttgaagctccaaaggggagttgggaatttagtccatagtagatcaaagcggatttccttggagatggaaaattcgaccaccgggttatattaatttgcaaattctacctgaactagttaaaagaatgaccttggct

SEQ ID NO: 55086 - DNA, 320 bp, Arabidopsis thaliana landsberg
ggggggcggggggggggggggggggggggggggtgcggggggggggggggggggaaggggggtggggggggggggaggggggggggggggggggggggggtggggggggcgggggggggggggggggtgggggggggcggggggggggggggggggggggggggtgtgtggtggtggggggcgggggggggggagggggggggggggggggtgggggggggggggggggggcgggtgggggaggggaggggggggggggggggcggacgggggaggggagggggggcggggggtgagtgggggggggggggggggggggg

SEQ ID NO: 55087 - DNA, 553 bp, Arabidopsis thaliana landsberg
  unsure (1)..(553): unsure at all n locations
ttgtcttttgtctgtaacgtcttagggctgggtaccgtcagagataagactttgacagttggaaataatctatttctgacggcttagacttatgtccgacagctaactagctacaaaagctagttaaagctttttagcactaacatatcttttagactactttttaccatgtcgtcgtcattgtcgcccaccatgactaacgagtcgcttcgttttagctcatagtataaaaaacgatatgtttggacacccccctacgacgaccgtggcgactcgttactatcactagctaatagctagtggatcttgtgcataccctagtactattaggttatattcagcggatgatcgtgcgtaaggttgtgcaaaacactatttttttactatatagatagtattgtttgcagagcgaactttggaataggagacgagatagaaaataagatggaagagccgctggagatacctcactatagcgtnnnnnnnnnnnnnnnnnnnnnnnnnnnnnnnnnnnnnnnnnnnnnnnnnnnnnnnnnnnnncaattacatatgt

SEQ ID NO: 55088 - DNA, 1050 bp, Arabidopsis thaliana landsberg
ggcacgctgacagatggggagatgctattaactaatccggatgcatcttatctaatgtttcttgactgaaggaggagaaagtttaactgatcagacagcagagcacatttttggtgtctgtttggttgatgttgcgacaaagaagataatactgggccaggtgagttctagttgttgaatggtacctggttgcacttatacgtaacatttctcggtgaatattgatggcattttttttcattcataccagtttaaggatgatcaagattgcagtgcattatcttgcctgctatctgagatgaggccggtggaaattattaaaccagctaaggtgttgagttatgcaacagagagaacaatagttagacaaaccagaaatcccttagtaaataatctcgttccactctctgaattttgggattctgagaagaccatacatgaagttggaattttctacaagcgaatcagttgtcaaccgtcttctgcttattctagtgagggaaagattctaggtgatggttcaagctttcttccaaaaatgttgtctgaattagcaactgaagataagaatggtagcctggcactctctgctcttggtggtgccatttactacctgcgacaagcattcttggatgagagtctgcttagatttgccaagtttgaatcccctgccttactgtgatttcagcaacgttaatgagaaacagcacatggttcttgatgctgctgctcttgaaaaccttgagatatttgaaaacagtagaaatggaggctattcagggtaaagtttctctatcttaccatgtattattaaacataattgatgtgttctaaatctagagtgttgtcttttgaagaacgctgtatgctcaactgaatcaatgtatcactgcatctgggaaacggttactgaaaacatggctggcaagacctttatataatacggaactgatcaaggaacgacaagatgctgtagcaataatgcgagtgagtctttcaacaagttgtttgactttgctgctgtcatgtctctgtctctcaactagacaa

SEQ ID NO: 55089 - DNA, 412 bp, Arabidopsis thaliana landsberg
  unsure (1)..(412): unsure at all n locations
ttatgttattatccacgtacaaattttctttgtttttttcaggataaatatggcagctttcangtttcttcaaanatngcagngcatgggcattgactaattactaagccattaatcttattgacttttaagtctttttccaatttagatagtatcaatctatagacttctgtcaacaatttttgggattctgcattctctaattgcaggtggaatagcatctggaacagctcttgggctagttctttggctatctgtttcggattttgtttatggtttctttctctcaactctgtctagtagttaaccttgtcttagttgtatgtatcttcttggtttgttgcctgagctcatcttggctcctgagtttttcttcaggctcttttctaatgccttctgatgtcaatataaa

SEQ ID NO: 55090 - DNA, 573 bp, Arabidopsis thaliana landsberg
  unsure (1)..(573): unsure at all n locations
cactctcagttgtgcatggactctttcaatgacaaggtagtttgctcattttccatacattnctcctccttcggcttctttaggatctatgngttgaattctcaagtgacagtaatatcttggttttttccaggttgagaagatggtggttgactctcccaggacataccatgaggtacattgcccccattttgctcaattctattttccataataagaaatgaaggagactttccctttcataaacatcgattttattaccctctacatttattgatttacatatatcttgaatgttattttcaaatgctcaagtaaaagctccagttatccaactgttgcacttgcagataactaaacttttaccgtaatctagaatggcccactcaatagagcagattgtatatccaaattatttcactaactagtattagtttacaggtcacacactacctgcaggatatggcacctgatctttgtaatcgagtggaattgcatgataagggtatccctctctttgatttatatgaaattgaggaggaaatcgcaggtattcttagtaaaaggtagaag

SEQ ID NO: 55091 - DNA, 540 bp, Arabidopsis thaliana landsberg
taagcacaacaagtgcacgatacgaagtctttactaaaagacaaatccgagcaaaaagccgcccaagggtgcaaccggatatgcactacaagtgcgccatacgaagtcttcacgacaagccatccgagcaaaggccccctaagggtgcagctggacatgcaaacacgcaaacaccaccctaatggcgcaaagtctgttacgatcaccttaaaggtgtgaaagtctctgctatctgacacggtcgaacaaaaactgcctacgaacgcaaccaagtacgtgtcataagcacccacacactgccatggcaagagaagtcccatctcatttcacaacaagcaatgtcgtcatagtttacatacacacagcgaagggccaccggcatcattgcacaaataacacatcgcattttgttgccctccctctccattgcgagccgagggagggcagcattttcgctcactaccgcaacacgagagtgagggcaaacatgctacatcggctcagccttcgggataaggcctgctcacgaaaattaaacac

SEQ ID NO: 55092 - DNA, 452 bp, Arabidopsis thaliana landsberg
gcgaaaacccccgcaacgggcaaagggcacgacacaaataagggagccaaacacgaaataaggcatgcagaaagacccccgacaggaaaggaccgaacaaacggaaagaacgcgccaacccaaagggagggacaaagagcgacaaacccagaaggcgggaagccaaaggcaggtaagacaaaatgctaagaaccaacagcaacgcgggcgaaaagggggacagaacccccaacccgcagaagacgaaaggaaaaacgccagggaacacgccgacaaagacagaagacctgcaaacgacgcggccatcgacaggagcatgaagagaccgaaagggccgagacagcaacacaccgacacagagagttgggagcaacttagccgaatgcgcaaggccaacatacacacaaacagacaagacagagacaccagaagacacacgcggcgacgaaacc

SEQ ID NO: 55093 - DNA, 989 bp, Arabidopsis thaliana landsberg
tttggtttaacgtacttggctgacctaagaccgtctgatctttgttcaggcattgagaacactcttcaacatcgctcacaggttgcatgacgtgttgggcccatcatgggtgttggtgagtgttttgcttcaactatgttcaagtaatctatctcttgataacgaaaatcctaaatgaatacaggttcttgaaactctggcagccctagatcgagctattcattctcctcatgcaactacccaggtaaatttggcaaaaccccatgcaggattctgtctttttacttgtataatacaacttgatatttattatagttaggttatcactttatctttttctctgatatctgaatgctcttacaaagcttatagggcaatataatattatcttttataggaggttgcaactgcagtcccaaagcttaccagagagccttctaagcagtacgctgattttagcattctatcctccttaaattctcaggtaagccatatcaattttcttctatagtctatgcccttggattgctcttgttaaatcacttcttgcaaactggatcctgaacatctgattcttgactcattgctttcatcttgccagctgtttgagagctcagcgctgatgcaagtgtcttctgttaaatcacttctttctgcactccatatgttgtcccatcaatccatgacagaaacttcaggcagtgtttcatcagcttcaagtaaacaaattgggagcatcagtttttcggtggacagaatgatatctatactcgtaaataatcttcacagtatgttctctattgattaatgaagtacatcttcagattgtagtctttcttttctgtgctattgccttgtatattggtctagtctctggattattttgtatactggtcattctgattaatctttgtatgccaggggtggaaccactatgggaccaagtggttggccactttcttgaggtgacacggcgttcataattctgt

SEQ ID NO: 55094 - DNA, 1056 bp, Arabidopsis thaliana landsberg
ccagcagtgtgagtcattataaaatatctctaaacttgaaaatttgagagatattttttttgccaaagcaaaatttgagatatatatattgaacgtgtttcactaatgtatttaacattccccaaactgactagtgtaaagttgttaagatttgatgctattcatggatgggatcggaagtgacagaaatggatgttaccaatgttttcttgcatggttaattgaaaaacgagatatgcatgaatctaccttaaatacacctctaatttactaccaacacatcttatttatagactgcataagttatatgtcgtgcgtacttatggttacatgccgtccttggctgatactaccttgttcgttaaagaaatgaatcatttttctacattgctggtatatcgtagctatagctagtaataactcttttgaatctctttttgttgttttgcgcagagagttcaacatgaaggatttaagtctcttatgcttattttttagagtataagtggcaagttcgtgtaaggaaatatctatgtgttgaaggcaggatctatcagaagacactgcttttcgctcataaatcatgttatgtttccaatggacccttatgttcatttcagcaaagacaagataattatatattggattcaccaacgacatatcaatagcatattagacgttttctctatcgtactacaacaatatatcatctatggagttcacaggttaagccactttttcaagctcctactcatgttcgtgtaggatagaatactagatatgaggctactaacacaatgcttcaggtcatgcatgattcgagaagatcgatttctggattttttgtgactaccttggtaattctttggtttcttgaattaaaaaatagccatcccagtataagtacgtaggtgtagtatagaatcagaagccacctatgagcttatatggattcatcagtcgaacacatatttgaagatctctttggttgctaaggctaaactcttatatatggacaattaataagtccgttgttcagattgcttgcgatagagt

SEQ ID NO: 55095 - DNA, 342 bp, Arabidopsis thaliana landsberg
cttttttctctcccgatcgtatctcctgcccgtcgcgcaaaccgatcgctgccctagtacataccttatcattttataggatttttgtttgatcaaatgcatgacttgttcgtttcactattacaaaaaaaacaacgccatgcaccatctagcgtccaggcacgacgtggcaaaaagacttaaaacagcgacatgcaagtctccaggcgcagactgttgagatgttcggtggtggcaatgaaggtcttcgcaacccacggttgggggccaaatccagggattacgccggttaagtgttggagtcctaaaatacattgccatgttttaattgaaatttggttt

SEQ ID NO: 55096 - DNA, 1165 bp, Arabidopsis thaliana landsberg
ttaaacgccaagttagatttttcttttctaccttttttcggttttgcatatgtaatctcatgtaaaaacataaaattgtgtttaacaaaaccaaaaaaaaaaacataaaattgtaaaccgggatatgttatatgactaagaaataattcgttttcgtttgatctaatagcagaaaattcatgtatgagaaatatttttccatagaataaagaaagaaaagaatgtaaaaaaagtagaaaaacaaaaaattactttttgccatatagtcaataatggtaggtgaattattgtctagacattcttcgtatagtcgtatatatatatctatctaccttgttgctcttcttttctatacctcacaatttgtttattaagacattcgtgaaaacaatactatttttgtagccttttttaattatcttcacgatgagtcttaaaagcagagtaacctcaacatcttcacacaatcttcatcattcggaagaaagagtccctctccgatcagatttagaccagtcatgtctaaattcaagtccagagttcgacttttgtctccgtcagaactcgaaacaacggttttctcacgccgacgagctcttctcgtactggaaaaacctctcccacacggccaccgacactatttcgaagaagaccgagattacttctccgagaagcaatcttcaaaccctagctgcgaaatccgacacaagagattctgattcagatgatccaagttttgggtgtggtttttggcttgtaagaagcaaatctgttgggtactcaatgagaaacaagaaaacaaattcttcttcggaatatcaacggagcaatagtgatccacataaaaagaagaagaagaagagtttgcagaaaatgaattctacagagattagagcttcaagatccatgaatagtccggcgttgaatgtcccattggctgatatattttgcttaggccctgttttttccggtagccgtgatcgtagaaaatgaagtgtgctcttatcttataaccatgatcctgacctagtttctggaacatgtgaagagttaggtgtatgattggcttaagctaagctagatatttggagacaggaaaaatgagaatcttaattcggatcgtcatactcaaacataactaagaatctaaatcgagttttttcat

SEQ ID NO: 55097 - DNA, 606 bp, Arabidopsis thaliana landsberg
taacccagaacacaagtctccacatttcatatagaaatcagcaattgagttccctacagaaacaaaagactcaaaacctctctttaacagacttgcttgaatacatctaccttgaaacagccatgagagcttagcacaagctttaaaaacaatggggaaaacgaaaggatcgttaaattgaactccagctctctgtatctctgaatacccagagaccacttcccgccattttccactaacagaagcttgcttaatcttcgaagacaaagcttgtagctttgaacacaagtgtgatcccattaccatacttcaaaccacaactaaagtttgaagctttaacaacaaaattgtgtgaacaatggcttatatattgatgaccattagttaaaccttttcataatctggtttaaccgtttaagtagttatattacacacaccaaacactacatactaatacaggtacaacatttgttttctctttcatgtagtatacatacgaatgggttttgataatcttaacaaatacaaaactaagaaaagaatctcagtgtcttcaaacaacactagtgagctcgagacacggtatgtctaggacgaaacgaaaga

SEQ ID NO: 55098 - DNA, 679 bp, Arabidopsis thaliana landsberg
tcgcccttttaagttatcacgaaagaatcgggttcaacttcattatgtattttttagaagatattgccttgattttctcttaagcttaacaagatatactcttgatttcccattttcccttattagttggcgaaagagtattattttaattgacctgacgtatagttattagaacttcctatacgaaaccctaaagtaaacgatcaataaagccttaactttgttgctttaatatgataaaaatttaatttccaaagactaatcaaaaagccaaaaaaggtttctatttaagctccattaataatcaatggatttaccataaaaatgaactaattgtaagcaaaggaaataaataaaagctagcttttggattaattgtatggtttaaaactgttaataacgacacgtgtcacaattaaccccacatgaggcggtgctaaatactctgatcctaaaatccaaaacttcacgtccgttggatcttctctcaccaagttttgaaaccgtccgatctaatcaacctttcggatattcgatgtacacagtacttaccgtgtgcacatcccgcagatgataaacattttagaagtctggtctaattaacaaaccagcgtcttagcaaataagctaaagaaaaaaaaagtattacataccacacatagttatataatatatatat

SEQ ID NO: 55099 - DNA, 206 bp, Arabidopsis thaliana landsberg
  unsure (1)..(206): unsure at all n locations
gggggggggggggggggggggggggggaaattggggggnnnnnnagggggggggggggggggggggggaaaaggggggggggggggggggggggggggnngggggggggnggggggggggnggngggggggggggggggggggnggnngggggggggnnnnnnnnngggggggggggggggggggggnnnnnnngggggggggggg

SEQ ID NO: 55100 - DNA, 984 bp, Arabidopsis thaliana landsberg
ttttccggccatcgaatgttggataaggttttcgcgaaagccgatagagaaagatagagacagagagagagagattgtcgtcgctaaatgactctaagccgttcatcagccgccgattcaaccaataacgctaaccgatcttactccgccgtggctggaaccgataacaaacgaaaacgagacgaggactcttctgattacgtcggcgttgctgaaagtctcgagatgttgaagaaacaagaaatcgacgccgatcatatggctgcgtcggctcaacagactttaatttcatggagatccggtgagaattcccggtctctatcttcttccggtgagtgttcttcgtcgaatcgtcctgagtcgactcggttacaaatctttgtgaggatgatgtctggaggtaaaacgattgtgatccacgctgagaaatacgatactgttgagaaacttcatcagagaatcgagtggaaaacgaagattccggcgcttgagcaacgagttatctacaaaggtaagcagctacagcgtgaaaactcgcttgcttactactccatcgagcaagacgcttcgcttcaactcgttgctcgtatgcagagcacagagcatcctgtagcttggcaaacgattgatgatattatgtatacaatttcgagaatgtataaaggtgagaatcttcaatctaacatcaacgagaagattggtactttctttgcgatgattcctgtggagagtgacgaatcgattgcgaaatatctcaacattttctcgaactcttcggttccagctgctttagtgatgctatatgcttcttctttagagaggaataagccttgtgctaagagctctgttaagctggtcttgagtgattgtggcgctttaccgaagaatcagaagaactattgtttaccaatagtgttagagttttcgaaactgcttaggaaagtttgccctgatcagaagctatatgttacttgccggaacacc

SEQ ID NO: 55101 - DNA, 620 bp, Arabidopsis thaliana landsberg
cccccacattccctatattactttttaaggttttgatttaaataagaaaaccacttaaaccttgaaaataagggaaatggtagaaaaacctttagactaaggttgggaaaatttatggagatacttgaccagtagttacaatgtttaaaaatgttaagcaccctagtacccaagattaagcaaattttatccccaagacttgtttttactcaaacttgggaaaattagaaaacgacactaaaaatagaaaccatggagcaatattatttttcctagcatgactaagttataaagtttaagggaaaaatataaggaaccctagtcaagtactgttctggaatttatgatttaatttaggtattgagtatttaagtaagataatgattaaaaataataggacatatgcaataatgttaagaaaaatttagcagacccttgaccactattgtaccactacgaagatagtaacaccccagaatatcaaagtaagtgggtgaacaaatgaaactactatgattttccaatacttctagaaaataaaaagggccaaaagtagaaacagtaagcaccgtattttttctaggataatgtgcggtactgagcaagcgttgacgtctaac

SEQ ID NO: 55102 - DNA, 819 bp, Arabidopsis thaliana landsberg
  unsure (1)..(819): unsure at all n locations
aagtgctgatcattctcatctacaactacaagcctacgtgctctcggatacaaagggtacaacttttaattttccacttaatcattggagtccaatccttacagttcttgctgtatgttaacaaatattggatcatgtatgatcaacctcgttgggtttttttttgcaggagcggtgcacgacgaggtttatattttcacgtaacaaagatcccttctctgtgtgttttcgccaaaacatagcaatttatattagttactaagagcaatacagtgtttctccttatccaccattgattgtaagttgtaaccaaggtgttgaactataatttaaaaaaacacagtatagatcacatgaggcgtgaggacgcaatcacttgttcccatatcttcctctaaaacctaaatcctaaaaaatcccttttcaaagatcaagttttaaggcaaaaaaacaatcatgattttggccagacacagcgaaaggaccttgtctgtttcgaaaaactcatttaatcatgtgttattaatttattattatcaacaatacaatcgtactgggtgaccaataatgagacgcacccatcaaattgggccctccacggctccaccactgagagggatacacgaaagtcgttttacaacaacacctattaaaaataaatgtgcataaaaatctattaccacgtgtacggtgaagattaggttctcgattttgtataagaaggtcgaagtgtgaagaaatcaaaanacccaaatcgtgaaagttcatttctcctccattgatctttctttactcagatctttcctcttcctctgagat

SEQ ID NO: 55103 - DNA, 1198 bp, Arabidopsis thaliana landsberg
gcactcaacagcgtcaacatctacaagacatcagaattattacagcttagaatcctgcagttttgctagctacccctagaggagatgagatacctgaattgaactctggatgctgaccttcgatagcaaactcctacagcttgaaactgaaacatggtaacagaggcttctcattgccaatgtagacttaaatatgtgttgctttgcatcatttatggaccagaaagtgggatagttatacgtgttggacatagaagtcacaaatggctgaccactcccttgaattaagaaacacaagaataaaatatcactgaaatcaccagaatagtaggagatggtagaacaactccactacgtagtcatcatcccacagaagaaagtagcttggaagaggaatgatttggttagcttgaaaactacaccatcagacagaaaaatcagtaagtaggatcatatctcaactttattgtggaatatgaaccaaatatgcaagtcaatttcttctacagacagtggattggatgagaacattgtttatatatagtcttaacattattttatcatttgttcattttgaaacttccatcagtcagattccctatatatatagtaagttcataaaactaagaagaaaaagcctatatatctttcatatcattgtggaccaacaaacttaaacaaaaccaaaacatcaacggatcaagttcaagaaacatatatagcacatacttaagatacttatctatctttcccatcgcccaagtcgaactctaatatcggttacaagaaaaaaaacctagcatgattcataagagataaaagaaatatcatccatacgaaacaaaagaagggaagatttatgtatagggtttgattcaagtgaatgaccatagagaaacattttcctagaaatcacaaaacccaaaattagacctacccacaccaaaatcaaacttccgaaataaccgtccttcaccgatgttagcatgaaacctaaattgaatcgggtgagttaggagttaggaccaatagccgatgttagggtttgacaatgagtagggagatagtgaatcgtgtcttcctgtaggtaaagaaaccgagatctagggtttggtcgagattcgaatgttctcgttcttcctttgaaccagaatggtcgtgtacacggttaaatggcgtgataagcacgctaacactt

SEQ ID NO: 55104 - DNA, 423 bp, Arabidopsis thaliana landsberg
  unsure (1)..(423): unsure at all n locations
gaacacgcaaagccaaagacaataacattcttcgacgacaccaacaaagcnnggagaagcaagaagaagcaagcccagcgacacggagcccaaaangacaagangccaggngcacgagcgagcaaaagaacccaaaccgcaaccngaacaaaaaagccgaagcaccgcccccccgccagaagacgcaaagccaaagaaccacacggagnngagcaacaccaccaaggcaccgacaagcaagaagaagcccggccaggggaccggagccaaagaagaccagagaccangggnacgagccagcacaagaacccaaaccgcaacgagaacacaaaagcccaagcacngcccccccaccagaagagacaaagacaaagacccacacggacacngaccacaccagcaaagcanngagaagcaagaaga

SEQ ID NO: 55105 - DNA, 402 bp, Arabidopsis thaliana landsberg
gatgccatctacgaccgagagagatgatcgcatcaatcgttagaaattggaattagagaaagagagatgatcgcagtagtcgtaagagatttttgagaaatagaaattgcggagaagtctcaagtgtagggttatgtttttttataagcgaaaagtatgattataatttgtttttatgcggataacacaatacatttttccaacttttactgatttccttttttccaactttttctgattttctttttcttgttggtaaaagatttcactaaacgagagcaataacatgttcctaatgtttcccggttaaagctcactataccaaatctgtaaataaagtattaaaccgaagactaaccatgagacatgaccagtcgtaaaccatttgaaatcttttggtac

SEQ ID NO: 55106 - DNA, 341 bp, Arabidopsis thaliana landsberg
  unsure (1)..(341): unsure at all n locations
ccgcaagggccacgaaccacacaggccgagacaggaagtaagaatccaggaaccgncacccaaccaggggggcgggcaaaaataaaagagccaacgcgaccagccgaaggaaaccggaaacaaggacccacccaaacaaaaaagcgagcaagaggaagacccccgcaaagaaacccaactgaagacaaagctggcccaacaaaaaaaaaagaagcgaaagacacacgaaagacacaaaccacgaaacaaagggataaaaaaaggaaacaagggagcacccgaacagggagagccaaagacaagaaacctagggagatcacccaccaagaggacgaggacca

SEQ ID NO: 55107 - DNA, 511 bp, Arabidopsis thaliana landsberg
tggcgatttgatccccagaagcgtcgccgagaagcctcaaacggcacttcactgctccaacgctccctgagtgttttacccttccggtagcaggagctccccccgtgaagcaagtccatggcggatcccccaaaaaaaaccatcgccacgaagtctgcatcccctcccctcggcgcgaacaccgccacctcatagcgcgtcgtgctcgcgcggcttcgctatgcgcccgccctacggcgcagcacaccgcgacctagcccgctcgccgacctagcagcgctgtcgtgccttcacgccacccgccgccgaccaagctgggccttatgcacgcgtcatgtcgcgaccacgatgctgctcgcgtcccgtgctgaggtaagataaccagctacccccttcctgggtgcgccctcctcctgtgtgctccatttatgcctgctcgcattatcattcgtgacagtggaggacgtggcattggacacgacggggatcagccgacatagaacgtggtgtg

SEQ ID NO: 55108 - DNA, 1089 bp, Arabidopsis thaliana landsberg
aaagtctagtgattttacactagctctaaaggttatttatttacttttttctctccccaattgcggttcaatttcttaaaaggcaatataaattaattaaagaggtgtttagtttattgcttcatcacatgtactatgtaaaaaaaaaaaaaaaaaaagaagaaaaagattctagatgcttctgttaaaatttactaatttccaaaatactctctctgttctaaaagattgatattctagagttttcacatattaacaaacaatcattatttaattatttgtcaatcacctttttaaatgaaatattttttaatatctttgaatcaatagtagtatgaaatctacaattaattaatatcaatcaataaaaataaagtaaaatcctaaaattcaatttttgtagaacaaactcaaaatactataacatcagtttatcatgatatacttccttaaaagtattaatcttcatagttatcataattttatattaataatataaaaatctataataccttttttatcattaccacaagagaaaaaaaccaacacatatataattccaaatcactacaccatagaaatagaagaaacacatttgttaaggtacataatattaaatattcatagttatagagtccagatttcaacttaaaaatgttaattggtaggtaagtgttttttctactttgaccaaaaagaaaaggaataaaaaagtgtatctactttctatatattattttcaaagaaaacaataacaaaaaacttcaccgcctttctcaaagcctcctatataataatatcttctgttttctcttctaggctttaagacaccaacttctcgattctcagagctcttccaaatccctgtgaaatcggattcgagtaatactctcggaaccttctggtacgtgacgaacctagggtttaagatcgcacacttttctcttcacatgtctcgatttcgtactcttctttagtctttcgctgatttcttctgtttttgtcactgtttcgcaatatctgctcgagggttacgtcccgtttctgtatgaacgatttagggttacgttggcttcttctctgtgcttt

SEQ ID NO: 55109 - DNA, 1235 bp, Arabidopsis thaliana landsberg
acatttatttcgtccatctgctttagtttttcttattttaacattgtaatttacaattgttttacaacaggtgtgattaataaaacttcaggtggaaaaaaaggtaagtggggaatcgaagttcgaaagcgttaattttgtttttttatatttagacgtctctcaccgacaccgtccatgagccatctagaaatcttgtgtaataaaaatagatatataatgaaaaaatactacgttcctgcaaattgatagacatattccaatcttattgaagaacaaaaagataatgcattaactttaccagcgctaatcttctgtctccacttaataactaagtcataactattacaagtagagggagccttttggcagatgctttacgatgaataatacacaagaagacacatttattacgatttacgttacatagacaagcattcaaaaagagcagtaagctcaattacatacaaaaagatcagttagctcaaagagacatacataaaactaagacaacctctgtggtcagtaactatgatctgagtcattagaataatctccattgtcttcaagtggagctgcttcaccccatcctccactccacaacggctgaaggacaatgaccttaccattactaagcccagccgatatctgattaggatgtgaaggatgagcggcaacaacagtcggataaacctcgagcctgtgccatccccagtttagtagcaaaatcaattacatcattatttaaaccaaaatagaagtgtggacaaggaaactgtacctgatgttgctggtgctgagttgagtaaaagaagtcagattgatttgacatagtgtcataaaagtcttggagtccccaattttaatagatccacatctaaatccaacatagatgatctcaccatcggaagaatatgtagcagaagttattgcaggatcagatgcatcgggtatccactgcgtagcattttttatttagaggcgataaggtaaagctagaggcaagggaatataatcagagaagagagtctacaacagtctttgccttttacctgcaaacggcaatcaagagttcgaacttcgtataatcctatccacccatcatggaccacgagtagctcaatttgatatgggtcaaactggatgtgagttactaaagaggtggattcaaggttagaccggttgcaaaatttacgcgtagagttcttacttgtagctaaacccagctctgtgtg

SEQ ID NO: 55110 - DNA, 1266 bp, Arabidopsis thaliana landsberg
  unsure (1)..(1266): unsure at all n locations
aatttgtatctccatgacgttgacaactttaataatatatactccaattttatattaatattaatcttttttgctacctttcaaatttcaattattattatttctcgttattttttttttattttttttctccttatttaagctgaaaatttcgtgtggaagtaaagcatgaatataattaaggttgattcgggttgttgattcaatgatgttaactaaagacaaaagttaatatttcgtattgttgatcaaaagcaatgtttatccaaaaatgttaaaatctcgaccttccctagttttatagttcatggtttgtcttcaatcttatgtcgaaaaaactatcaacttacaatcttaaaagttactctactaccaaatttttgcaaaaaaaactatgactagcttaatttatttacttctcaactactccactaattaactcaaaaatgtttattgactatacatgttgacggttaaagtggccttaagaaaaggagaccacaactaaaaaagctgacacgagcagtggtgaagaacgatgccgtttactccaaacttctttaaagctgtataaaaaagtctttaatcagagaggtgtagaccaaacctaagatcgtttgcaaatccattactaataataagtgataaactaacaattcaaagcaaaaactccataaataattgatagtataccaatttttttaggagatttgctaaaatatgaccgataaattttatcaaaaaattcagacaaattttatggaagttttaattttgatgctctaaatccaacggttgaattctccgtcaaaattttgaattttaacgggtttctaaaatgtcgtctgttttcttatagtagtaacgtaattgtaaatctcaactcttaaaactttttctttcttttgactaatgatgatatgaaattgtctaaataccaaaaacagctaacacgcgtacatatcttgcaacatggcgctacctaatcaaaccatgttcgtctgttatggaagacaattctcttcttctcaaatacattgaactttaacattatactttaattaatgtaggtatatattacgacttgcacgacttaccatagccaaaatagggaaccaccgtatcaacatttcaagcatttagatataacttgattgttgattggtcttattgttaccgcactacgattatctatagatttcatagacaacanaataatataacacatatattattgttttagaaatagttataaggctttttact

SEQ ID NO: 55111 - DNA, 927 bp, Arabidopsis thaliana landsberg
tcttccgggttttgaattttctcactaaagatttgtcttttccatagaaaggtcttgaattttctctcttcgtgttcaaagggtttttcagaatttatagtaacccaccaatctactgattgtctccgttcatcgtaatctctcaagatttgatttttatttgttttttgaaattttgaattttgagattctgttcctctttgatcatcatcactagggttttctgtttccagttaaaaaaaagtttggatttttcttcgtataatttaggaatgaggaagcccaagttgtcaaaactcgagaggttagagaaattcgacattttcgtttctctaagcaagcagagatcggttcagatactaatggcggttgggttactctacatgcttcttatcacattcgaaatccctttcgtcttcaaaaccgggcttagttctttatctcaggatccgttaacccgacccgagaagcacaatagtcagagagagttacaagagagacgagctccgactcgacctttaaagagtctgctttaccaggaatcacaatcggaatcaccggctcagggtctaagaagaaggactcggatcctttctagtttgagattcgacccggaaacgtttaacccgagtagcaaagatgggtctgtggagcttcataaatctgctaaggtagcttgggaagttggtcgaaagatatgggaagagcttgagtctgggaaaacgttgaaagctttggagaaggagaagaagaagaagattgaggaacatgggacaaactcgtgttctctctctgtttccttaaccgggtctgatcttttgaaacgtgggaatatcatggagcttccatgtggtttggctcttggaaacacatataacaagtggttgggaagccacgagctgctcattcggagaaggaccctaagat

SEQ ID NO: 55112 - DNA, 1362 bp, Arabidopsis thaliana landsberg
  unsure (1)..(1362): unsure at all n locations
ctactggtaagacgaacgcttctccgttgtatacgttgatttctagggcatttgtgtctgaggtcgtcgccgtcaattactgtggaagacgagcttctcgttccagattgggttcaagtctttgggtttgaccttagtccggagacgttggttctcgaactgcacttccacaaaaggtgacgaagannnnnnnnnnnnnnnnnnnnnnngattgtgggcccctactatctccaccacgagcctctcattgccagtgccggttttagcttcagtcattaccggttagaaacaaagagataacaacaccaatggagaagattaaaagcacaacacaagtgaaaagacagtgactagagagagaaagatagagttatagagtctttgtgtatgcagcagacattaacaagagagggcgtgccacggagagaatctggattttgtattttcttacaatattaaactacatctcagatatttctcaattttaacttttaaaagatttttttatcatgacagttttgaataatgaataataggttgagtttgtaaattagcaacaacaaaaaaaaatatacgaacgatagcttttcaataaatagaagagaacataaaggaagggaacttcggagaaagggacataacagcctcgagcttcacgcacctggtcgcgcgtggatttaacaacgtgtctcaaccaatggaatggctctgctctgtacttaccgtctgctttttgctttcctcctgatccagtaggacccattttatttcctctgtacaattaaaaacgaaagagacatctataaacgtggtattcacgcgcgcttagactaacgcgtgaggaataatgaaaagaacaggctcaaccttcgtggcgggtcaaacctcaaaggtctatagaacaacaattttgtctcaaaagagtattcgtcagacctcagaaaacatttattgtactataatattagtaattcttgtatattttgatattctttagctttttttttttttggtaaggtgatattctttagctttagttttcaggataagtggggatttttataaaaatttgtaattataaaccatagattttatttttccccaataaaaatattacaatgtactgatgtagtgattagtgagtaaattaatactccctttgctttccacgagcagagcttagaaaaggttttggacttgagtttgcaggtctgtccttgtccttgtgtacataacgttcttcttgctcttttagagttcccaaaaaaccaataatatatcggcatttatttcatttgttacacttgtattttcattaatggattcatggggtgaatgccttgcttctttctttaattatct

SEQ ID NO: 55113 - DNA, 1047 bp, Arabidopsis thaliana landsberg
ttgggctcttagagtttgataaccctttgtattgtttcctagattcggtggaaatatttgcatgcttgttgaagggcctgcaataatgcagaagacatacaacactcaattctttcactaccggaaaagttctttgcaaaagataattcaagcagaaactagcaaaagaacacaccttcattgacgcttgctattggtacatttgtgcttctcttgtcgtcgctgatcacagcctaagaatacagatgtttgtatcagacataataacacggggatagtcaatccattcactcaaaacatttatcttagcggattcaatccaaaatgaagctatcatgcaagcatttaaactcaaatacagtttttgtttttcatacgaatcctctcctaaaatggtgaaaaaacttaaataaaacgccttaacaaatatagaaacccagaaatgcaaataaggaaatcgtccattgtttatgagtgtgaagactttaggcatattcgtggacgcgaaaaaatatgacaaaaaaatctgaaaagtttcaaaattctacttcctaatgtaacacttgagacagaacaacaaacaaaatgatggcatgaacaaaaaacgttaattttcccttcacacaaacaaggatcatagaaaaactcaatcaaagagcttattgatggtgaaatgaaagaagcaatagatgtaatatagacttaccggaactgaaccaagcaaatggcttgattgtagattagcgaacgactcatccatcgatcaaagagaaaaagatatcaaagaaaaacttagaagagaggttcttctaatctcattcaaaaatcgataagatcggaaaaaaggtcgtccctttttctgaatttttaaggtttctgggtttgcttctcctcctccgtcgtcgtggaagcaattgggaaaggaagagaaactaaagaaagaacgatccacgcgctttcttagcaagtcgataaaacacgcgctgttcactttcggacacgtgatttgccgacttgggcccagacaatcacaagattcacacaaga

SEQ ID NO: 55114 - DNA, 771 bp, Arabidopsis thaliana landsberg
aagcagaccgcaacgagccactgaaggatactgaagacatcccaatcagtgaaaacaaaagggataatgaaatagcagagcaaagcagcaatagcaacataaagcaactctgttccaaacccctcttgagcattcggttcttttggcatgaacatgtctaaagggctaggtagtttttcatcttgcacacgtctcggaagttttttgccctgtagacgtctcttaatagcccttacaatctcctccacaagagaagtatcattgctgctatgcaaatcatgaaaaaaaaactaaaacagtcaaaaccaaacccattccaatcttcttctatattcacgaaaaaaaaaaaaattattacctgtaatcttctgaggtgaaaacagtatctgtgcagataaaattcacatttctcatccaatgctcggcaaatggatgatccctgaagccctgaatcgtcaacgtttccaaaaaactctctccaaatgtaccattgaacatattcacgtcgtcttctgaaaccctatagaagacagggatcaacacgagttttccttccctacgtcgatcatagatcctcaccgcttcgtggaaacacaactctgacgcagtgtaccggtcagagaaaattactaatgcgacctttgagttatcgatcgctctgaaatgtgttccatgcctcttcctcttcgctcgtcactatctatgaaaacgttacacccttcgtcatttaaggctctttccacatgcctaatgaatccctcgctctgatcg

SEQ ID NO: 55115 - DNA, 445 bp, Arabidopsis thaliana landsberg
gaggcggaaccgaggccgaaccaccagtcagcagggccaccaggactgaggttcctaacccgggcacgacaggaagcacaaggattagaacggacgaaccaacggcgaaacgccggagcggaccctaaagaaacaccgcacacccaagaaaccaacgcgaaacgggaacgagaggggcaacaccatgcaagcaccgaagaaggagcaactgcagcacataccccaaattggagaaaacactaggaataacagacctgcagcggcggcccagacccacagacggggggtctatggggaacacggaaagcacaccatcacggagcaataagaacgctggttgtaatggcggctcacatggagaggaccaaccggggcagtggccaatggataaaagatatcgtagaggcccataacaggccagcaacaggccaaggccatcaaggcc

SEQ ID NO: 55116 - DNA, 928 bp, Arabidopsis thaliana landsberg
agcttctctttctgttaatcaaataccctcttggcattttcacctgaaaacaacaggaatggactgagactcagtggactaatgggcttattgatcatgaaatctgaatatgaaagagtgtgtttgagatctacctggtatcaccaatcatgtttcatcatcgaaatcatcattcactgagttctcttggcagataaacgtgttatcctcaaccggattggaaacaacagcaggatcaggctcccatatcgttggctcattaccctgagcggtgttctcaccatcttgctcctctgcagcttgttcagtctcattacacagttggtctgttgcaccttgatctccgtccaaaccagtgggctcaccagtctttggttctgaacccatctcagtttcggtttgttcttcattcccaaggaaagctacagtgacagcttcttgttcctctgtttgctccgcagcttccttctttggtctcttccacttctttgtggatgaagtaccatcatcctcgaaatcttcttgttctctgtctctgtgtagatacacccacagtttcctctctgaatcgaattggacacaagggtcccgctcatagtgcaaacgatccaaggccccactcacgacttgattcacttgtgaatcagacacatcctccacgatatactgcgagtctcttattaaggtacaaacatcagctcttgtcccaatactaccaggcaatctggcggcagtatctctcactagacacaggattgtgacatgtggtggtctctcgcgtttcaacatgaaatggccacgagctttcgaggttggctttcctccgccttttcttagaggagcaacaattgacttcttaccaatcagagctgtgtaaccaaaggctctgtccggaattgagtacctcaaaatttcctttttgcggaaa

SEQ ID NO: 55117 - DNA, 397 bp, Arabidopsis thaliana landsberg
  unsure (1)..(397): unsure at all n locations
aaaatgaaaccccagaaccgcgagggaaaccaacccaccaacccaccagagaaacacaataaaatagacacaggcagggcaaccccaagggaangagcgaaaagaaaaaaccccagacccccgacaagagacangggaaacacagaaaccaagaagcaaacccagacaagccgaccaggagaaaccaccacacaaggcaggaaacacacacgaccccaacaaaccaaaaccaccacaagagagaacagacaagcaaccnaacaaagggagacaaaagcgcaagaancgaacagaaaaaacccacaagcgcaacaagaaagaacaaagaagaaaggacgggcaacaaaaaaaccagccccacgacaggccggaacaaaaccaggaagcaccaaggaaa

SEQ ID NO: 55118 - DNA, 857 bp, Arabidopsis thaliana landsberg
gttcttgtaactactaggaatctaggatggtgttttttaattaatatgctttgttgtaacttactatgttggtgtttttagttcatattcttgtattacattgagtaggcgttgggcatcatggtacattcagagtcatcaatacttagttccttgcgcggtggtgatggcggtggtattccttgttctaaggatgaactatcaataaatggtagttacaccgatcctatggggcggaggaagtccaagcggtttaaggttgctgcggaaagtgagttttcacctgattttggatcgattaccaggcagctcagatcgagaagaatgcagaaggagttcacagttgagacttacgagaccaggaatgtttctgatgtttgtgttctctcttgtcaagctgatgttgagttgattcctggagaaattgttgcagaaagagatagctttaagtcggttgattgtaatgacatgtcggttgggttaaccgaaggagctgaatctcttggagttaacatgcaagaacctatgaaagataggaatatgccagagaacacaagtgagcaaaatatggtggaggtccatcctccaagcataagcctgccagaggaagatatgatggggtctgtttgcaggaaaagcatcactggaacaaaggagcttcacggaagaacgatctctgttgggagagacttatctccaaatatggggagcaagttttcaaagaatggaaagaccgctaaacgttctatatcggtggaagaggaaaacttggttctggagaagtcagattctggagaccatttgggtccattaccagaggttttggaacttgagaaatcagaggtctggataattac

SEQ ID NO: 55119 - DNA, 591 bp, Arabidopsis thaliana landsberg
cacatttttaataaaacgcgtgtgtggctcgatctaattggccgaaccgaagccacgcggagggccacaccggtcgctgccatataggatcagagaaggtggaatcggatgtggctcgtcttcaaccttgtgatttttctacttgggcagttaacgtaagagagaaaagaatggagggagagagagagaggaaagaaccggctggcaggggagcctcgaccgggttggtggcacgctgcccgcagccaggccagcgccgcgcataggtgcagcagctgcaccgtgtggggagagaggcccgtggcgtgctgctcaagccactagtgctcggtcatgcagcaaacagtcagaccggccaagacaaggcgcgtgcccatggctggcgttgccgcagccaggcgctggttggccgggcgccgagccgggggctgcgccgcacgagccgggggcgcgctgtcaggaaccagctggacatcgaatcgaagaaaacgaagaacacatgttgaaaacaatggataaggctcacggaaaaggaacctcgccggagtaaggagaaacgtcgattactgagatcattgatcgattgacaac

SEQ ID NO: 55120 - DNA, 974 bp, Arabidopsis thaliana landsberg
gtcatgcagcatttttaatgagttctgttttttttttgttttcctgaggacattagtttttttaaatacttgaataataattgctcagattttttaagaaaataagtttcttgaagagaaactcttatttatagggtttttaagttttcattaggattaagaactttacaaatctaatttccatagtttttagaaaattcatttcttatttttcttcaaaggaaaacactttttaaaatcttagttaagtaataaaatggttttttcaaaagatgaaaaaacactattatagtataaatgggggactataaaataaatggtgtaaatcataattgctttttcttcttctattcggtttttggaccaacttttctgccatggaaagttcataacatttaaaatggatcaaacatctctactgaattgtttagcttatcgttgtaaatcgtgaaacttgtttgatcttgatttggtctagaagactcaacctaattaatacatgtacataaatggagatacaaagaaaacatacatagaaggctagagctgtaaatttgggtaatcgtcctagagagagaaagagatggagatgagagttatgtagatggagacagagaggaagagtagtgaagtaagctctggtcgattcagtgtgttaatggtcagagagaaagtaaccatttgcctttatctctctctctctctccatgatctcactcttctccttttgtccctattccctatagagacagtgagacacgagcacgagtcaatacaatccttcgtacgtacacattattgataacgttgattaattctgaattgtctctattctcatttaagtgcttgttcgttttatgggttccacacaagaccatattcactacttctagagcttgatgattcttcttgtaaaaatttatcaactgtttgatttgtggatataggatgttgacacttgaatgaggtgtgtc

SEQ ID NO: 55121 - DNA, 545 bp, Arabidopsis thaliana landsberg
agaatattttgtgttgcatttaggtatatctgattggttgattagatcaaatgtttttgcgttttttctctgccaaatgttcgtgagaatgcaagagatattcaaattgtgttcatcaaaactaaaatttatattcaaaaccgtggatggtaaactatgcataagataaaatgtacataatttttgttatcttctaaaataaatgtacctaatttaatagcctaataatatcttctaaagttattaacttttgtttatgacaatgatgatgataggagcattttcgatatttccaaaaaaagaaatggaaaggacattgcaacaaaattgaaaattcaaacaaacaaacaaaataaaaagtgcagctaggggataaaattcaaaaggcaggatagaaaataaacaagaaagaattcatgaataaataaaaacactagaagttgaaattctgaaaaatacttgaaaagaattgatacaatgaatttgatgattcattgtccgaattagactactcacagtctcacataaatatcaattctaaattt

SEQ ID NO: 55122 - DNA, 414 bp, Arabidopsis thaliana landsberg
  unsure (1)..(414): unsure at all n locations
ttatcttacgatacttcaaaagaaagaagtagagtcgttggaccaacaaccgccatgaaatagtccccccagccaccaggaagcggannggattgaaaagaaaacacagaaccacgccccacccgcgctagggacacacaangaaccaaacccggcaggccaaacggaagcgcaagaagagannagacccccccaacagaagcccccggacaggcagcagggcccccccgcccaaagcacgcaaaagaaaccgccaaggcaaacaccccanaagaagaaacacgaacaagacggagcagaccgaaccgacaangcagacaaaccaacgccaccggaaacaccccaaggcagagcaccccccctcnacaatgaagccgaagcgaagcaagcgagcccccccacagagggagaccg

SEQ ID NO: 55123 - DNA, 564 bp, Arabidopsis thaliana landsberg
acgcgtaatgccgtttagattaaagagaacatatctttcatctccaaacagaaaaatgatgactcacaaaaccacagatttcaactatccctttacttccatttcacaactttccataaccagtttaatttgtaaaatgttataatgtattaaaattcagcagaagaaatcatatgaacctaacacgctaggatggagtatatttttcaaagtcaaagaaatacagatatttggcgcatgattcgtacatatatgtggagatactttaaatgtttacgaaagcctcgtgcctatggttaagaaaactctcacctataatgtaaatatgtaatggaaagttacgcttgctgactcaatataattattattgactcacaaacaattactcattttttaatacatacggctgctatttgacactttattatacaccaaaacatagtcttaatccaaaagtcgcagcagaatgtacgaagattagtagtacaatagtgtgatgaaaattaaggtggattaattagaagtttaatgaaaaatccttaattttttaatctacaaagcact

SEQ ID NO: 55124 - DNA, 529 bp, Arabidopsis thaliana landsberg
atctttttctctctgtctcaaagctataagacatttgacatcccaaaaccaaaaaacattgcttgtcatgctattctgttctgttctccaatgttgtcatcagcaaagcataataagatcaacaaccatagtgccttttcaatttcctcttcatcatcatcattatcaacatcatcctccctaggccataacaaatctcaagtcaccatggaagaagtatggaaagaaatcaaccttggttcacttcactaccatcggcaactaaacattggtcatgaaccaatgttaaagaaccaaaaccctaataactccatctttcaagatttcctcaacatgcctctgaatcaaccaccaccaccaccaccaccaccttcctcttccaccattgtcactgctctctatggctctctgcctcttccgcctcctgccactgtcctcagcttaaactccggtgttggattcgagtttcttgataccacagaaaatcttcttgcttctaaccctcgctcctttaggaatctgcaaagtt

SEQ ID NO: 55125 - DNA, 270 bp, Arabidopsis thaliana landsberg
  unsure (1)..(270): unsure at all n locations
gggggcccccccaagtaagccgcaaaccccaccataagatcataaagccancagcgnacccaacagcacggttcaaagagaccccgccagacaacgcgccacgaggaaacacaccanaccagcaaaacgacaagacgcccaggcccaaacaaccacggccccaccggaaagaacacagaaaggcnaacacagcaacggaaaagaaaccanccccaacaacagaacacacaagccacacacccgagagacccaagccccgggggacgacgc

SEQ ID NO: 55126 - DNA, 310 bp, Arabidopsis thaliana landsberg
gaaagacaaaagccgcagaggaagaagaaagcaaacaacacagcaggaggcaaaataacaatacacccacccaacgaaaggaaaggggaagggtgaaacgaacaaacccgaccgaaccacccccaacaaacaggaagacaggagaacacaaaacacgggggcccgcacagcaaccaaacggaggccccgcaaaacacacaaaagaacacgccacagcacaaagcagccaaccggagaacacacaaacaccaagaccaaagcaaaacccaaaacagaacaggagcaggggcaagcccgaggacacaaaaag

SEQ ID NO: 55127 - DNA, 461 bp, Arabidopsis thaliana landsberg
taaatggagctttgattcaacaagaaatttttgcaacacatttgtgttcatgtgtgtactccacactatagggctacttcgtagaaactaaattatccacaccagaatcaaacctctggtgaaacttggacatgatctagtcgagccttgaggaacaatttctgattttccaagtagaactctacaaagcaacaagaatctcatcccatcttctgattctgaagctgaatccttcaaactaatcaaacaaacaaacaccaaaaatgagattttgagaccaatgaatttcgaaaaattgaaacttttagagatttagagaaacttaccaatcaagaggagaattatccggcgagagatacaatccacggtcaaaagatccatcatttctcagcggctcgctaaacccatactcaaaaatcgttttaagcccatgttttgaaacatagcacccaccgtatttc

SEQ ID NO: 55128 - DNA, 177 bp, Arabidopsis thaliana landsberg
accttgactgggaaaacagatctggccctctccctatagagagtcgactttattccttttagcctggcttacctgcatttatgaattttgacccttacgtgcgagaggcggcatgcgtattgggcgctctttcgcttcctccctcactgactctctgcactcttgctttcggatgtt

SEQ ID NO: 55129 - DNA, 735 bp, Arabidopsis thaliana landsberg
taagagagtttttatacaactggtcaaaccattaacccggtccgtaccatcgacaaagccagtcaagccgttatcagcgaagtggaggcgtttgtagtcttttctccaccgaggtagaatataccgtaaagggatttcttcaacgccgttgaaattgagaacacatagagcatgtctgcataagtatccgtagaagttgaagcagctacaaatgcaacgtacttcgccaactgatctattgtacagaacttcgaaatcgcggatttctcttctgctggattcgccttggacccgttctttcacaaggaagatcacgaaaggtccatcgacatggacctgcgttgtgctgaaacatgagtacatttcttctacctctatttggaatttcttgaacatgtctctcgtgtagattctcgagagctgtgtctcgaaagaacactttgttttaagctccgtggtgttcaaggtttgagactctatgtcgctgagagtttcttccctgtgcttcttctgaagagctagctcgtacttatcgagaaactctttcaatggtgtttgcttgtgaacatacctctcgaaaaatggtttcagggtttctccaggatgagcagcggcgattcctgcaaaaaacgtgtctttgagataaaccggagcccatttagctctctcttcatacaaggaacggagccattcatttttgataaccccaaaattgtgaaccatgaacccccaagc

SEQ ID NO: 55130 - DNA, 311 bp, Arabidopsis thaliana landsberg
atatctaggtgagaagaaatatgtaaaggacgtttcttgttttcacattatagggttttatgcgtgaaagattgtatatgttactataaggttgattgatacccactcactttgtccttatatacgtgcaagcataaaaataagattagatttctcaaaagttatatttatatataagttatcagtttatttgtatattgtcaacaagtttcttgcaaaacccagtaataaattatgaacattagaaagattcgtgtccctttgttttgtataagaggtacaagaaagtgtacacaacttttagttaaaaa

SEQ ID NO: 55131 - DNA, 794 bp, Arabidopsis thaliana landsberg
aatccttgtggagttggatctgattcatcaccattgttcattcttcataaatcataagcattcatatattacatgaactttgaatacctctttttcccaagagtagacatccaccttttttttttcatttcaaaaatcatcaaacgatatcctcacacttagtaattttcgtgttgaacaagaacatgtaaaacccacattggccacattgtgatttatggtttcttcttttgattcattctacatccatgcatatgggtcaatcaaatagtcttgggtctattgggtaaatacaaactctaatgggctgtacaatattctttttgtgtatccaaactctatccttaatttagaatattttcaaaattaacccaacaaaaagtcggttaacgaaatttccccaaattgacaacaacttttgctttattgcaattctccccaaaacctcaggcaataagaaaggaatttagaaggacgacgacgtttctcatcatccgtaccttccttgttaagttgcaacggagacgtgtgatatcactcaacaacacatatctgtctctccgtcgtcagagagtttctttcgacgatttcgcaaaaaccctatggagctcctccgatccaacttggctagggttcagatccctgaacctactcatcgcatctacaagcatgagtgttgcatctccttcgatactgcgggcaagcctctctctcacttaggtttcttcttcaaattccgactactctcgactctgctctcgttttcttcggttttgatgaattcgcaatgatga

SEQ ID NO: 55132 - DNA, 494 bp, Arabidopsis thaliana landsberg
agttcagtctcatcactggtagattttggttccatgctggcgcggaatttctgaccgtaatccattttttcacggtattcagcccagggaccaactttggaatcaggcatgcagcggaatactctgcggtagagcaccgtgttattgcgcgcagcccgattccaaatttgatccacaaaattaggatccaatggatcttgcatacagtctttgtcaatggaagcagcttgaatatgtgccgccatcgggtggaaagctccgctagattgacggcccgttttagaatcaacgtggatgggacggccaccaatgttagtatcatcaagcactggcggcagaatagctggtgcgcccgtgaccagacctgattaatcattcttacccacctcatccctgctaataagggatgggggtgcaggaagagtgccatgcttattgctaggctcttggagtgcattgtgctgacagctcgaaaagggaggggataagggggg

SEQ ID NO: 55133 - DNA, 172 bp, Arabidopsis thaliana landsberg
ccccccccccccccctccccttccccccccccccccctccccccccccccccccctcccccctccccccccccccccccccccccccccccccttcccccccccccctccccccttcccccccccctccccccctcctctcctccccccccccccccccccccccccccccg

SEQ ID NO: 55134 - DNA, 1332 bp, Arabidopsis thaliana landsberg
ctttgtgattaatagctatccccatcacgtaagtttatttgttatttttcgaagtttgaatgacattttggagaattataacttagtaatatatcggggatctcaaacttgaaaattctgatcatgctattgatgcaacaatcttcagctaaataattttggtgcattatgcataaggtagataagttgatagatgcctttgcatagaacaaagttttggtactcctatccactgtttgcgtatcatgcatcagtgatcagtgatactagctgagtaattgcagtcccattttgaaaaggaaaacccctttgcactagtgtagatttgtttagtgatacttatgtgtgttctgtagtaatatgaaatcatacgtattatagggcctattttttcattataatgatattttaatgtgaacttgtaggagtttcgaagaataaaaggaaatataaactcgttgagagaacacgctgagcttctgagttctgtcagggatgacataagtgaatataaggtaaagatcctatagcctcttagtttagaaaatgaatattcttattattggagatacacattcttctatgctcacattttgattggaagttgggttctgtttttgcttctgcaggcttctggtagtatgtcaccaggtgtgcaagtgttaagggagagagcttcaatccatggaagtatatcccatgtaagatactttctgtaatcatggcatttgtaatctgagtgttatattctgttaataatagcccactttgtaaggtaattttctaatgaggatgttatggagaatttggctgcagattgatgatgtgattggtcaagctcaagcgacaagagcagttcttggctctcaacgatctctgttttcagatgttcaagggaaagtaaaaaatctcggagacaaattcccagtgattcgtggcttacttggtatctctattcaacctctatatgatattctcaactaatctcattagccttctattatccttaagcaacttttggttttttcaattaataggctcaattaaaaggaaacgttctcgggacacacttatcctctccgctgtcatcgctgcttgtacgttgtttctaatcatctactggctctcaaaataaacagaatgttcatacacctaagctataaaacgagtttgccttgacatccctagatcgatttttttacaagttttttcttgcttttgtgtttttgccattatgttgggttatatgtttgtaagacaaaattaccccctgaatcatttcgtaaaagtaaattcgaaacatattttcacaacatcaaagatccaccgatg

SEQ ID NO: 55135 - DNA, 989 bp, Arabidopsis thaliana landsberg
aaaggctattagtggtttatgatgcgtatgttgataactcaagtttcctagcaaaccaatcggctcgggcttttgttagaattgattttgtttattttctaccaagtcttcgttcatcaaatataggtctttaatttcgaaaacgtcaaaccataaatgttaaatccggtcatacaatatttagaattgtcatcaaatataggtctttaataaaattggcttttgcagtaatgttaggccggcccaatgcctttattatcggaacatgttagtgtttgttcttcttcttacccagcagcgtcttcataacatttgtacgtctattgtcatacattccatttgatgaaattgagataaggataaatacgataaaaaagtaatgggatttttcgtaagagaaataggaaaaccaaaaaatgttgtttagaggattaaatatgtttcataataatttagtagtaacggtaggaattaggttttaaattcaattttctttcttttagagtcaaaagtagttgcatctatagctctacctgataacaaaagatttatgggattatatacaaatcttaaagaaaacggatctattcttaaaactcaattgaaaagccatatttctaaatggttagaattttatggttattcacctgaatttgttcagatcattttgttaatttgatgattccactattgattaaccaattcgagttaaagaagaaaataaattatgttgagcatacttaacaaggattatatttgtagatcggatcttgaaattaagagatgaaatgaaaagaaagaaaaaaacattggtgttaacgaagaagggtgggtccaaaattgattaaatatttttcgaacaaacaaataaaaatatatataagtatttagagccgggatcgtctgcctcctctgcctctcatctcttgttctctccgcccatctctgctctcttttattttcccagaaagttttttttttttttttcc

SEQ ID NO: 55136 - DNA, 642 bp, Arabidopsis thaliana landsberg
gatgaccctgaccgatagacttcattaaacttaataacttatacgcattggcaggtttatttcatcttaatttcacctcccaacaaaaacaagcatagttatgaatcacaaatgtttgatgatcacaacctcatttagatgcaaattccaagtgaatcagaatgttcacttgagttaaaagactaagtaaaaaaacaacagaacaaaaaacgtaggcaaaaatataaaagcaaatagagaggagatgttatgaaccttgggggaagcaaaaggaggaaacttttggtcgagaggtggtgatggagttggtttaacgaacatgaacctctcaaaaaaagcaattaagaggaagatagcaatcaaaactccggtcgcaaccaaaccaaatggcaccgcattcaccgagctctcaaaacgtccttgaccttcttcgtccgcagctaaaggacccgccgttccaaaccttctatggtcgtggctgctcatttgtaactggaaagagacttgtgaaacagaggaacaagaagtagaaaaagatcgtttcattgcccaagttcccacttttagttgactagtcaacattacgtacgtagtttgggcttttctctttattgggcctatggtcccaaaatgggcctacct

SEQ ID NO: 55137 - DNA, 737 bp, Arabidopsis thaliana landsberg
gatagcggtattgaaaggcttccagatagtatcaaagatctcacttggctacactacttatacgtcgataattgtagaaaacttgtgtcactgccagagcttccaagttcgatcaagattctatcagcaataaattgtgaatcacttgagagaatatcttcatctttcgactgtccaaatgcgaaagtcgagttcagcaaatccatgaatttcgatggagaagcacgacgagtaatcacgcagcaatgggtttacaagagagcatgcttacctggcaaagaggttcctctggagttcagtcaccgtgccagaggaggttccttgaccatccatctagaagatgaaaatgtttgttcttcatctttaagatttaaggcttgcatcctacttttcccaagcgaaaggaacaatatttgtactgtatattgtcgtctcataggtgaaagtggtcgtctcatcgcagcacatagatttggtggagttgtcaaggactttgtcacaccgcatctgtttatatttaactcagtcttacttgaagaagtggatgtgatacggtttgaattcagcagcatacaccacgagattacggaatgtggtgtacaaatattgacagatgcataagcattcgggagctatcaggaacttctacaagatgtcggagcgttcgaaaatgaaaaaaagtacttatgttaaaagtttaacttcatttcaaactatatccactaaaatactcgcac

SEQ ID NO: 55138 - DNA, 1143 bp, Arabidopsis thaliana landsberg
attatagggcttctagatgaagtggaaaatcttctgtgtgctttacatgattatccaaagatacatttaaggaaggatataaatcaggtaggatttggccatggggatgaacaaacaggcaactctcaatccagttcgaacatggcgtgttcgaactcgatcaatctactcccaatggttgatttggtgatgaataataaaaccaagatgaaaattccgagtggatttggatggagatgatttcaatggctcggttcaagctcctggtaagggtttgtgaaccaactccaaatcttatcgatccgattggatactagctcgttcattctcataaatatgcatgtagttgaaaaatattgaagccaagatgaaattggagagggtggataaggctggagatgagttacatagctttgttaaggctttgagtaagggtttgtgaatcagatctaaatctaatcgatccagttggattctggctcgattaattttcataaaatgggcaacttgcttatggattttgaagtccactccgtttgatcgagtagaacttggtttggttcaatatctccttcttgctcggtttctggggtggagtgcttgttccggcttaaggtcagctcctggtcaagattggtactaatatgtttatcaaacaagcagggatagaatggacataagataaaaagagggtggagtgatattaacaaggatcagccgctagtgacccaacgagcataccaccagaagttaaaagttgaagttgaagccatgcatatagaagtcctttaaattaagagcttaggcttcacatggtttaaaatttgtggaaactcaagtgccctctaccatcctcttcaagacccatacgcaaaggcaaccaaattcaatctaaaggcacacatcgatttctacctatatgagtgatgttttacatatagcttaaagatggtgcaagtttaatttcaagaaaatccttggagagacaaacagtatagctgatgtcatggcaaaatgtgagaacgaaacttgctaattatgtaatatgtcaatgttagaatgatgttactctgactctggactcataaaggattagagagaccatgaataaatttgaaatcctaaattcgtatatattaaagg

SEQ ID NO: 55139 - DNA, 1009 bp, Arabidopsis thaliana landsberg
caataagcaaatttggtacctatagaatccatttattatttcaaaatacaaggaaatagaaattcataagaagcccatagaggtcaactgaactcaaaacttttataagaacccaaaaagaatttctaatgaaatttgtttatagcagcatgaagtcccaatatagttagcatagatttctcgttctcagttaaagatttacagattaagtataatcaaaaagtaattaacatgaagccaataaaatgaacacttaggtacttcattattgaaccaacccaatgatattggggagaaatatatatcgaagtatcaaaaccaatgatacagccataattaggtacacacaccaatccagcttttgcactcaacaaacgacaaaatcccatatttcgtgcatatatctggttttattatccaactactcattattcaactaaaccgagtgatctggtcaaaattggagaccaaatctgacacgtttaaccactgcgaaattcacataaacgttttttaaaatattattcagctaacgcaactcttatgttcttcaccacttcttcaactggtcgagaaaatttgttgtccatctgcaaattagatttaaaaatcacattaatacataaaaatcaacagtaaatgataatatataaaaaaagatagaatatgataaataaaaaaatattagaagattgataacataccttagtgagaatggttataacgagagttgaatttccaaatggtaaagtgaagctattgactacttcaagacgaaacttctccaaggaacttaagatcttaatcatacaccctttgttcttctcacaatggactctaatcaacaaatctctgtctgaaactcgggcttcgatcataggcattgtttgtttgaagatcgaaacttcgtccgaagaagaagacagaggagacgcaccagagcatgtagaagaataagatgaagaatcatcatcttaatacacttgagatctcttcaccatataattga

SEQ ID NO: 55140 - DNA, 533 bp, Arabidopsis thaliana landsberg
tctccttatgaaatgttcaaactatagaatttagactgtatgtgatcttatcagcatgcagagcttacagcacttgggcggtccgcatcaataaaaatgacccgaagaacctgctccactgctacttgatccttttgctcatcaaactgcacaataaaaacacccaaaaatgcatcatccatggacttatgcctaagaatctctgagacagagagggcttatccttttaaaacctatttaccaactgcaatgtttcagcctataagagtcattttctaagattgaataaaattgcttccaacattggacttttaagtaaactgataagaatcagaaaggagccacataacataccaactcaggcacatactctattcctggtttaactttcaggctcataatcttaaacttaaccttgctcttctggttcaacggctgcttttcattgttctctggatgttccacaaacttgaacactgcacttaaacatatacatacaagaaagcatactcagaagctgtatacactagtta

SEQ ID NO: 55141 - DNA, 1063 bp, Arabidopsis thaliana landsberg
acaaaatttgtaattttatgaacctgaatcattgcagtcgttcagtgtccagaagggtgttggtggtgtggctgtttgattgcaatctgatacgtttagcttcaatgtctaccggagtcttagaccagaaagccagaatagacgaatctagtttctgatagaaagacatttacaacaatagataagacctccagtcacaaaaatggaacaaattcagtcataagaagaaggtagataatctcttacttcgcatcttgtgatgttctcaagaggatatattctcaaagttcggctagtacttggatcaagcatacgaagaccatccaaaccaatctgctagcacaaaaccaattcactaaaactagtttaggtaatacaaagttcaaattgaattggggacattacctgacaaagaacatctgttgtggtttgtccataagtctcagccaacaatttgacacgaaatttctgcacaccaccagtggaatcttcctgcacatcagccttaggaacagctctcacgatcttagcagaattcgagctaacagaagaatctctccctgaagaagaaaagctaatggatcgtccataatcatcgaacaatgtcgaattcgatgatttcggcgcagttccacgagatccgtatggctcaactttgcctccttgataagcataaacgccctcgccataggaatcttcaaaagcaggatattctccgctatcagatcgttttccgtatagatcacatcctaaatccgatctgctccggttataaccgtcataaccaaattcatcaaatttcactgacggtttctcatacgaaggaggtatggatcatcctccgctactataaggaggtgcagagtacaaggatgatgaataaggcgcgggattaggattctgcgcatgcgcagatgaaggaggaggcgcacatgaatagccataggtttgatgctcgatcatacggtgagtaatacatatgttgccaggtacgttgctgatactgagcattataatcaaatgatccataagaggatagaccgtgtggatgaatcgtgggtgg

SEQ ID NO: 55142 - DNA, 534 bp, Arabidopsis thaliana landsberg
tgcaatttactcccatggtgaatacttccatggacccccacaggtactacatcggcttagaatccattaccataggcacaaatatcactcccacacaagttcctttacccttaagacaatttgattcacaaggaaatggaggaatgttggtcgattcgggtacgacttacacacatttacccaaacctttctactcacaactcctcacaactctccaatcaacaatcacatacccaagagccactgaaactgaatcaagaacaggctttgatctctgctacaaagtcccatgtcctaacaacaatctcactagcctcgaaaacgatggaataatgatctttccttcaattacattccactttttgaacaatgcaaccttacttctcccgcaaggtaactctttttacgcaatgagcgcccctagcgatggttctgtggtgcaatgcttgttgtttcagaacatggaagatggagactacggaccggccggagtttttgggagctttcagcagcagaatgtgaaagttgtgtatg

SEQ ID NO: 55143 - DNA, 537 bp, Arabidopsis thaliana landsberg
gtccccgcttcttctagtaaaacaggcaataaacaatacatcaatagtggtttactaagtggagtgtgtcaatttctaatattatcatttcatgtgactttagaaagtgttttgataatttttggtgcataaaatattgagatataataactaaaggagaaaaaggctgaaaaagaaaaagaaaaaggttttaggctctggtgggccggggggcgaaatctagcccagccgggcgcaggggccgcgcgggcgagcgcgccggcccagctacgacccatggcggaaaacggcgcgggcgccgaggggcgacgccgtttccgcggggcccacgcgtcagagagagcggaagggcagacggcgccaacggtcgacggggcggggcgaaccgaccgtccgcggagagaacccagccgccggtgggctcgacggtgatttgtcgccgacgacccgattcttgggcaatgggcgggcgcctagcatgaggaggggctgacgagcttaggggcgggccaatttggccagaggaggctgggaggg

SEQ ID NO: 55144 - DNA, 291 bp, Arabidopsis thaliana landsberg
tcaatatataaaacaaacgcccctcttctctgcgagccatttgtgtcagcatcgtcagctaacaaaagatacaggctagatacactgtgaggttattggaaaaacccatatactacacactggaatcgggatacaagaaactgaacagcctaacctctcatgcaagagacaaccataaaacaaatattcctttgactcatgagccacactttatattgctccggactgtgatgcatggactcattgaaaatacaaagggattgagggaccgcccgcaaacactgagttctg

SEQ ID NO: 55145 - DNA, 795 bp, Arabidopsis thaliana landsberg
taacggaatagagtgagatatacacgaccaaataatgaaattacgttacaaatgttcaattgcatgactgcgtaatgtattttatccaattattatatgtgatgctaattatactacatttcaagtaatacgtgtcaataataagttgattatcattggaaacctttatatagattaaagatatttgcattgaccggtcatcttatagccacaaggattcatcatgatcaacgcatataataatacaagaagaatttgaattaacaaaaaccttaatgatatatgtatgttgctcgattctaatcactctatataattaccaaatgtataaggaagacaggtcatttgtttattgttactatatggaaaaatgaatccgatgagtttcgtaatttcccgtggaatccaaagcttcgacatatgcaaatagtaaaagttaaatgttgataacggagattgcaagtaattgataattaaatgtaaatatttgactaatggagagggagttgctaaattcaagattgttagtttaccttctgtcgttaacaactttgattatatcaattatacacataaatctcgtatgactcaagtgtgtatataaactatatataaagcatgggaggtgcttttttctttatattaccaatttgataatatgaaaaaacaaaagataaaaagggatcaggagcagacgaatattagaagaagcaagcctcagtgactttatgagctcacttctttgccttggggtgccttgcttcaccattgcgccatcttttatatttgattatg

SEQ ID NO: 55146 - DNA, 880 bp, Arabidopsis thaliana landsberg
cttctcatagaatctcttagttcattcatatttatgcttctctctgacctgtgtcttgtacaggttgatggcaagatggagccacagcagtctgtgtctggatacttgatcaaaaggtatgactgtgatggggtctctggaattcaatatttttactctctagataaatttcataaaataactcgaccttttctccagtattcacacccataaactctcatgctttataggtttttgttgccaatatcggtgatgctaaggctgttttggcacgatcctctactaccaacgaattggggaatcatacagaagcaggtaatccactcaaagcaattgttttgacgagagagcacaaagcaatttatccacaggagcgctctcgcattcaaaaggttagtttttgatgagccagacagagacttccaagtaaatgtgagcacaccatgctctgttgataacttgctatgagtttcacagtcaggtggtgttataagctcaaatggacggttacaagggcgtcttgaggtttctagggcttttggtgatcgtcattttaagaaggtaatgatccggtggcttcccactttatattgagcccattatctgtgacattttagctctcgcgtgcaatattctatcgacatgttcttgaaccttgctccatatcattttgcaacttcgaatgcctagaatctgtaacttatcctaaaatcttatggtttattcgcatctaacgcaagttattgaatctagtttggtgtcagtgcaactccagacattcatgcttttgaattaactgagagagaaaacttcatgattcttggttgcgaaggattgtgggaagataagttatactctttgtttgtggtttttgctttgc

SEQ ID NO: 55147 - DNA, 484 bp, Arabidopsis thaliana landsberg
  unsure (1)..(484): unsure at all n locations
ccaggatgtcattcgcggtcgtgtgaccctcaaacatgtgaaaagtaacacaactttttctactaagcttcaacaacaacacaggcaaatcctatgctctatcgaattgggtgcttcctaacgaaaacaatataccttatcagcaagcatttgctgcaagacacgaacaacttgggcaccaaccgagggaccaacgaagtgcattggatgatcttcattccattcttggttttcccctggagctaaatcacccattttattagctcgagagaccatctaaagctactcaaaagactgcattgagagaacacctaaacgactaagccttcntcacaaaaacgaccagaaagagagtgcccacaagctttactgtgatcttcaccataaggaactaacccacctttcaaataataaaacacggttgtttggctaccacaaaacactgtattaaaaactgaccctaagacctatgttacaacaaaaa

SEQ ID NO: 55148 - DNA, 556 bp, Arabidopsis thaliana landsberg
atcgaacatgagtttccctttctcgaatgggtgagatcggagtctccacaaggctccccacactttggaggttcttgttcgttttattacaatcccaacggcagcttaactccaaatcacaaatatcataacaaattcacacttttaggtcagcgttagtgatacatcctagtacaagaaggtattatgatgcacatctactgggaccactacacaaagggccccatgccttaagagctcccttggcttcaaccaagccagtggcttgatccttagggcaacttgatattggggcactccaaaagtgtgatatctacaccactaagtccctttaaagaaaactaagggtcccaaggcacttcgagccctatggatcccaagagtcgggaaccacacacttatggtgctagttcgcgaggatgaattaaggcttagggaccagacttccctagctagaacaacctaaatccctaggcccgctcatgatacaatgatctaatctaaatcctcaaggcctctcatgccacagggcgctcatgaggggtacgagctcgaa

SEQ ID NO: 55149 - DNA, 710 bp, Arabidopsis thaliana landsberg
catcgtcaggaagcgtgcactcttcaatccccgcgactgtgaagaaactattcaatctatcatcgcctttcctcacaaagagagatgaatgggctggcacttttgagaacatcttacaaatccgaaaggagcctcgaactgattgccccgagacactacctgaaccggttaagataagaatgggagaggcaaatgagaaagctcttttgactgagtttcagcaagagcttgtacaactagctgcggttctaaaaggtgataatatgctcacaacatttcctaaagaaataagcaaaggaatgacagtgattgaagggaagaggtacatggaagatgctatgaaacgattcttagaggctggtcgtatggctctttccatgggagcgaataaagaagagcttgtccatatgaaaacttccctcaccggaagaagaccttaagcttcacttcccattaatcttccttttaacttgtatcacatatctctctttggccatttacttataagtcaaatgctcgataacttataaataaatggattgttaatttgctaaatagatataaataaaatagaaggattgttttataagttatgtggcaaagtaacacttttcttaaaactgggtgcacgaaaaaaaaaaaagggtattgtttctctaataaagacagtggttgtaagataggagttttttagtaggattgaaaaatta

SEQ ID NO: 55150 - DNA, 754 bp, Arabidopsis thaliana landsberg
gaatctctcccctcgagtagctatggatccatattggcggtctagaagttatgttatcgagccacttagagaacgccgaaaagtgagcaacaaagttttctcgcgactcagccatgcatctggttgttgcggctactgcagaagtcgagggaagaaagatgggttatgttgttcaattggttgttagttgtagatcatgtggatcttagatagtggtcgtggaggacgggtttagaggaattgattgaaccatcaacttcaggattcgccacaatttatctccattagtccggattgaagggttcttgctcgctggggttagaaatgctcatgtctagaagagaggggatagatctggtttgtcaggttgtgctgatgtatttgagggttaagcattttgggagatttatagcggtcaggtggctcgctgaaaagggtagatggtggaaaccgatttcttccctcgatattttcaacttatctttattaatttaaagccatggatcttgaatccgccagaactggtgcttccgactctcttccaccgggaaacaacatgatctgatcttcattttttttttgcatcaatttctaatttttccatattgtattttgactatagtcgtcattgtccagcccatttattttttgcgaagcgcattgaattaaattagaatctgcttaaataaaaaaaaattaaaaaaattaagagttttattattttatggttctaggaataacatgtaattttttt

SEQ ID NO: 55151 - DNA, 597 bp, Arabidopsis thaliana landsberg
cagtacttgtgtgcccagcctctctatcccgatatatgtatacacggcctagtacggacccacccggctttctttgtgaggcactttgtacgatttgagacgcggcaattatgacctcatcgtcatcgtccgatgatgattcatccaaaactcgcgatgaaagtaatcggctttgactcataccaaatgttgatatgaactgtaaatacataatgataaacttacgtggatgaattatatatatgtgtaaagaaatagaatcattacgcctatttaccgtacgattgcgacggcggcggcaataggaaggagccctagccaccgtactggaggggaaaagaaaatggcatgcgaaggatccctggacgccgtactgcaggaaaaaagagaaaaagtcaagtagaacgatatttaaatttgaattactccctacatgtacggatctgctggaggcagactttctctctctcgaaacacatttaccaactttgtaaatataggttagggtccttttttttcataactagtgtgggtgccttagggattaaacacagttgatttagcggccttaggccatttggtatcagaaatttagag

SEQ ID NO: 55152 - DNA, 879 bp, Arabidopsis thaliana landsberg
cgcatcgatttctttgacaaaaaaaaaaaaagagatcgaaccgattgattgaaggtgcatgctttttgggggaagtggtaaaaaaaaaaaaactttcttacgtatattaacaattgttgtagctgttgtcaatttttttttatataactattaacttataatagatatttctaaaaaatattaacttataataactattttaaaaaaatattaacatatgctaactaacttttaaaatattaacttataataactatttaaaaaaaatattaacatatgctaactaacttttaaaatattaacttataataactatttttttaacaattgtcaaaaatttgttaaataaccaaagctagtgattaattttaaaattattaatcggcatatgtattgcttactagttactactattatttaggaattttctatcgaagataaataataattttaaatcttaatctaatttaatttataaataacggaatccacttaactcaataaactaataatatatttagatacgaatttaaatgtatgagcatatttaaaatttatgtaacattttttttatgatcatgatcagtattaattatagagagcgaatttttagtatttttttagaatctatagttgttgtttgaaattcattggtaacaaacaaaagaacattacgaataaattatggagtacttccgaacctcttttgtctcacggatctacctaaaatgaagaactcggaagagaattaaattttatagttttataaacaaaattaaattgagaaaatgtccccggaaggacgatgctgaaattgaataatattggaaattaaagatagcaaatagtataataaatgaaattgataagctttcacta

SEQ ID NO: 55153 - DNA, 461 bp, Arabidopsis thaliana landsberg
  unsure (1)..(461): unsure at all n locations
ttcctttcgaattcaaatccgatttcgatttctcttcaatctcttccagaatcgaactcgtaactcctgcgatcgaagaataaccgctccgatctaacaacgccacgaaccaccatctctaaggattcagcgtcaaggtcgtgatccgactcggtcgagtgactcgctgtctcggacgatttagtacaccatgactcaggcggctccgcttcgaacaaatctcctccattgttaatgctacggtggacgaagattacagagtgctactcgtcatgatcacgtcgnnnnnnnnnnnnnnnnnnnnnnnnnttggcaatgtaacagagaggcatacgctagtaagctcgccggctgcgcgtatgagctatagaacagagtttcatattcttattcaccatcgataccgaccagttgtgtgtttcattgtgcagatctgatggtcgggatcggagctagtaatt

SEQ ID NO: 55154 - DNA, 725 bp, Arabidopsis thaliana landsberg
  unsure (1)..(725): unsure at all n locations
gttattttcgtacatgactcctaaaaaatcatcctcaacttcctttatatatataataactacatgatactcacaagatgatatataagattatacaattcaaaaggttcggttgttaggtgatgatactgactttgataagatccatcttggtcttgagttgttcttcatctagtccttgttccttcaactctttaactctttctttgtaaccaattgtaacctgataaataccaataaaaacttcataccgagtccttcaatctcaacatgtatctaaatttcttataatctaaaattgaatctaaagagaatgaaaatgaggacacattaaaacagacctgatcataagaacaatttctgaaaatcccaannnnnnnnnnnnnnnnnnnnnctgtaattgctgcattctaatccaaaccaccatcaatttttcttattcattttctttcaagattcaaaccaataattttaaaaaatggaaatgagatgcagagagagtgagagagggattacgaaggccacgtagcgcgcgttcgacgttgagagcggatattaaagatggagactctttcggtgcttcatcaacggcggtgctagatccaccttcggtttctgcctccgccgatacttcgctggagttctagccggcgaacagataatccgcttcgtgttgatagttggcttcatgggaaagagcacgtgcttggtacgtgatggaggac

SEQ ID NO: 55155 - DNA, 883 bp, Arabidopsis thaliana landsberg
aagtccaactgagatcttaaggtccgatgttttgattctccacccgaaacctgaacaggaccctcttgaataacgtttatcaataacttaagctccctcacaaaccctttagccgcgttattgagagcagcctcttgatcaccttgaccattaaaaacagcatctggatggccgagtatcataaaggcagaaagaacaactctgacaggatacctagacatcttcactgatgtcccagccacattcctaacagaagaaaccttctttccctttctgctcctcagagtactcggcgtagcctttcgccttggtgtggcaactcttttaagaaggtgatcaatattatccaatatggacggttgagaaaccgtggtaacattcttagaagcttctaagcgaatttcaaggcgatcaagcaaagatttaaccgttttaagagtgttcagcgattcaagtagcatcgcaagctgctcaaacggtaatgactcgttaatcttcaaaccatcataagctttcgccaaatccaaagttgtcctcttctgccttacaaagcacctccaacacctaaaaacaacccaaagtaacacatactatcaaaacgctataaaaagaaagcatatacaagaactgcgtagcgcttcattaccttgacagctttctagagagaagatcagcatcttcctgcatcatatcgcaatagagactaatggaatcacgttgtcttcttctctgacgaagaaactccgatctatatctctttgcctaaatcatcaaacaccaaaaaaacgtaagattaagaaacagaacagataagagtaatataataacacatagaccaaaagcttactctttgcatttgtcttcaagttatccctcattttac

SEQ ID NO: 55156 - DNA, 1365 bp, Arabidopsis thaliana landsberg
aatgcatggctcatttttcataaaaaaaaaattatttgcgtaaaatgctccacaaatcttatttttagaaccttagtaatgatgagagatattataatctagttgaatccaaataatggaccccaaatgacaatataagtaaccactaccactaagaatttctttatgtatagaaaacaattaacctagtacttagtttattcttctttttcgttttctaataaaaatgttgtctttttgttaactattgaagatgttgttgtcattaacgtgctattgtagatctcgtcgtctgttcctaatccaactattatagatatgttttgtcaaaatctatataatgatatctagaacttataaacatatgaaaactaagtgacccacatgcatgacatttatttagaattatatcaatgcacaaaggacatttgaacaatagactacgggtccaaatagtcaagcaacacccaagattttgtttcttaatattgtttttgtcatcgtaagattctacaagttacctcctgaaagtttgtggaagataaaaaaattctttttgtgactagccatgatttaaatgacaatataaaatctcgaacttcttatgtcttataggttgaacatttcaaatgctagacagaaaattagttgcgtcatttaaattagttctaacctacttaggtttaatagacataaaaaaacatagcatcttcatatcaaacaactatgtcacttccaatctttctggtgtatgtcacttccaataatatggaacgagttcctcagaaccgaagccaacttggataaggattttgcctcacacgaagataataacacaattttctcgttgcattgtcttttacagtcaccttgctatcttcaagataactcttatcttcgattgcgaaagagaaaaaatatcaaatcaatgggaccagaaagataaacaaaatgagagaagcatgtcctctggttgttatgggttatgcttgacacttgaatatttgtgcagacaagaagagagttgattttgttcacatggattttgttgctcactacttaacaaaaaatggcagtgtttttgccttgaaacacgagacagccaccacttctccaagcattttactataacgccctttgtctctttccctaattggaactacttagtcacactgaaagaaggatctttcatatttccaaaaggatctaccattttaaaatgagtcttttaaaaaatgatgcatctatctttgcataaacctaagaagaaggtccacattaggtggagttgaatcaaaataattctaagttatgcaatttactagaggtaatcatcagcctatgaattaagtactaataaaaaat

SEQ ID NO: 55157 - DNA, 1170 bp, Arabidopsis thaliana landsberg
ttcctttgtgttactatcaacacattgaatcattctgatctgaaaatttcagcttgtgtttcccctttttagggaaaactgtgtgaccaatcacgaaactaacctttacgagttttgaaaagttttttgcattgacaatgattgttcatggagggtgagtataatacgtggctgttaatgagtttgatgtgttattcatatgatatattagggagaagcatttaatggatatgcatctagaaaccactcgaaatgatatgtcgtgtggaaacttccttcttttcttaagcaatggcttgtgtgtattattagttagatgttgttttcatctatacttatttttttttgtcttctactcactagtgtcttccataaagttttgatctttattaatctccaagtacagttaatcagcatttgtgatctgaatttgtcagtgaggaacataaagaactggggaacattttggatattttttctccaagtgaagttaaaaggaacaaggagacaaggtaaggttttggcttttctttatgtttctcactagacatgtaaaagctcaaaaagtttttattcttctcttcgtctttcattgcaggttggagtcgaccaatcattgatcgagctagagaaatctggctacaattcaatttcagatgaggtaaagttcttttgtttccctatagacttggaaaatcatggctcagacatgtatataaggttgtaaagttttgatttttctcttcaggttttcaaaaacacagaagatgaatgttcaaatagcataagaagctgtgaattttcttctttcttttttgtccaatgggaacaatggcagaattgggaaccatgggaaaatttggagccatggcagaagagcagcaagttaaccagatgatcatggataaacaatcagtagaagaatggctatcgcgcgtcaactcgctaataccatccgtcctcagcaaggcaaaaacggttaagaagtttacaggaagatggaagacgatcatctcgaagatcgaacagataccagcttgtttatctgacctctcaagccacccttgcttctccaagaacaagctctgcaacgagcagttgaaatctgtggctaagacgcttagtgaagtgatagagcttgcagagcagtgttcaactgacaagtatgaa

SEQ ID NO: 55158 - DNA, 1183 bp, Arabidopsis thaliana landsberg
tttttaatggatacaaaatgtttttttaatgtgtctactcgaaatttctcatgtttcagacggttaatgttcaaatggagtcgtttacagaggtaaaagcaagagattgtgttgtgttaaaattgtttgatctttaaagacataaaatagttatagttgatctcgaatgtcttgtcatgtttcagccatctaaagctcaaatggctaagtatagagaaatggaacaaaagatggaagcaaagtatatagaaatggaaaataagttggacaatcttgtgaaggtaagaaaccaagtaattgttgttaatacatcaaaagtttgcttctttgattgattttgaagggaggcgattatgtttgatttataatgtcttcttcttatgtttcagttgtctatgactcaaatctccgagttgaaagtaactagagagaagtgttgcaatgatttctggaaatcaagaagtacatagaggaatttcatgagggaatggatcagaagaaacaatctaattaaattaggccttttatgagttgttttctgttgttatgaaaaagtcttttataagtgatcaatgaatttgttgttcaaaaaaaaaaaaaaattgatcaatgaatttaagtgatttcttcttctctgtctctatattcttgctcaaccttgttctatgtatgtttgttttgaccgtgtgtatgaatcttaatgctatctaacttctctttttttttttttttcgggtcgctatctaacttctcttatagatgctaaattgagtagagtccacttagggatagtcgattagatattcggacgcatcaagctttgccaacaatgaagcgatctgttgaacttaaagcaaccaaaacctcgatctatcaaagctgaaatgataaggaatcagttccattgcactttctcacttactaccaaaaaacttatcttgtctctaaataaaagcttcacgcaaatcactgagcttaacactggccaactcaatgtccattatctaatttttcaataaatccgagaaggagttaaagataataatagtaagtttctctgttttgatctttgttgcctttatggggatgtatctataatcaaaggttttttttcttcttttcttttctttctaatgtctaagtgaaaacccacttccttcaccagttcaacggctaacttcag

SEQ ID NO: 55159 - DNA, 688 bp, Arabidopsis thaliana landsberg
aaggataatctgctaccccgaggtctaacgacgaggtttgtttctacatactaattaggctttgaatgtctgtcgttgttagataggcttggtatttgtgttaaaaaatgacacacaaaaacaatctcgacaataaactgcgcatctattgataacctagctgttatgtgtatatttatatacatgtatatcttaacataaaccctaacaaattcccttgacaactaaccctagaaaatagaagttttaaattttatccattaaacatcacctaataattcaaaaatttacaaaaatatccaaatggggtttttttataatattttaccaattagtaaacatattataattttaagcagaaataaagtgaataaatttttactaatttccggaaattgaccaaatattaagaaaaactagaattttataaaaataaataaatatatgtatatacatttttagtttaatataaaactaaataaaacaagtgtattttaaccaaaagtcccttaaatgaaatgattacatcccttattttaatatataatatagttatatagtgttattcaaatatttccaaagctcatgtggattgatggtattcatggaagttttataaattttgaggtgtttaaaatcgctgcagattttaagaaagatttgttcaaggtgctaaggagaagtatgg

SEQ ID NO: 55160 - DNA, 320 bp, Arabidopsis thaliana landsberg
catctaaatctctactacctattaagacggtaaggggtagactgtctcattccgtgttctgccattcctattccgccctcacggcaaagccattcccattcccagctgcttgtctttctcattccgcctccctgcaaagctcattcacattgtcattcccggctatcacgagtctatctcattctcactcctacaaagctcattctcattcacacgtgcatcccacgcctaactaagattaaattctaaatacaggctccaaggggattcgagcccgcgacccctcaagtaaattaacaaaacaggctccccatgtgtat

SEQ ID NO: 55161 - DNA, 701 bp, Arabidopsis thaliana landsberg
ttgtagatgatttaatcacaaactctatccattattgagttgtcgacggttaactacaactcaatgtatattaaatagactaacaatgtttttttttttttttgtcaatttacttcgctatatgtttagagagtgaagcacacgaatgatatcaccgactcaccgtcccgtgattacatcacgccctacaaagaaaacagtcggaagattcatttattaattaatcaatagtgttaaatataagtacaaatttttttataatagttttgttataatcgaacaaaaatactaggccgttgatttaattttgaaagtaaatgtgatggactagtaccttttttctgcataaaatctatccacacacaacaggcagaattgttttcttggatccatgtgccaaaattcgtaaatatctgcaaatagcaaacgagtaaaccgtctcctctatctgctatagccctttaagtctagagacgattaaaatgctacctccaatatatgtggtcgcaaattgatgtaagttctatgtcctacctatagaaatattcggcagccggttttcgtcatttagtatggcaacacttctttgggaccatattttcgtattggtcaacaaattaaaccctaaccaatttctaagtcctttccatgaaaaaaacgaaatctataagtcattgtaaaccaatacaagaatctgttac

SEQ ID NO: 55162 - DNA, 306 bp, Arabidopsis thaliana landsberg
gttaacctcttttcggggtttggggccggtttaatggactttaacccctacgttattcaaatgcaaccgaatctcatcttacttttaaaatccatggggtcaactttgactcctaaaatgggggattctaattaatcttgatccgctaatatacatcgaaagaagccctatcttcccactgaaggaagaatcctttttcgttctaagagctttattatctcaacttccaataggctcacaggctttttgatctgtcctgtcaaaaactgaaaccgtccttcgggaatttttttttgaacacactgc

SEQ ID NO: 55163 - DNA, 500 bp, Arabidopsis thaliana landsberg
gtaattagttgtctgataatagcttgtagatagaaggaaataagtccattgttatagattttactctgttttttaggaagtgaatcaatatctctctctgattctgcctattgtttatcgaaaatcttttgtgtagggaggttcatgaggaagtcaatcaagcgagagaaaaggcaaccgagttaaagcaaaggagacaagagcaagcaacaaatcgtcgggagaaactcaaacaagcttatcttcggaagcagctcgagaaactaaaggctcaacaacaacaacaagaagatgaacaaaaaacttgatttttcgcttcgccaagctattggattttgagttgcggcctgaacgcagagaagacaatgacagagttgtccaccgaacccgaatgagtaatatggctgcaacaagacacgtaagccatcattaagggatgaagctgtatccatatgctcttaaaagcgatttatgtactgtggatttgtgtcaatcacaga

SEQ ID NO: 55164 - DNA, 955 bp, Arabidopsis thaliana landsberg
  unsure (1)..(955): unsure at all n locations
cgggatagtgctttttgccacattatttcttttcctattgatccatgtccatagatgagtgtgatagcttcgacatccaatatcgtaaccaaaagactgaagagcagtaccaagaatatgatcccaccatactctaatttatatgaaaaatatttaattttgattttcataaattttccaatttagaagtatagtaccacaatactaagatctaccacaattttttttgttcaaataatattttttggagaaaaaaacggaacccaaatttaaaaggaaagaggaaaaaacaaatcattcatctctgagctttcttttcttctacagaaccctaatttcatgttctaggtgtctctcgtatggttctcatctcattgatttctcaatctctagggtttagtggttcatccaaattcgtaccctaatgggtgccgtagcgatcaatcgtaaacgcagcgacgaatccttcaatttcattaatcaacaatcaacgaaccctnnnnnnnnnnnnnnnnnnnnnnnngcttccaagaaacgaagattctcattcgctatatctgaagattctggtaagccagcgtcttcaaacccaacaatttcgaggatttcaaggtaccctgatgctaaagctcctcttagacgagagattcatgctcctagtagaggaattcttagatatggtaaagctaaatctagtgattacagcgaaaaggacgcaaatttctttgttcgtaagtatgatgatgcaaagagatcagctttggaagctttgagatttggtaataaaggtaaagactttgttgatttgcgtggtgaggttgaaaaggaggaagttgtttctgatgattcaagtgttcaagcaattgaagttattgattgtgatgattgatgaggagaagaagaatcttcagccttcgttttcttctggggtactgatgttaagaaggggagaact

SEQ ID NO: 55165 - DNA, 1030 bp, Arabidopsis thaliana landsberg
gggtacaccaaaatcatgtcatatcaaaaacacaaagaagttgttgctttcattaccatttataccaccaaaggtaaggtcccctttttgctgcacacaaaaggcctaacgtgcttcttagactttctcggcttttccgcaaaggaaagtccttctgatgcaactttttcaaggataacattgtctccaatcgacctaacaagctcacaagctttctcctgtacacagaagaagtttaatcgtgagtcttttgtaatccaattctaaataaaacagacaacctcgaataacatatgaccccgatagatggaggtttaaaagcttgagttatctacacacctgtcgaagaccacgaactccctgagagtagtcactgccaagcaaaagcgctagagctatctgtaacatcacccaagaaaacattgtatacatgaccttaccatttgatgaaacatagctaagattttaaagttctttgacgcatggaataatagtcaacactcaacaatgtgtagctggttttcttgtctactgatgctaacaaaggaattgagcccttaaagctacaacgttgcagtagaaccattcatacacatagtatctatctcacctgagtttataaaatatcaaaggccaccttttgcaagcatgcattcatgcttctaccaatctaatcattttataataacgtggtgcagctttatagaaacgaaagatcagggttaagtatataaagctaatcacttaaagaggtttgttaatttaccaatgagttccgtccaagcccaagctttttcttgatgtcatccatctcgcagcaaacaacataacctccttcacctagttcattggcaaatgtattaggacttataatactattaaccatatcagacggtaaaagaaaccaacacactaaagagtctctttccactcaccaaggcatatttctctgtatacagactttgcaccaaaaaggaagatatgccaatcataagctaaacaggcgttctatggatgaacattgaatatt

SEQ ID NO: 55166 - DNA, 785 bp, Arabidopsis thaliana landsberg
gatgcctgtgattccgatatccgcactgcttatcgtaagctttttattgttcttactctctgaatgactctattcaatcgccgtcagattttttttgactttgaacgcacaacttttgttgtaaatctgagaaatttgccgattttggcagaagaaaaggcatccggatagatatgctcgaaatcctggagtcgccggagaagctaaacgtcggtttcaacaaatccaggaagcctattctggtaatttcacattttgttttcaaaaatatcgtcttattaacgtccgttaattattgtcgttcttttttttaacgtccgtctcacgtaacaataacgaaactgttcatgatctgttttttttttttcttacagttttgaatgatgagaataagaggtcaatgtacgatgttggactatatgatcctcatgaagatgatgacgatgttcgtaacacatttctttgatttttaagctttaggagagcttaatcacgacgtcgtttagtgatttgcaaaaacttggcaatattgatgatatattttattaacagctcaaatttaatttacgaatttactattttcttcatctcatatttaagtttctgaatttgacccaattgttgtgatttaggacttctgtgatttcatgcaagagatgatctcaatgatgaacaatgtcaaagacgcggtatgccctgttctgtttaccggttataattgtttagtcaatttgtatatatgatttggattttgaccggttagcattgtttggtaaattcaattt

SEQ ID NO: 55167 - DNA, 212 bp, Arabidopsis thaliana landsberg
actgtgccttctgtctcgattgcttcgccagcattcttttcgggttaaagcctcccaaacaccacatcaggcttgcctaattaccattgtgatgggggccgctcaacggaggcaaacctagccatggatgcatacgtaacccacctggacgggtgctggtctaatgaaagatcacgatgagcacgataatacgtgctagacctccaaagagt

SEQ ID NO: 55168 - DNA, 510 bp, Arabidopsis thaliana landsberg
cacatttctcttagtaatggagggtaaaggaagagttggatcatcatcgtcttcttccttcacagctcatctctttggccccaaggaaccttcctcctctgccaacttcaactccattttccctccttccaaggttcgattattcctctatagtttcttctgttactttttatgatggattcttgaaattcattcttcctttctcatttttttcgtgttttcagggaacagcaagaaacatcctaagctccaaacatgggtccctaggtcagtggaaaagtcttaattaagcctcagaaaacttgtctcccttcttgaatcaatatggttcctttcactttatattaagccaggttttactagaaaaacgttttgattcatctaaaaaaccttctatctcatgccaagaacggctcaaaaattcttcatctaagattcaccgttctttagtcaagattactatccaaatccgggtggtctaatggatacattatctccttggttttcctg

SEQ ID NO: 55169 - DNA, 268 bp, Arabidopsis thaliana landsberg
tagggacaatttgtgcaggcgcaagtggtccgcatattaacagacatgtctatttcaccgaacctctgtccgagagagggcccagatctgtacgccttgggcgcaggttcgatcttacccatacaggaattagactgcggtaagacggctatagatgcggccgctatacaccgcggctgaatacgggtgatgcccggtgatgacgttaccaactgccttaaccttgcgtcactgggctcgcgtgaaccaccatacatggtcttactac

SEQ ID NO: 55170 - DNA, 330 bp, Arabidopsis thaliana landsberg
gttccgattcgaggcctgctaagaataacaaagaattagtcttgtttgttttgcaaagtcttcatggtctgggtcatgagttacttccagcccgggtcctattatattagactgcgtggctgctctcacagaagttgcatctccggctcttcttggacatctccttggaggtctgtgactgagaaccaaatgtgggagagcgcgcagagaccaaatgttctgacgcatgctcacgaacagcatcgcgggggtgggggaataagacaaaagcctaccttgcctgatgctctgtgaaaagaagaaaccctttctaagacagaacatccttgg

SEQ ID NO: 55171 - DNA, 951 bp, Arabidopsis thaliana landsberg
  unsure (1)..(951): unsure at all n locations
accttaagaaggggacgcaagtagaaatctccagggaataagctatcaaacacaaagagtccaccagcgccagaaatggaattatttcttgaaccatgatcgccacttaatgataacaacagcggaggtattgatgactcagcattgtcctttgagtttacacgcacagnnnnnnnnnnnnnnnnnnnnnnnnnnnnnnnatatggtcctaaccttttaatatggtagccaggctgcatgtgcaagccagattaggaacacattatttcaaaacaattgaatgtaagtgagaattttagtgtaaccaaatgcatgagatttaacctacgattagaaaagctaagaaaaacatcatctcaaggtcaatttacatgcacatgaaaaatatatcagtataatatacaccaacctttgaagcttcagtggcatatggtatatcgtcatacaaaggcccagcaacaaatgaaccagctgatgaagtgcttgtttcaatagctatttcccctttcttaagtgaagaaataaggctgtcttttgccgcagaaatcttaatattaacaccaggaagaggaggagagactgatccttgtatgtaaagaccaagccgaccagtaaatggagaaacagaagcttgacatccatcttttgacactacagcctattaaaataaacatcaattaagcttgatattccattctagaatcttttgtggctagcaatacttctagttaatacttacatgaatctctctagggtaaaacaacatcttcttctctacattacccctgaaacagaacatagatattgctgaataacttgaaaaagactaatagcttcaataataatcttttggtgtttgattttgaaaatacgaatttctcttctttgagttatgatacattcctaagaaaccgaactttaaaaattaaaggctatttcaagctcccctga

SEQ ID NO: 55172 - DNA, 503 bp, Arabidopsis thaliana landsberg
acggggtgcagaagacgctcgagatggtacacaaacaggctcctaaggagctttttcatctatgttcttctctaaacccacagccatctcaacttagatatcttcagctcatttcttgaagaaatttaggctctgattggcctccttccgacactcctcttcttttggattgcttgattctcagagatctcccacattttgaagggaaaaaaggttgcagacccattttacgtgtttatggtcaggaccctaaagcccgaaccaacaggagttccatacttctcttctccacactaaagacaaagaaacacactcgtctctaccaacaggtacttttcagaccattgttatcatcacactgttttgtgcgaattaaaaacattagtaagggatagattaaaaccttatgagttcttttggcaattaattatacactagttcaatgcttctctatagaagaaacatgcgcaaatttgtgatctcatctgcaggaagagtgtttc

SEQ ID NO: 55173 - DNA, 612 bp, Arabidopsis thaliana landsberg
aggacccctcggaattgctcgtctggatgagcggtgcgtcggggagttactccaatggaccagatggggcgcaggcggtcttcatgttcggcccatcggtgctcggcacgccgaaactgccgcacgaactcggccattacttcggcctaccccacaccttctctctgccttcctcgtccctgaaccctgagactggcgtcgccgcaactcgcggagaccggtgggacctgattgacggtgaccgcgtcggtggaaccggtggtttcaggttcttcacctcgccagcggatgccaacaactggacgagcagtcaagtctacccgatcgatcgaggcgacggaaaccgttcgttcgactccagcggacgcattacctgtgtcgtggccccctccccagcgtcatcttacaccgagacactgagtcacaacgattccaggctcatcgggaagaccacgttcgtcacgaacagtccggacaacccaggtggcagcccgccctcgctcaagtatgggtccaacatcatggggtacattggccccaacggggacaatccgaagtcgctcagtccgtcacaagcgatgatgattcgacggacgctccggtacgacgttc

SEQ ID NO: 55174 - DNA, 606 bp, Arabidopsis thaliana landsberg
tcaatggaatggaccaaacagatataaggtttggacttttggtctcaatcacaatacgccaatcatatgggaaccaaagacattaacagaagccgattggccaaacttagtggccaaccacatcatcatcaccatcgatcgttttcaaaattatttttcttccagttttaatcttcttggggaaagacgatcaagcccctttgacttgaatatacacaagaaggtcaacgcagagaagtattaattcagtaaaccagcataatcggagaaaagggtaaaagaaaaagaaaaacaaagggtgcccccaaatttgatggctcacatgaagaagtctcacatatgggttcatggcccatttaaagccgacgacaatgtcttatccttcattattactagactaggaacctggactctgtctgtcgattaattttgttatcattatcttaattcttaagttttttttttcgcttgtcgtatatttattacatagatcttatcaatccggatgaaacaatactcttagtcaaaaatatccataaagtggtgagtgttgtgttaatagcttaagaaacaccaaaaacgctttgcgcaacatttggaatgacg

SEQ ID NO: 55175 - DNA, 507 bp, Arabidopsis thaliana landsberg
cccggctgctccccgtatccggggtgctggccgtagggctgcccggggtgctgaccggggtgctgaccgtagggctgcccgtactgctgctgctgcccgtactgtccgtactgcgtctgctgcccgtagggctggccgtactgctgcggctgcgggtattgcggcgggtactgctggtcagcgcccggctgcgcactcgtggggttgaagatcggcgccgtcgcctcaggcttcgcgtcggccgattcggtcgccgactcaggggctgattcgggcgatggtgcgggcgccgcgtcgttgtggtcgggatcgttgccggggtactcgctcatggcttcatcctgcctgaccgctgccaagccaggcatcgacctgcgcaatccagcgatcacgctcactctcgggtgcccgggaggccagcagcgaggaccgggccaggtgggccagttcctggtcatcgaacgcgtgcacctgtcgtgcgatgtcgtactgcgccgcgagttcgtc

SEQ ID NO: 55176 - DNA, 888 bp, Arabidopsis thaliana landsberg
cgagagatttgtttaaaggttgtgtgtgtgttttcgcgtttttgttttgtcaggtcggcaagatctttgtcgagtagtcatacaccaccagctggatctgtcttagctcagagaatggctcgtggttacagtgaaccaactcttgaagagcccttgcttcctgaggatgtcacgcatccttccaccaaatcattgctttgcgtggttagccttgtccacaatgccttgtttggatttcacaatataaagcagtttcattatgatctaaaatttgattgttctcttacaggtctcggtgttcttgtttcttggaacattcaaccttcccaatttgctaagtgaatcaagaactatggctttgggtgagggagatagagtatttgtagttcgagcagcaagaaagcttttgcaggtactcataagtcgcacattatcatatatgcatgtcgagtctacggtcttcagtgaatcactcacgctcttttttgtcaaaggaatttctggttactttttcttaatctataaaacaacttcatgttaatggaagttgtgaatactattggttctatttcaggtcactagcagcaacgtagcagaacatagcggtggagaaagcagcagaattggaatgtttttgggttgggcaatggcagccatatacatgggtggaaggcttccccaaatatgtctcaatgtaagctttttaattgtctataactagtttattctttcgatctatcatttatagcagttttagctaaagcaaagttccttttcgatatctctttttttggcagatgaggagagggcatgttgaggtaagcaagttaaatgacacgacgcaaagatacagtcaagtaacagttttgtatctgatgaatccatttg

SEQ ID NO: 55177 - DNA, 573 bp, Arabidopsis thaliana landsberg
tgttcacttaataagctacgaaatcgtactactgtattagtaagtgtattatattctatgatctatcatatgtggtggtgcatagttgcgtattgtgttgcctaggtgtcgcatttacatgaactaatcaaaagatagtggagaatggagattatctttggcatctaacatgtgttagaggaaaagctaagttattaattattgtatatcattttctttgtgttgtcaatatataaaaagagtcgaaagtctaggctttataccagtagtactgctgagatttttaaaataatagtaaaagagatcgaggagtaatagtttgacgtgacttgatgatcacaattgcaacgtccgtatagatagatatctttcttttattgataacaaatgagttaatggcacaaaactacaaaagtagcgtgaagggacggcaataataatgtgaatgttgatgaatccatcccccgggaccattccacgataagttcagagtcgtgcccaaattattatgtactatatatacgacatcatcaatgaaaaagtgttatattttagcgcggaattttattcgat

SEQ ID NO: 55178 - DNA, 563 bp, Arabidopsis thaliana landsberg
tccctcctagattgacggttgagatcagatcttgtgggtgagcgagcacgggcgcgacgcgcacatgacaggcgagccagttgggtagtggcctaaggccagtggggctaacacatcgggcctagcggcaggggcgcgtgtgaggggaaatccgagcgatcggatcccaagcgggtggtcgggattaggtttgatctatttaaatcctggccatctgatctgagatggatgccttggatctaatgtgcagcttaagcaggtctccctggccgtcagcggtggcaccgacacgcccatgatggaggccgctggagacgagggcatgggcacgctgggggccctaggcaccgggaaggactcacggaggttcaggggaacatggcgaacgtggcgtgggcacaacacctgcataggggtgatgaagggtggtgatccacgacgaggtggctcgcgacacgactgtactcctatgagcaatggtgcacaaccgagggcaggaaagggaaaattagggtgggggaaagttgtatactcgagggtagactcagggaccgttgaatggt

SEQ ID NO: 55179 - DNA, 514 bp, Arabidopsis thaliana landsberg
  unsure (1)..(514): unsure at all n locations
ttgctgttaaactcttctccttcctttgtcagaacaaaaccgggccatttatcactagcattaacttcttcggattgagctaacaaaaaatacaagttgcggtagacatccagataggggtcggaactgcaagaagtttatataacatccttatgtattacaacttcacatatattctaaaaataatatattccgtttttggtagtgaccgaagattctctttagtggttcatcatttttaacgagaacaagaacaatattctaggaaacttattcatcatacttctgcttgtcacaaaaatcaaacatgtgaaatttatagacacatttagatctagagatatacataaacattcatatcatcctgcatggttatctctgctaaacaatatattcttgattatgcaaaagaatcagctaaacgatatcagactatggaaggtatttttggcaagaggaatccataacangaatgctttgacatacctgtgaagcagtgatatcttgtactcac

SEQ ID NO: 55180 - DNA, 505 bp, Arabidopsis thaliana landsberg
gacatgcactgttgtggccttgcctatacatgggtgcttgagatccaaactctagggcctcatgcttgcacagcaagcaatggtcgcctgggtcattctctaagcaccttctatccaatacccccccatcccttaacattttcacaccagttgtcactcttattctgcacagtgtcaaaatgtgccaaacaacagcctgttaactgtcttttaacacctcctccatggttagctttggttagaagatggtgactacagtatcacctagattctttgattgctgactagacacacagaggaacaggaaaccagatgagatgtcaatgtttgtattgaacttctagaggttaaaatgcataattcaggaatagctgtccagggaacatcagcaaataccacctgtggacaagaaacacccagtgacaggccacaccccatttaagcacaatcagaactaagccatattagagactcttaatgtaacattctctgtccaccccacact

SEQ ID NO: 55181 - DNA, 657 bp, Arabidopsis thaliana landsberg
tgtccattcgaataactcctttgcttcttgataattattttgctcatcgttgatagatagtagaagcttctcacatttgatatctgctagaagagcataatcatcaaggtagcttggacgttgtacttgtcttactgatcttcttagatccggtgggttctcaacaaccaaatcatcattagtatcatctatgttattactgagatcaacatgagactcgtcttgattaacgtctttaccatcttcgtcttcttgagggatgttgtcagtatcttgttctttttgaccattaccattcacatatggtccttgtccttcatccatgacttctccctaaaccatacgaaacatccctgaggtttatctgaattgtcatttactcccttccaagtccaactatccttctcgctaaagaacacatctcggctgacaacaacttgtctagttgttgggttatagagtctatacgcttttgatcctggctttatcccaaggtgcactatcatttgagaccggtcatcaagcttcttcaagttcaccggctcgatcttagcatgtgcaaggcacccgaacactcgaagatgattgatagtcggtttcttgtttctcaaacattcataatgtgtttgatcttttaaagctcttgtatgaactcga

SEQ ID NO: 55182 - DNA, 492 bp, Arabidopsis thaliana landsberg
  unsure (1)..(492): unsure at all n locations
aacagatgtaggaggaaactgaccttctgtatactgttttttttttagaccagagagtatgggcatggttgcgggattgatttatctggtcacgatgtttgttttcatcccatttccattcatgaagtggtttactgatggtaaccaggaacttacgttattgacgttcccatatttgaaggtaagtagtcagatttcatattgagatccgtgtaccttacgcatcttctccccctgtatccgaaactaaccctgaagcatttctcgctaacgtctttattcttaagcttgcagaactgctgtcggctctgctctcaatccagtcaatggtgtttttaggattcgcagatgatgtactcgatatccgttggcgattcaagatgcctctaccagcaattgcctcgatcccattgctaatggtgtactgggtgaacgcggnggtcacgtacatcgntgttcctatcccattgcgttcttttcttggccatttga

SEQ ID NO: 55183 - DNA, 704 bp, Arabidopsis thaliana landsberg
tccagaaacattgcacaaataatttaagagtctatagtactttaggcaagaaatcgatcaacaagaatgccaagtgtaaaatatatttatttcttaagatataccaccaatcatatcagatattcagatcccacaatttcaaatacaaaactgcagatattttcaaatacaaaaccacagaggtcttagattagacaaagcaaaacaaagatttagaaacagaaaactgaaaggtataacttcatctaacaatcatttgaaaggaaaggaaataagaaaatatagaaatataacctctgcggttgtccccacactggcatacttaaactgagccccttctctgtaaacacgaatctgaagataacaggatgacttttagatgagtaattttttcttgtagaaaagaaccagatatttagagaatccaaaacaagcaaagcaaaagattaagtcacctaccacacctatcgtagaaggagcgttagcttggttcaaagctctctcaacagcagccaagaaactaggctgaatgattctaagggggagtgttgcctcaggaaatagaaccactcctgaagtattgcaaagcaccagtgtcaatgtcttacatacatatttgagttcaaaaacaatagccggggatatatgactcatcttacatacatgtcttacacaaattggttaaagaaaacatactttttgca

SEQ ID NO: 55184 - DNA, 890 bp, Arabidopsis thaliana landsberg
ttgaaatcatcagatatctttagaaagaagctgttaacaaattatcaatcattctttttcttctcttctcatagttttttattttttttggactagttctaattaatctctattaatgtaaaagaaccgacgaaaaaatctacaaagctataacaatttatttatttatttctattaaataatcatgtatgtgtttacatatgtatactctcactcacaaaatcattacattacatgcgtatgcatgaagattttgtatacgtgaaatccttacgtatgctaataacagtttcttcaaaaaaaccaaaaatataacaactcaaaattacgatataacacttttttcatttttttctataaaaatcaagcatacccacaatacccgtactcgcatttaaccccggacgcacatttcctagtgcatttcccacaatggttagggttaaagttaacgtaagtgcaaacgccaccgcaacaacgttgcccaaaaccgcatttgtgaccgcatcgaccacaattgttcctatctcctagcacattccgacaatgcttcttgcagcaatgcaagaggctcgtccctttattcgcttttacgccattgcaaatgttgtaactctcgacgtgacatctcattcctttcttgatcttcttgtagtgggaaactagtagcctagttttggatgaaattgtcacgtttgaaagtatcgagggagtttcgtcgagaatgtagtactccgggtcatcttcttggtcgacaacttcatcggctaaaaccgagttagacttagatgttgctattattaggaaatagaggatcaatgagagaagtgaagtggctttaatgaaagtattagggatcttaatgaccattttgttttgagtaaaaagta

SEQ ID NO: 55185 - DNA, 1164 bp, Arabidopsis thaliana landsberg
cggtattatgacactgacatagcgcaatttcttactatgaattgaaatgtgggagaatggaggagcaaggggggttgttgaagaggaaattaaggcagccctatcaaggagaagctttcaatggtaaacctaccaaaaccgctcgctcccacggaaaaaagtttcaagtgactgttcaacaagaaatctcaagattactggtatgtaacaaatgctccaactcgatttgtgtctaatttcactcagtgtttctttttggtaatggactgacttatttcattggaactcatatacagggtaacttggggtgggcatatatgcaacaagccaagtacttatcggccgaagcggtatacagaaaagcccagatggttgagccagatgctaacaaatcgtgcaaccttgcgatgtgccttatcaaacaaggcaggtttgaggagggaagattggttcttgacgatgttctcgagtatagggttttgggtgcggatgattgtagaacaaggcaacgggccgaagagcttctgagtgaattagagtcttcgctgccacggatgcgagatgctgagatggaggatgtcttgggaaatatcttagacgatgactttgttcttgggcttgaagagatgacatccactagttttaaatctaagagactcccaatcttcgaacagatctcgtcttttagaaatacattagtttgctagttaattcattctgtgttttcttgtgtatcatcatcatagctttgctgctttatagttttgatgagttgtaaatatatgtttctctttagtaactttgtacatacaacaaataatgggaacaacttcatttaagctccaagtttttgcaaaatctctcaaactccgataaagtgagtatttttagcgaaatagaatgaaaaccatgaaatctctagaagttgccggttcagttgatacttacgacgtacgagggggacagtataaactttatggctcactcgttttctggataggttaagtctggttcgcgaattttcttttgtaaccacgttcttagaccggttacaagcgtggttcttgaaatctatcgaaaacacacccgccatatacaaaaaattcaaattcggttaaaattaaaccaatcataaaatcccatagattttgttctatcaccggt

SEQ ID NO: 55186 - DNA, 472 bp, Arabidopsis thaliana landsberg
actcttcctttgttgaacaaagacatcatttcaccggcctgcgcatccaccgggttttgtatccatgattcctcggcatctaccaggatggctacgttatgcacggcgccggcttccgcaatggcaaatatgcggttacgcacacgggtatattcctgcgtttccgctgctgtcagggtatctccgcgatgcactttttccagcagctcaaacctggcgaagcccgttattttgatggcaataaaaggtatatcgggccgggaagcggcatagcggatagcgcgtataaattcaggaacggccgcatcgtagctgtcttcaccttccattgcttccacgccgtagtccagcactacgcccacgtggtagttgcccagctgcaaagcggtagtggcggcttcttccagcgtttcgccgccgcagaattgtgagaagatggtgtttttaatgatgcctttaatgggcaggccca

SEQ ID NO: 55187 - DNA, 583 bp, Arabidopsis thaliana landsberg
gaaatttcacattctgtatatgaatgatttgggtttaggacagaacactgaacacaacttatagacttagtaaactgttaaccaaaacatgtattaaaaagttactacagacatataatcagagagataagatcaacttttttggacagaccaagactcacagagaagagccacaaaaagggcaaaaacggaactcaggctcaacaacacgatcacagaatcgacacgtagctaaagaaactggaggcggtgacagagactgagggaagaacagatcacagtctctacaatgaagtagaggatcttttccaggccatctccagacaggaacgaagaagagctttatgactttgtcgtactcgaccaaatcggcttgagaaccgcatcttatgcatgttccggcgccggattttaggacttgtcttacttgttgccctaatccaccgacgaagaagaagaacattttttttcgttttattcttctcgtaaccttcgtaagagttcaataaaagtatctgtttaagatttcgttttaaggacatcaaataaatatagcaatagagtttttaatgtaaatgtgatg

SEQ ID NO: 55188 - DNA, 419 bp, Arabidopsis thaliana landsberg
gtaccaaattaaatgtcataaggagtctgattcgattattcccttaatgaaagagtcacctacttgatgctctactgttatctacgagcatccaacattccctagatgtacaacttcaattgtttggactttggaggatctcgaaaataggatccgagtaaccgaatattcaaatgggaaaaagatagccaatcgtatacgatgtatatcacataaattctgattttttttattaaagttcaattttctatgggtttggccattttttgtatgatatgcaaccatgttcaacaaattatggcctctgttctcttgtttgtagagttttcctcgttaagctgttttagacttctagttccatctcaggatctagcttttcaatattttaaattttagcaattttccttaataaatatata

SEQ ID NO: 55189 - DNA, 615 bp, Arabidopsis thaliana landsberg
ccatcctggaataatttaaggattgatgaattacctttaaaccaattcaatcaagaaaagttcctgcttttgggctgctttgtgagttggttccactggcgtaactacccccggaggcgatgcggggcgaggctgggggcagccgactcaatccttccaaatcactagaaggcaagttcattcctcttgtgtgcgcatcattatctaatgctaaggactctacaagaatcggttaagcttttcgttttagtttgatcggagttcggtaccggtagctaaggcaatcccctctcctgtcctgtcctgtgcaagaatgaggaatatcttagcttagtatagacacgtgagtagctaacagaactgagtaaccgactgacagacagagtaggatgagggattgatgtctgtctttgattagcaaaagcagaactcttataggaagttgactgagcactctcataaaactggtagggagattttttgtggtgttctaggaaaatgagccatgatcatgaagtgaaaagcacgtggtaacaaaatcgaatgaaaagtacagcctatctcgattaactgatcgaaacctacgcatcatgttttcgagtcgccaggtgttta

SEQ ID NO: 55190 - DNA, 1156 bp, Arabidopsis thaliana landsberg
tttataagatgtatatacatagtatataactaagacactaaagattatgctttcatttgaaagtaaactttttataataacatgtatacgtcaagagaatacaataatgaactgaacaaatttttgtctcacaataaaaaaaaaaacgaaattacagcatgcatgattcatgtataactactttatgtatacatctacttgatgagttcactctcgagtaagcttgcctcaccttttttcacttgggaataaaaatataatattggtctcgatcagtttttttttttttttcggatacttgtgacacaggttacactttaactgttccatgtcagcaaatcaattaagattatccatgcattgtccttggatacaatgttataactctctacgtacagttccaaacttccaattcactaatatagttatagaaagtgcaccagaaaccgtcatatattttatttgcattcgattaatatgtaaactatgacaagcacctgcacatgcatacaatgttataatttaatctctacgtattattccaattcacgattgtagttacgttgtagaatgttcaccaaaactatcatacaaccaaaccacaacttattcaaaaacgcatttgaagctacagtgcgatcagtgaccaagtccttgtgagtctatagaagagcttggaagcggaggaggttgtggaagtgaggatgaatgtttacatcgggagtagatgttgcaaggctttgtaagaaacatagtgattttacttggcccgacacttgatcaggagtgggacggctgagtgtttttctgtccactttgctgcgacgtgctcctggaagtagcaattttgttggagccttggtgctcatgttgaggggttttttgtccacatgcgctgcgacgcagatatggacaatcatgttgtgtttgggctcaccttgacgtgtctaataaacgtttactcgggcaaaactcataagtaggtttatcaccaataattttatgtggggtaactttgttttttccagttactttaaatgtaaatatttaatacttataaagtgtttatcactacacaaaattttcaaaatatcgaatggctaaaagtctatatttttttgttttatacatgcgtgcttaatcaacatgtaacaaa

SEQ ID NO: 55191 - DNA, 1505 bp, Arabidopsis thaliana landsberg
atttagtcagttgtcacattagcaagaagaagaaatttcccaagaaagaagcagagaagagtgctctgttctttgacttgaatagctctttttcttgggcttcttgtcatgggccagagtgagttagcctatctgaatagggttttctcagcttcaatgaaaaaaaccgacaaactcaacgcgttaccggtaatattttcacaaagcattaagcctctttatttggagaaaaaattgaccaccgatggttgaaaaaagcttctagctttctttgtgcagtctcattctcgaggtaccactctgttttttttccttttttgtttgatttgctgatgttgtcattttcatttcactattcaagtattaatcatcgtacgattacatgttcatattaagttgattataacttgcaatagtatcatcttactattattcgcagtttcttgtctatgcatgcacaagggtccacgttcgtggttaatttcctgcaaccaccatgtgatgaaaagaccttacatttatattgcgcatttcgcttcactgtaaccagctttcgtttattgacttgtagaaaacgagttttgaatattgagaatttcggaagctatacaaactaaatgtgtttatgaacagagaaaaaaacagagttataagaaagaagacagttgagggaaagtttattagcttccacgtggttgaagaacataaattcgagctgttgctattataaatagacatggtttttgggagatgaaatgtcttgatcaagagaaatggtcattgagtggaaaaaaaaaaagagtcgtacgaaaaacaggacaagtcaagagttttaatagattctctttcacgtggttgaagaaattaaagattctataaaagaaggagacatgagttttgggatatgagatgtctggggcaatacaaaactctgagaacgactctgttctttttaacagttgtgtaagaaaacggaaagttttgtaagagacaagacagctcaagggaaagaagaggtaggacaagagtaacatggagttcatgtggtttacatatcagacatgtcttagtctttagctctaggcaaaactatcctaacgactctgatttttttctcattttcaaaatcatttgttatgactaatctccttcacagaacatgcaagccttttcgacttgacaatgacgagttctacagccaaaagggtctctctctttctctctctctattgcctgttgacgtaatcatgagatctaaatggtcaaaagtttaaaaggattcaagacaacatttaatgtgaagactaatggagatcagacgaacgttgaagagtattgaacaaagatacagtttgctgtttcttgatcaacaagaaagcagtgcatgtttttttgggtattggataaagtctaatatatttttgtacagggtttctacaagacatcaattaccataatagaacatggtacatggttagtaatattatgatattaaagagaatcta

SEQ ID NO: 55192 - DNA, 1069 bp, Arabidopsis thaliana landsberg
ctatgtgcgttatactaagtcgatcgattggtaagtctcgtaatgatttattaaacattattctatttggtgtagatttgggggttttgtttttttttttgtcaaatgtaaatcatttaattttaactccgttacaattttctaactaaaatttagtatatgtatcttcgatactgtgaataaagctggtggttaaaaaaataatactagcgtagcattaaatttataattcagttaaacaaaaatattaatatataatgtaccgacaaaaaatgaaagtgaaaataaatggaggatgttctattttgcaactcattgagtagtcacaacatgcgttggagactcttccccatcaagaatatattactttacacgtttttaaaattattaatttacccccttttaataattgatttttagtaaaatgattgttcgtgataaaatatactttaaatttttgatgaatggaatcattcattgtttgatcgtttacatttaaaaaaaaataaaaattatacgatcacatctttttttcttatatatagtttttaagatcatatatatgatatatcatcacaacaaattgatgtctagtacgtaccaacaagtatgctctgttacttgtaaagatgatcaaatgctcttagaaacaaaacattgtactctcaaaacaaaatatttaccatcatttgatactgtcaaaacaattcttatatacttagtactaggtattcggctagcatctcactgattctagaggtcatctattttctcgaataaaaaacaaatataaactcatcataaaaaggataaatctgaattaattcatttgtacaaagtatagtcttggtctaacaaaacgcaaattcccctatatatgtcttgcttatgatgtttagggacttcactaatccatcttagctataaatagaaacaattttttattataagtaaataagtatttagcatgattgtagagcgtaattttttcacttatacgtagagccaaacatacaaactgcttatgaccgttaaggtatgatatgatagtattagacttgagatcata

SEQ ID NO: 55193 - DNA, 949 bp, Arabidopsis thaliana landsberg
aaaaaaaaaaaaaggaagccccccaaaaaaaaaaagggaagaaaaaaaataaaggcgataaaaaaaagaaaaaaaaaaaagcagaaaaaaacaaaaaacgggaaaaaaaaggaaaaaaatagaacagaaaaaaaaaaacaagcaaaaaaaaagaaacaaaaaaaaaaaaaaaaacaaaacaaaaaaaaaaaaaaaaaaaagaaaaaaaaaaaaaaacaaaaaaaaaaaaaaaaacgaaaacaaaaaaaaaaaaaaaaaaaaaaaaaaaagaaaaggaaaaaaaaaaaaaagaaaagaaaaaaaaaaaaaaagaaaaaaaaaaaacaaaagaaaaaagaaaaagaaaaaaaacaaaaaaaaaaaaacaaaaaaaaaaagaaaaaaaaaaaaaaaaagaaaaagaaaaaagaacaaaaaaaaaagaaaaaaaaaaaacaaaaaaaaaaaacaaaaaaagaaaaaacaagaaaaaaaaaaaaaaaaaaaagaaaaaaacaaaaaaaaaaaaaaagaaaaaaaaaaaaagaaaaaaaaaaaaaagaaaaagaaaaaaaaaaaaaaaaaaaaaaaaaaaaaaaaaaaaaaaaaaaccaaaaacaaaaaaaaaaaaaaacaaaaagcaaaaaaaaaaaaaaacaagaaaaagaaaaaaacggaaaccaaaaaaaaaaaaaaaaaaaaagaacacaaaaaaaaaaaaaaaaaaaaaaaagaaaaaacaaaaaagagaaaaaaaaaaaaaaaaaaaaaaaagaaaaaaaaaacacaaacaaaagaaaaaaaaaaacaacaaggaaaaaaaaaaagaagaaaaaaaaaaaaaaaaacaaagaaaaagaaaaaaaaaaaaaagaaaagaaagaaaaaaaaaaaaaaaaagaaaaaaaaaaaaaaacgagaaaaaaacaaggaaaaaaaaaaaaagaaaaaagaacaaaagaaaaaaaaa

SEQ ID NO: 55194 - DNA, 1163 bp, Arabidopsis thaliana landsberg
tttcatagtcgacatgtgttatacaagaggctcagctttgggtggaggagaaggatccgatcatatctgtcgccttctctcacgtgagatcgataacgtgctgggcttaatatattgatccactagtatgtgggccttgatatatggcccactaatggataagagtgagaaatagtgaaagggcacaaaatagctcatcccaattcccaacagctttcttgtctctcccgtctttttaaaaaaaacataattaattctccattttttctgttcgtttgagttattttttttcctacggtaaaaagacaataaaaaaattaaaacggtaagatttatgtttgtttatagattaattaacgatcttatgtaataaaagtaggagaaattcttgttttttgcctgcgaaatttgagttttcattgttttaaaaaaagaaacaaagaatgtttaatctgggaaaaacaaacgtttacgtattttgataaaagtgaaaaagtggtagttagaagaaaaaagaaaaagagagcgatgttaatggcgatgagtttattgggatttgttatataaaaaacagattgaaagataagagaagaagagagagaggtacctcttgcttcttctttctctcacgcacctctttgaagattcttctcttaccttttggattcgcctcttcttcttcgattttgagtttgattctaattttggatccagagggtttatttatgtgaatgattccgattttggggaacttgttcgtctgaaatgttttgttgaaccggttgcgtcatcggtgcgtcttttcatggtcgttaagagtttcatgattgcatcggtgttgtgagttttacgatgctgttgttgttgatgagctgattttttttttttttttttcctggtgattatttgtctcctatgtgaaacattcttaagtatttttgatcagattgatttgatcacaagtttatcccgttgcaatctctctgtttcattctgtgaacgctcatgtggatcactgatttgtttgatcacttgtgcaagatttttttcccagtgttcgattatttgtattttgctttgctttttaatgatcctgacccccgcttgaaacttacaacacttgaaaatataaaatgatcatttttgttggaatggcttgttat

SEQ ID NO: 55195 - DNA, 619 bp, Arabidopsis thaliana landsberg
tcatggagcgcattgactaaattgactatactatctttaacggatcttaaggtttcactttgacctaccacaagccgttaagatgtgcggccctagattatgtcatacccaacgctccttgtctagtttcttctcatgtatttttattattacaactgaaatggtcaatgctcttttgttgttttgtagtattttatgatcagaaaacgcatttttgtccaccgataacatatttgatagaacgagagtattgcatgatacgagtcacaagatagtggtatgattttcgcaataccagaatatcatgatttttcatattcgacgagttttacagtacatgatgaataatatgtatatcgttgttatacacgacttcagagtactgcttcctatacatacgggttacataaaaaatgctagttgttacaaaaaaaaaactatgcttatatgtaaagttggtgtaatatactgtaatgtgaatatgtaacacaattatgtaacataatgttaaatgatgatgatgatggatatgatgtcattcaacattgctcaaagtcatggccaccaccaccatgtatcaggcatatatccatctctctgtgtgtgaatatataattta

SEQ ID NO: 55196 - DNA, 650 bp, Arabidopsis thaliana landsberg
  unsure (1)..(650): unsure at all n locations
ccgtttatgtcacattgtatagtcacaattcaaaagatttgattgaaagccacagaaaaatcgaaaggtcacacttgaccattgcacaaaacacacattttatcaacattgatctccaattcacattggttttacattacacattgaatcaaatctacacttaaaaaaaaaatcatcgcctaattgtttttgggagacgacgccgtttcagcttgagaaaggcttcgccagaaaccaccactgtaaaatctgctccacatctccttctccaacgcaatcacagcctcatcttcttcttcttcttcttcttcctcatctctgctcnnnnnnnnnnnnnnnnnnnnnnnnnnnnnncctcctctaccaaactctcttccactctctacaaactcctttttcgctaatcgtttccgtcgtatacggcggattgcgcggcggcagagtccacgagggagcttgtatacagcgagtacgacgagattcacgacgctacaaggagcgcatagacataaggctgcacaactcgccgtcgtacaccgcaacactcagccgtcgtagatcctccgcacatagagannnnnnnnnnnnnnnnnnnnnnnnnctcggttgtttatcatattcagattttttttataactgaatctgagaat

SEQ ID NO: 55197 - DNA, 455 bp, Arabidopsis thaliana landsberg
tctattttaatttgaaatcaatgatagaaatctctttacctacaccttcctacacatatgggtcaaaacgttttttttttggtatgacattttattcctttttcctgttgctaatctacatatataactacatagcgtacagctatacatattaaatatattagatctctacaataggttaaactgtaacacaaactattgatttagatagctacggtaattaatacgttttgatcgtccatattccacaaatataaatagatacccctttgaatgtgtaacaaaaaaatctcatagacatttatggttttaatactcgtgttatattacaaaaaaaattctcaaaaattgtaaataaatacgagtggatacgatggtctacgtacaaaagattccagaggataaaagccattttgatttgtcgttttaatgccttccatttttaaaaagaaaga

SEQ ID NO: 55198 - DNA, 465 bp, Arabidopsis thaliana landsberg
cgatgtctttcatttctaaatcatgaatacatttcctgaatcttcccatcatcgattcaggttggaaattacggattattatttgtcgttcatcatctatcacatcaaagttgaatgtctccaccaacaatccaaggtcagcgcaattagctctaataagacgcagttcttgcaggaacatgagcttcctatcgctacgctgaggcccgtacacacaggtcaaccaccactcatcaccaataattggacagaacttgactagaaacactggagacatcaacccgaggagtcgactaatagctcccaatttagacctccaggccagcagtacaccagcactagcacgatcagagtgtagagccacgagattgttgtcgtagtcaggacactattctcgagagatgacacggcgacgactgctagctcgtgaacgttggtctcttatcatcaagtgatgtctgcacg

SEQ ID NO: 55199 - DNA, 598 bp, Arabidopsis thaliana landsberg
tataatactggatctcaatgacaacatcttttcccttttgctcctcatcagaatactcgaatccatagtcctccatgtcagcatctacacaaaaatcgaaaacccaaatcaataaaacactatcgattcgtaacaaagtaagtagtcgaattcgggaactttcgaaccctagattgtttcagagtagaagattagacatagcaaaacaagaacaagacctgaagccatgtcgattcgatgaagaagaacaccaaacgatacgtggattagggcagagaaagaacgattagagaattttgcttctctttctcaaagggtttttgcggaagtagaagaagaagagaagaagaagagaagaagaaggtggaagaagtaagatttgttgctggatttgtgaaatattactattgggccgagtaggtaagagataataatagtccgatcagatatatatgtatatatacatatacagtatatatatatatacacatataatatgaatcaaaatatttttttaactttaaaatacattatatcatggatatggtaaaaaaataaattataactattaatttccaacctttaattttaaacaaat

SEQ ID NO: 55200 - DNA, 946 bp, Arabidopsis thaliana landsberg
catccaatgagaaaaataaatttttattttttaaccagcaaatcacgacttaatggtagatagagtacaatagaacacagtagtaaaaggttgtaaaacaaatttctatttagacaaagtagaacacagttgtaaaaagaaaccaaatttcgaaaatacaataatgtaattcgtaatgatcccagaaaagtgggaaaaaaaagtatagcggaataactcatgtggatgtgacatataatgtgaagaagaaagaaagcatagttcaatcttttcaccattgtagctctctattatacatagacatgacaaataccaataaaatttttatttatttttccatgaaattatttgttcataacaaatgaatcttaatcatttttcctatagagccatagaaggattcttgctttcgtggggtcaaaatggattacacgacgataaatgattcacatctttttcaaaaaatggtttcctaattttgttcctttgattgatatattgcgcatttcagacaaaaaaaagttctaaaaagttttctctattattcagaaaataaaacttttcgtgtttgctttaactttagcttttgtttttttgtggttcagttcaaaagagttcagtgagtcatacaaaaatcaaatcaaaacgttttttttcgtagcattctgacaaatctcgattcttgtttatttctacatatctttctatcatgatccaaaatttggaaaattccttatctatgcagtgacttgcataagttaatgggctgggcctgggcttcaataacaaaactaactagtcatagagttttttttttttttttttggtcaactagtcatagagcttatgcttcattgctttgtgcttaattcccagtatataatgaagggaacaaatttcgaataacaatgactgaccacattggagcttaagtgaccttcttctt

SEQ ID NO: 55201 - DNA, 972 bp, Arabidopsis thaliana landsberg
taaataaaattctctataagcagcgctagctaaatttaaccaaacgaacagcctttgactgctaaccatatcaactcagtttctagatctgaaatgagtagaaccaaaaccgtaattcttacccttgcttttcaaattcatccccaatctgctcatacagtacccccaggttgtgcgaagtttgtagttccacagacttgatggaagtcaaaggagacatatctgagtcataaactatcattaatttgatgtgtacgatcgaggaacaatttgaatcaagagaaggtaaaagatatccaaacaaacgacaaaatgttcaagtgtcacgaaatagcaaaaattcacagtgtacgctaagaggtatcccgaacgataaccaaatacagaaatgataagactgacgggtagaaggtaaatgcgtcgatgtgcatacagatttttacctcacatcaggaagcttctccatctcggtggcatatgctttgcttaatgcaccttcatctccatgctaataagtcacgtgtgagagacaaagttaatcatacaatgaaagtaagtaagtgaaaattccagagcagaaactgtactagaggtggagttcagatgtcatagatttcaaagtgcacatatgtttagtgccatttaattttgttttcaggaatggggaacaaagaaattaacctgatctgttaggtcaactgccataatttctccatatctttggcaaagatcatggaaatggcgctgtacaacttttggctggaggcagaaatttagcttattaagattgagtgctggacatcatataattaatctagtaagaaaatcataaaaaggtaccgtctcttcatgcttatttatcttaagccgtggcttataactcaaatcaacgatctgctcccaaagaagtgggattgaacctcgaacctagtcagtgaaagcaagacagttccaatggcaaggagtgaaagg

SEQ ID NO: 55202 - DNA, 617 bp, Arabidopsis thaliana landsberg
  unsure (1)..(617): unsure at all n locations
tgttcctggcggcctgttggttcctagcggcgtgggatgcttgatgcggcttcaacaggctttttctttttttaccgatttaatgtattttatatagtctgttgtattttatatagtctgggatgcttggagcagacaaccaggaattgagccagcgagagggtgagggaattgggcctgcgaacaatcagttgcctaatagcacttagatgactaacttcaatagcatatcataagttcaactctactgcggtggtttggatcattttctatatttgaaacgtctcaagtttgaaccttgtccaggcgattttttaaagtattttttgttttttaaagtaagttttgaaacagagcacaaatacatgcgtccaattatgcacataaatacttgtgcatgtaaaatagattttacattattatttgtattaaaataataaaagttatgacgagacatgatatgacacactatatcgtcacgggttatggcataaaggggtattgtcgcgattcactggntatgacgattcagcattgtcgatanatatcgcacaaagatctaatcttcgaaatatgacgactttatgacgaagatttttttgtgtcactatgtgggt

SEQ ID NO: 55203 - DNA, 399 bp, Arabidopsis thaliana landsberg
agaggatgcgtgtgagagatagagcagagagatgagggagatgagaggagagagagagagaatagagagaaggaaacagcagtgcggtggtgggaaaattcctaggcatgcgcgcgcgggctaagctagggtttggggtattttgggagctgggcctctaggtgggccggccggctggggtagttttaggttttttttttaattccgaaattcatttttaaagaactctaagaatcattaaaaaaaattaccaaaaatatttataaatgaagtacttatttttagactaataattactataatacttaattattatttaattactagtacttctttttaaaatgggttgatatttaaacatccgataagaaatcaaacgcatgcaaagaaaatgatgca

SEQ ID NO: 55204 - DNA, 617 bp, Arabidopsis thaliana landsberg
  unsure (1)..(617): unsure at all n locations
cttaacttctgagaatttagccaactttctaaagtttaggtctaacttgttaaagtttaggctatagaaagttcactattttggtgtagtgagagagattggaggttaacatcgatgcgtgaagaagctttgtttttagagagagccacggtggccggccgtccgccgcagctttacgtcgacgtcgacggtaaggccagttggaggcgagctggacgtgtggccggccgcggcgaggtagctagcagcttaaggttggttggcnnnnnnnnnnnnnnnnnnnnnnaggcagatctgtcaacgcgattttcttgactctcacttttctttctctggttggcttacattcccctacgtacataaacttaaagctttatcatccaaatgctatctaagataaaacctttagccaaatgctgtctaagatgtagcttacaaatttctggcatagcggtaagagcatactggttagttggcacggcacagacattagcatcagaagactgacatcatacctcatcagtcggatcggatcgttgtccttctttccatggatgtccaggcaaaaaaaaaaactaataagcttggtatgaaatcccactgcttatcataacaca

SEQ ID NO: 55205 - DNA, 582 bp, Arabidopsis thaliana landsberg
ccctctagcaccaaatgttgtctaaacgtcgtgatgaacgcttcaactctctcgttcaactcctcattggataacctccctggctcaaattcatcttcttctccattatactctatttctttcttgtgaaacaagcaatctttcacagtttcctcaaatttagggcaaactcttttcgtctcctccactaaaacacacttcttgatcacttcctttggctcaacaagtaagaaaccttggtcaaaacaagccggttccaccaccacccttgtcttcttcttcttaatcttattctttttctctcgcatcattctcaatctacctcctcgacgagtcttgaaatcatgactcctcccgaggttaggacgagtcgaggtaaagtaaacggctaagagaacgacgttgagtataagaaacaccaacgaacgccattgctcgatcaaatacgatacagaagagaagtgtttaagacaagccattgaaagaacaacaactgcagtcaacaatgaagtacacatgttctcttcctccactctaatgtctctcttcatctccattgttctctctatatctctctacttt

SEQ ID NO: 55206 - DNA, 646 bp, Arabidopsis thaliana landsberg
  unsure (1)..(646): unsure at all n locations
gtctatggagccagacttattgcattcaagtacctatatgaatgttacaaacttgcacgatgaaacataacaaaaaacaaactccaaaattaccattctgtttcatttcgagattttcgcagctaattctctaacaagcttnnnnnnnnnnnnnnnnnnnnnnnnnnnnnnnnnnnnnnnnnnnnnnntgaactcgacaacgtcagccccgacaacatctgcctgaaggttgtgtaagatgttaaggacgtcacggaaagagagacctcctggttcgatatgcgacactccaggtgcaaatgccggatcgagacagtcaacgtctatcgagatgtatacccccttcactccttcccctaatttctgtacaaaccaattcaatatacgacttgaaatgtaccaaatgcacaaaacctctaataagcaagaaggaatgtattaatactctttgtcttgtctaactttagggagagatagattaccagattttccaacattgggcgatctttcgagaaggttcgcatctcatactgttctactccaaacctcttgccttgttcccgccttcctggtttatcgatctgatccaacctcaataaagtttggtctcattatctttccagagattgtgatgtatatcacagag

SEQ ID NO: 55207 - DNA, 1261 bp, Arabidopsis thaliana landsberg
taataggcgcatcagtgataccactaagaagcggatattcaagcgagacggcattgtttttaataatgattctgctactcctgatggacagatagtgaagtatcaacctccaatgcacgagcaagccaaagcaatgtttaaacagcttatgaagatggaaccttacaaaaccggcgatgatggtttccttctaggtaatggtacgtctactaccgagggaacagagatggagacttcatcaaaccacgtatcgggtataactcttaaggaaatgcctacagcttctgagatacagtcatcatcaccaattgaaacaactcctgaaaatgtttcggcagcatcagaagcaaccgagaactgtattccttcacctgatgatctaactcttcccgacttcactcatatgctaccggaaaataattcagagaagcctccacagagtttcatggaaccaaacctgggaggttctagtccattactagatccagatctgttgatcgatgattctttgtccttcgacattgacgactttccaatggattctgatatagaccctgttgattacggtttactcgaacgcttactcatgtcaagcccggttccagataatatggattcaacaccagtggacaatgaaacagagcaggaacaaaatggatgggacaaaactaagcatatggataatctgactcaacagatgggtctcctctctcctgaaaccttagatctctcaaggtaactaaagatcaactttagtagttgtctatcaaactctaactattcaagtttaattgcttagttatttatattatgtttatttcactcaggcaaaatccttgattttgggagtttttaaagtcttttgaggtaacacagtccctgagagcagcatattcatttttcatacgctgatcttttatttcttctttcttgtatcaaagtggtttaacattactgcttcatacaactctcaattttacacaaattctctatcaatatgagaatctgtgtcatgtttcagtctcttgtttgaacttttcgcttattttgcttgaagaagagcaatgcgaacttattaagtcaacataactattcatctgttctctttttttgacattattaatccttcatgaatgccgaataaatccaaactaaactaaaataataacttcacaataccaaaaatttcatacaaaacatattgaaccgagtctatgtttagtgtaaactaaaccgaactatttcaaataccgtaaaacct

SEQ ID NO: 55208 - DNA, 1083 bp, Arabidopsis thaliana landsberg
cagaagagtggcctgtggctaagcagatccactctttctaccttgttaaataccgttcttacgcttaccccaaaattaaagctaagcttgatctagctgataaagagcttgaaaagttgaacaaagctcggactggagttttggacaagttgagagctaagagggtatgttttttttgctaccttcttgtgtcggatttaggagtttcgttatttcttttatagtggtgctgataatgcggttttggtaatgcctaggccgagagatcagagttatttgatctgctggacccgttgaagtcagagcgtaagggattcaacacaatgtttgatgagaaaagaaaggaaatggaaccattgcagcaagcactgggaaagttaaggagcaatgatggtgggagtgctcgtggccctgctatctgttcctccgaggaagagctgaatagtatggtaattatatgagacctttttttttgttttcgatagctttggttagccttttcggtattctcatttgcctgagtttgtggaaaatgaagatatacagctatcagtatcggattcaacatgaaagcattccgttaaccgaggagaagcagattctcaaagagatcaggctgcttgaagggacaagagataaggtcattgctaatgccgctatgagagccaaaatcaaagaatctatgggtcagaaggatgatatccaaggtcaagttaaggtaagagagttgtggccggattcttgctgttatatagtctgtagaagttggtttcatatgtgatgctttttgcagttaatgggtgctggtttggatggagtgaaaaaggagaggcaagcaatttcagcaaggattaatgagctgagtgagaagttgaaagctaccaaagatgagattacggtactggaaaatgagctcaagactgtgagcgaaaagagagacaaagcctattcaaacattcatgacctcaggaggcaacgcgatgagacggtacaaacacttacttttgagcattttcttctgatgaagaaggattcgtttgtgtcaattagtaatctttgatttatgtattcttgactcataca

SEQ ID NO: 55209 - DNA, 1012 bp, Arabidopsis thaliana landsberg
agctttttctttttattttatactattgttttcattttttaacttttgaagattataaatttcaaattaaatatgctaaaatagagagtatatatataaaaaatctacatgactcactaatgatttgtttattttgttcttttattcaaacccgattttggaccaatccgtcaaaatatgggcttgtgtgatagttttttaacagttttcttatcatgtaaaactgattgctttggaaacttccgacaacagttgagtttttaataaatttagcttcaatagaggatcatcgattcctagtaattaacaccacttatcatggttcttgtactaaataaaatcttaaaataaaattagacgaatgatggtaattttcttgcaaatttagaacataaataattacaagaaatttgtagtgaaaatcatggattagattggttagaattagggcattacactgtaccagtcttttactagttgttagtgagccattgcaacgaaatacgaaatcgaaaaccaaattggtaagacatgattgttaaaaatttcacacgtataaataaatggtggttttgtgatgcttagactaagtatttctaaaaaaaggtttagaactctctcccaactattttgctctgcttgaaagtgagaatagttaccactaaataagatactatcaaatgatgttttgggatttagaaaaattacgaatgaaaaaactaaaaatattttggttaacaaaaattaattcctcaaaattatgtattctcttttaaaacaaacatgtatctaaagcgctaatatttgtttgataagaaaatggctaatacttgcctatgaacttatgtttttttttgttcagaaaaaaaaaacttatggaatttcgtttatgtgtgtgggtattaacaagtgctaattagatgataattttttcaaatgaaaatcgcgataatgcataaaaaattgtcgtcaattttttcaaacacaatgaaaattcatttgggggacaaaa

SEQ ID NO: 55210 - DNA, 513 bp, Arabidopsis thaliana landsberg
ctggtttatactttccaccgtcttcgatttctttttctattttttcctgccaggagcgatcttctttttgcttcaggtaagggatcaacgcgcgcagcgttcctttgctgacgcctaataaatttatttccatcgggtaccgcaggcttaacatcttaccatcaatatctatctgaacaccccgtgcctggcctgttttcgggaagaattccgaataaggaaagctgctgcccaccatcagcagggtatcgcaatcagtcatcatttgccagcttgggtcggttcccaacaggccgatagcgccggtcacatatgggaggtcatccggcagggcggctctgcctaacagggctttggccacgccgcatcccaagagctctgccacttgttttacctgttcgggtgcattcagggcgcccgccccaatcagcagagtcaccttttcaccttcgctcaacacgtgtgcagacttttcaagcgctcttgacggtggcataatatttactttcggga

SEQ ID NO: 55211 - DNA, 657 bp, Arabidopsis thaliana landsberg
  unsure (1)..(657): unsure at all n locations
gaaaataactaaatttcatcaannnnnnnnnnnnnnnnnnnnnnnnnnnnnnnnnnnnnnnnnnnnnnnnnnnnnnnnnnnnnnnnnnnnnnnnnnnnnnnnnnnnnnnnnnnnnnnnnnnnnnnnnnnnnnnnnnnnnnnnnnnnnnnnnnnnnnnnnnnnnnnnnnnnnnnnnnnnnnnnnnnnnnnnnnnnnnnnnnnnnnnnnnnnnnnnnnnnnnnnnnnnnnnnnnnnnnnnnnnnnnnnnnnnnnnnnnnnnnnnnnnnnnnnnnnnnnnnnnnnnnnnnnnnnnnnnnnnnnnnnnnnnnnnnnnnnnnnnnnnnnnnnnnnnnnnnnnnnnnnnnnnnnnnnnnnnnnnnnnnnnnnnnnnnnnnnnnnnnnnnnnnnnnnnnnnnnnnnnnnnnnnnnnnnnnnnnnnnnnnnnnnnnnnnnnnnnnnnnnnnnnnnnnnnnnnnnnnnnnnnnnnnnnnnnnnnnnnnnnnnnnntgataagtaccattgtttatttttgacccaaattttgacatttaggtactatctcgggtcttttcgtgatttgtgttatattacgatacaaaattatttgttcggacgttttacgcatttttacatgtacgagcccgttaaactagatggagtacgcttcgtagcgggtgg

SEQ ID NO: 55212 - DNA, 603 bp, Arabidopsis thaliana landsberg
taaaaaaaaaagaaacatattggtgcaaaccatgaaagcagtcattatatttttttttcaaaataatcctctcactgtgcattaacttttaaaatgacctttccatctcgcctgttatattttcaaatgcacactcccacatccatgttaatttgcacggtttgcatctaactggttggtttacacctaatatgttctcttcaaaaaagttgtgctagaacatgtgagaaagtagctcaatcatcaatttactgaatccccctcatgagcaccttgaattgatggtcgttcccagaactttgttctctcagggttttttatgttctgaaattcgtattgaaaactgggagagttttttgctcggaagtgttgcacgtgtgtcgtgaggcagggttgaattctcagtccggttgaatttaattggatcgagtttgtttgtgtcgcccggccggacttttattatgtttctccagactgaatagtccgagtcaattacatggtcaagcatttccttttatatgatgtgtttttgctgttcaacggactatgccgcggttcagcgctggactccaggacttggtcagatgttgcatatatctggat

SEQ ID NO: 55213 - DNA, 310 bp, Arabidopsis thaliana landsberg
agtgcaaatttattacacttcggagaaacggtcacaattaattaatacataggactcggaaggtatctagtttcctaagaaatttatagaattcgaaatcaggaaatgggacgcacatggaggtcattgtatttgaggttcaccaaaccaatccttaccaaaagaagagaggatatcaataaatattgacccacattttaattcattaaatatggggttttttatattcctttctatcattatatagtattattttttatcacattcacactcttaatttttaatctttttatttattattatattcttt

SEQ ID NO: 55214 - DNA, 603 bp, Arabidopsis thaliana landsberg
gactatagtataatttaattatgttcttataatatgttcttcttttctttttttaaccatgtatgaatagttttccaattggattttcccatggtctggatcctaacatgtaacttttggtccttaatttagttcgacctcgtactgctaccgcttaccacaacacaataactataaatttgcgggtgaagaaatagagttaaacatgatcaaattagacattaataacaagaaagttaacaacaacaaaaaaaaactcaaaaaatgaatcttcaatgtgaatcattgatgctcataatgttgttcttttttcgtggtcaagagtttatttcatgactaaaaagacatttttcttaccaatccaaggcaactcccgcaaatactcctcctaacagaaacgctaccagtaaattccctaacgcattttgttccggaccctttacaaaaacaaaacacgagttcctttaatacaaaatgagaacaaataagagattgattgtcttgaaatattagaatatatatagtgttaatgcacgagttccttcatagtgttgtttacagcaaaagtcacacgaaatgtaacccttttcaaacttttaacac

SEQ ID NO: 55215 - DNA, 812 bp, Arabidopsis thaliana landsberg
cttgtgtcttaacaggtggagaaaacaatcacccaagttcaagaaactggttctagtgtatttgatgcaccccagcgtgtgttccaagtagtagaaaatgctcttaaaccagctttggacactgctttacccattgcaaagcaagctggtgaagaagctatgaagcttgcttctcctgctttctctgaagcttcaaagaaagctcaagaagcaatgcagagctctggttttgattctgagcctgtctttaatgctgcaaaggtcagatttcttacattcaaacatgtatgagaacataacaatttaggttttggggtttagggtttaaagtggtttgcctgtgttttggttgggatgtagacagtaacagatgtagcgcaacagacgtcgaaagcgatagaagatgctaagccgattgcttcatcgaccatggatacgatttcttcagctgatcctagtgtcattgttgttgctgctggtgctgcgtttcttgcttaccttctcctccctcctgttttctctgccatctcttttaacttccgtggttacaaaggtgcctcaatactccatatagatcatcttgagaacatatataagtttttgatttggttattagtgatctagtttgtatctagagtctaattcaccatagcaaaatgttgacaattactctgggtttgtggtctatattgtatgaaggtgatctcacgccggctcaaactcttgatcttctttgcaccaagaactacttgagggtggtattagatcagagaatgacattgagaaaagccggattcacggttcccttcgaa

SEQ ID NO: 55216 - DNA, 795 bp, Arabidopsis thaliana landsberg
tgggcggtttaacaataccatgtcatgaatctttgttcttcacagtcacatctcagattcaatgatttactatactacaacatttccatattttttttagattgttagctaatttcccctggagataattgtaaattgtttcaatgagaggaatatacaatacatagatcgtaattgatcaatgcgtatttgcatgttaatacatttgtgtcttgtaccaaaaaaaggaattatacatttgtgtcatttaactctggacaccatacatttcgtcattacagtgaaacggcagaatttgaacactcattattctggttggtagttatttccatatttctcaaagaacatttatgtgactattatcattccttgcgacaactgtaataatgagaaaacttggtattttttttggctcttcatataagttgtttaaaaaatgtattttcaaacaataattaatagtggcccaaacataatttaaaataggtttcgaagcccaaagcccataaattaaacgcctaacattcacgcgctctttgactatggttgcttaggaacagatgcgcgtggggaagttggcaccgttttttctcttgcttacatctatttttttttcttaaacgtctatttatttgctttacgtcattgtaacgcttgcttgttttctctgtatcgctagctggtgtacacttgtactatggacgttgaaacctgccggttagtccggttcagctagcattttttaaatgtacatctattttcttattgaattatgtgtataatgtattattctct

SEQ ID NO: 55217 - DNA, 706 bp, Arabidopsis thaliana landsberg
tatacccaaccccggtatcagcagccactccagctttctctttagtcaagtccattgccttagttctacttcccccgctttatgccctgggtaccccacagcacattccactgtacctgcaaccgctttcgtcccttgcaccactttctccctggtgaaatgtgacgctgtccacccaaccgcagcggctttctcagctgccactcctgcataatgtgcagctccttttcctccttccactgtcgtttcttttatgtacccagctgcttcaccggctttctgaacagtataatctttagcttttgctgtcattgaagctgcctcttgccctttctgagctgcaacatttccggcttgttttcctgtctctgtcatgtattctgaagctctctgagctttctcagctgcaacatctttagcttccacagctttctgaagagtgtaatctttagctctcgcagcctgttcagccgctgtgcttcctgtttccttcatatactcggaagctctctgagctttctccgccgcagtctctttagcttcaacagctttctgcagagcatagtcttttgctctcgccgcctgttcagctgtcatatttccagcttcttttcctttctctgttgcatactgaaagctctctgagctttctcactcgtagcactgcccgctttctgagcacctggtcctacaatttcaaaagggg

SEQ ID NO: 55218 - DNA, 1125 bp, Arabidopsis thaliana landsberg
agactgcaaacgatatcaaaatatttaaaaacgttataaaataacaataaaaaaaatgaaacaatttttttgaaattaaacaattgtgtaacaaattcttaaaaatggtaaacctggatacgagttacaattacaggtaaatatcttgatgtcattacgcttgagatattcataacggtcatggactctaagcttttctaactaaattgtctaagcttcttttacctctgttcttcgataatttttttttttcatggctaaaaggatagatgttagctttgaacatttattagcgcaataagtaaatttagttatgtaggtgtatcatttaaatccaataccgtacctatcaaaatattcttagaacttcacacttcaaagacccatgaaattagtgaattgcatagtatttgtatctcaactaagtatacttagttttcttataaaaattgaagcataatatataaacatagaattacgaaattttgttcagtaccgtaaaaagggtttgtagcataatacaaacacaaaaattttgttttgaccaaatagtttttttcttaaaagaaacgaaatatcctgactaaccaaacagaaaagataaaacgagagaggtggaattgcttctaattttagtaaagaagcatatgatagtctcctttaatatcttttaacgttactattcccaatttgttccaacatgtcttcttcttcacagacactttcgttttatccttttctcagtctccataacaaataaatagatacccaatcaatatttttcacaataatttttacaaaattgacatcaatgaaataactaaataattttactactattttaaatagcaaaataaacggttatgagtgattttatctaaaaatgttagattatgtgttcccattaatttctaattaattaaaaatatagttttttagttttgtcgtttatcagcgtatctaaaagttttcttccaatcctccactgccttcggaactcaaagaaaattaaaatcaaatttttagtaatatatcagccgctcacacacggggctgtcacataaaagtctatcacaaatcatccacgtcattagaatatccctgtgaaaggtctccagccgctgt

SEQ ID NO: 55219 - DNA, 138 bp, Arabidopsis thaliana landsberg
tttacactaatagtctagtagtagtaaataattgacataacctatgatctttttgtcgagggatgtgatcttgctcactttattcttcaacatcgcgaaacaacgctaaggtattccccatcgtttaacaagaatttc

SEQ ID NO: 55220 - DNA, 469 bp, Arabidopsis thaliana landsberg
  unsure (1)..(469): unsure at all n locations
aaacaactcactccggaggattggcggattgcccgagcccctacgcgacacttatccatgctccgtcaaatcatctttcaacaactgccgaaccatgaaaattcccgtttcctcttcccttgacctgatcacggaatgacattccgccccttacagggcttaaaaataattcggtccaccctcccggggcgctggccgcagctatcacatgacgcgcctttgacgctgaactgaacctgaatccatcctatgaaaacctgacgcgccggtatagttgcgtttatcgatgcctgaccatgaaatttaaatacccaagccctaacggtgcaataggcgatagcccggtgcagcgccccggagaatatcggatccatgcactccaagacctggaaggccgcnatttatatacctgcgcctatctagctgatcgaggcaccatgggtacaagctggatccccctccggagcaa

SEQ ID NO: 55221 - DNA, 1155 bp, Arabidopsis thaliana landsberg
aataaatgatataaaacagatacacgcatgttcatacatatacagcttcataagttatagttggtgggcaatatatatgcttttatatcatcctagtgattattctaatggtggctggtttgatgaaaaattaggcatcacctcttccatgttgaatttgttcttaaatatcttttgtgagtttttttacataatgttcaatatttattgtatgcactatgcaacaaagttttattattagtgaaaacatatcttattcaaaaaagaaaacggaaaattaacatagacataaacaaggagtaattctgttgttaggaatacatttcatatgacatccttccatgcagtcatcatccagtaatttcacaacctgcagcgaaccttcatgatgcaactgaggaatttcttcaagtaataaccttttcgcctcaacatttcgaacagtaacgatactcatcactacaaaatcagaaactataaataacaaattttgtatatagatttttgttatttgcttcacacgtgaaatataaattttacctgatgtaacaattaggcagataaggaaagcaaacttcattggtatttttttcattgttttactcgtagataagattattacagaagatgaagatagtggtattttgaggttactttacaatatatagcggaagttgttacacaaaactcggggtactccccaatacgtagaagtacaactatttctagatacaatagttatataaagggatctactgtaaattactaattattttgtttttgttaccagccaaataaatacttatcaaattacaaggaaaaagtccagttattgacaaagtaaaattatatgaatttattacaaaattttgtaaatatacatgagactagtataactgatattctacaaaaagtcggtaacaaactaacaatataagaccaattctagagtgcaaactagaaaacaaacagtttaagagttacaagagatagatcatatagttttgaaatatggaagcaaataacaatcatcaatccatattctatattgtagtttttatttgaattgtggcaagactttgggttcgatttgaaatgaaaaactttggtttcattgcataatgtttaacctgtatatatataataggagagtcc

SEQ ID NO: 55222 - DNA, 965 bp, Arabidopsis thaliana landsberg
tgtcctccacggctcatctcccagaaggcaacctctagttcaagaactcgtacaagtacatcttcagcttcaccgagcacctcaccggaggcattctccagacaacgttcggcaatgttcttgacagacgaacaatactgtttaaacccgtcattcccccaacgatgacaagcaccggtaagctccaccggagttttgttcccgtcttctaaacaatgagcaaagctctcttgatacactgcttcaattgcccagaaagctgtcataatcaccggatacttcacctcactgctcatcagatcttccaaaaacctgaattaaccagaaactccggtttatttgctggttcctaatatcattttcgagtgtgagaaatctattcaatcagcatatatgaaatcaataacctgccatattcttgattagctctttgaggcacaacggtcgagaaatcaacatcccatttcgatccttctcttttaaaccattctatttcatcattcaacgatgctataccaccaagcaccacttccatatcggaactctcgccggaatctttgcaagctctgatcaacacactcgctacaaacggcacaaacctcctcacgaacagataatcttgcccctacaaggaaacaacgtcgtttaaaagtcatcgagtgagatttcatattttgccttggtttcatcagtaattactaattacagtaccagccaagttctgaaggacgagagatcaacggatccgtcacggatcgagacgacaaaagcatgacgtgtagccgccgtatagatcgaacggtgcttatcaatccatgtgtcgatcacccctatcttctccattgaaattgcttcttcttcctttctctcaagactcaagactcatgactcttcttcttgaccgattcactgtcaacgctttgactttctgttgtctgtgacgtgcacgtttcattgggctttaa

SEQ ID NO: 55223 - DNA, 902 bp, Arabidopsis thaliana landsberg
tcattgggtatgttgtcgttgctagcgatttatgttcagctaactgtataaatatttgttcaattgactatcatggttgttattctttcagccagcaagccattgacaaagcacttgaatgtcgctattattgacaataatcctcttttggggagaagaaatatcatagagaaagggcatcaacctgatcccagagtcagtacagtcacacctgcaacaatatccttcctcaaaggtacgtagtggactttctcgtttcttcccacagtttctgctcattattctttcaaaatggtgtgaactctcaattgcgtaagcttaatttaatatgctggttttgccacttggaacccttatttgagctcaggctttgtcctcattcagtccatggatatcctttttagttattactttggaatcatgtatttggtttgaattatgcagatattggtgcctggaaatacattgagcaacagcgacatgcgtattttgataagatgcaggtaattattgttaacactatacattccttccaaagcatttctatgatggcgtctgaaattttttaatttcttcaaagaaaaattcttttaaggaattggttttctgtcaaatgtttgtggttataattgtggtggaacatgttttaagttgcctctttacatgttggtaacttggtataaattatcccttcctttgtttaaattctaaaccttaaaaggaaaactacagttagatttatctaggtgtgatctactctatgaaggatctacatatactgacaatgatatgctagacagaaaaacacagtcatttgtcatgtttcgtattttaggtatgggactatacaggccttggatatacaagatacaatgctaatgatggacatcaacatgatttgg

SEQ ID NO: 55224 - DNA, 599 bp, Arabidopsis thaliana landsberg
taggaaagtcagtggcttccatgcagcctgcggctccccggcctccctgtggctgaggctgggctttgattcatacggggtgacccacatgtggcgttaaggcaacagggtgacccagagccaagctatggcctcggtgcctgggtatcatcttaagagaaggacagtcctttgtcctccagctcaggtctaagaactctcaagacgtgggtagacatagccactcttcaaaatcctcaactgacgggacagagcaaattgctcacacaagactgacagtccatgtggcaggacctgcctccgcaggactgtgctggagcttgggtcaggctggcctctggcactacctgtgggagaatgtgttcagcacattagcagcatcaacagatgacagggcgctcgtttacctagttcagaatggtaagtctccaagcatgtcatatccatagggacaccaagccaggtgataggataaaccaacacaagcccaatgacaactcctcttatctgcctgctagagcatggctggcaccagcatttggtcgtattccataactggagacagtcattcctccccgtgcctcagcattggacataac

SEQ ID NO: 55225 - DNA, 463 bp, Arabidopsis thaliana landsberg
gggcaccttctaaaactagatatcttccacccttaaccccccacccccaatctccaaattccaaaccctagtcgacattgagaatcttggtcttgtgggggtggtctcgagggatggatctcaccgtaatgggaaagagaaaaaaatcaggtatcatgtgggcagagaaatactctaatagtagcaatcctgaaaaacaataactacctcatagatctagctatgcctgaaaaacaagtcaccagcaattgcatgacttctttggtcattttgagtacacgaacaccaaccaatttaactttcacaaatctagctatgctatagtacccagacaatacgtccagcagccagcaagcctgtaaatgccagttgatacattcaatccgatcatagctttagcaggcaaaatttacgtagcagacaacatgaagtggaacagcacgacctcacccacaccaggaat

SEQ ID NO: 55226 - DNA, 430 bp, Arabidopsis thaliana landsberg
attatcaaaacacaatgccaattgaaactatatatttggtaaatattaggcataagctgtgattgaactccttatgtcaagagcaaggatcaaatgtatagtctacacactatatacaatctagtgaccttaaggtgaaagcaaaattccatatcaaatctattgtcatatattaatttagacaacacttacagatgcttactacttcgaatctctcgtgtttcttctctttctcttcatatactgaattgagtttgaatgtgcttcaatggagggtatatataaccttaaacatctgtcagtaaaaagcatattcaacaacttgaaatattctttatacaaaaaaaaaactacaaatatctatctttatattctctagtatggagaaatccatttcaaaatttgtacttaccaaatacttaccttgtac

SEQ ID NO: 55227 - DNA, 392 bp, Arabidopsis thaliana landsberg
ttatcatctgtcaattataaaccgacctttcccagtagactcatccaaagtacacacagtgatcatatctttcgaaaaccatcactattgaggcaggagcactcgttgaatgattgattaccggaccattactattgctgccatacctttcttttgatggactggagagaaatcgcaatcccgtaaaatcatatatatatattgtagaaagatcatcttatatgtgctgtctatggccagtcgatctttgattgcatggaatcatgtagcaataggaggcatgtacagataccatattggagacacatgccagcgagcccagagatattcctatacacatagaccaaacaaggttatcaatgggacaagaaaccccaaccaaaccaactact

SEQ ID NO: 55228 - DNA, 555 bp, Arabidopsis thaliana landsberg
tatcattttcagcagttgaaggtatgcttgtaaaattcatttaacataaaggaagataaaatgaaaatgataaggtatataagatgagtttcacattgtgttctacattattgttgaaatttatattgttttattaacatctccttctaaagaccttcatccttcgaatcaacacttcgaagaagttaaatgaaggacgaaggcccatatacttgtgttgccttaatctttgataacttcaggggatcaaaatcaagtatccaacattgacgcccacctccgaagatctcactaccacatcaacaacttacatcatgtcgctgaagaatgcaacaacaacaattttaagcgacattttaattcttgatctcttggagaagaattatataaatcccaaaatagaattttgggtgttataggtagtcgtcgccgcgcacttggaggtccatcaggtcgacaccgacatccaggtgctcgcaggtccttgccagagctggcactacgtctgcgcaaggcctctactccggtgaatgatgagggaactaggagggcgtg

SEQ ID NO: 55229 - DNA, 635 bp, Arabidopsis thaliana landsberg
atttccaagtatattaccgaatgaaaactacgtttatcaaagctgggtttgacctaattggaaacccccctcacagcatgaggccgattaatttctgtaagccgagttttgtttgagcttatatgctttagattcttttttcatttatggacgaaatcttcttttctttcaggttaaaaatttagaatctgatcagtgatccattaatgggtagcatcgggcccattagtaaagaatcgttataatctgatcattggtcctctctgacaacattttcaactcgatcctcattgtaatggacgtttaatctgagcaagaactgtccgatctcgtgttgctttcaatgtttcttagcacatcggatggagttgtttgtatatgtcgtaaacgataggaaagagtacaaccaatgaatggtgaaatggtacgggtaaatctacaatttacaaacacattctccaactgttaacttctacttcgagagacaagactacaaatcaaactcttctaattggatggcaatctacaatcgatgatatttgaacggaacaaaactaagtgggaaagcttcattagttacttacattactagtttcataaaatgactcgttgatgttgttattgacaagtagctg

SEQ ID NO: 55230 - DNA, 1306 bp, Arabidopsis thaliana landsberg
ccattgatatgagactgaagttcctttcttgtcttctaagaggagggaggaaaaactttatccacgtgtcttcgtctgactggtgattgataaaatttgcaaagaagactgatcacattaaattacttacagcttcatcaacggcataatcacatgtcttcacatgtacacctgcccgcacctgatccgcatcactgcttcctttcaccctaataacatttgacatgtcaacacgaacacccaaaaaactatatactataaagttataaacaaattaattcgttcgaccaataacattaatttaatttcatagagacctaacacaaattaaacaatgattatttctgttaattaaatatatataagtgagcacaatcccccgatgatgcatgaagaagctctgaatctaaaactcctctctccgaccccaaatccagaaattcaagcgaggaatagaatctcccactagagaaaagcaatcccagaaaccctaagttcttcacgtttcgttcttttgcttgttgatcaagcaggatatctccgagatttgtgagtctcttgctacttcttcctggagaacgattcagggtttgatgtgataggaatagtcatcgaggaagatagatttggggaattttttttatttgtagattcatgaaacaaattcgtcgatggcagaggattttgatcctcgctctgctatcgatatctgtattcgctccgcttattttcgtatcgaatcggcttaagagcatcactcccgttggtcagtttcgtctcctctccttcttattttcatttcattgtacttgacgatcgtgtggaaatgcttgattgctttgattttagattgattcacatgaaattcgcttgcttttgttagaagttgtcttggtcttgggattttttcatctgacatttgttttgattttccattgccgattgtcttcttgcaggtcgtagagaatttattgaagagttatccaaaattgtatgtgttccttagtcttcaatctctggattcatctgttttcagcatgctgttgattttgtgccaagttttcagatctcagtcttgttttatcattctctttatgctttatatttctcgagcaatacactgttgttgacatgctaccattattctgcagagattcacgacaaatgaccttagacttagcgctattgaacatgtaagttggaagttacaggttcctctaagtcatctccttaaaaccttttgaccatgcgttttgttgaagttttttctctctgtgatttacgaggatggagaaggcttgaaggg

SEQ ID NO: 55231 - DNA, 616 bp, Arabidopsis thaliana landsberg
tgcaggtcgactctagaggatcccctacaaaaatatactaatatagtgttgtacgtaggagagtttgtgaaaaaaaagatatacaaattgtacagcaggcaagatattttgcaacctagtcaatcagtaaacagaaaggagcagaacagaacaaattgcatggttgagcatgagagcgacgtgactgcgtgacttttccgtccaacgatgtcatatcacaacacaagtggtcaattttaaacccacctttttatgtatctgtggatgccaaaaccaagcgaccagccgccagcgaacgtgatgcgctacgtcttggaatccaagctgatccacacgagtgaatgacgtaactaactattaagaaattagttatttcattccataaaccaaacaaaaaaagtaagaaggtgatgaactagctcattcatcaatccaaacatcttacaaaatttagtttgtatcacattagatatttaaatatttattactaatatgaaatatagtctaaataaaatttaattacacaactataaactaaaccaaaaactaaacgtcgacacaatttttttaagccaatgtgacgggagaacgcggaacgagagctcaatgtaatttg

SEQ ID NO: 55232 - DNA, 318 bp, Arabidopsis thaliana landsberg
gcccacgaaacaacgggaggacccgttcaacaatatgacgcacacgcacacacaaagccaccagaagaaggaagacaagaaaaccgcaacaacaaggccaccacggcccggccaagcaaaaacaggggagccagcgccgaacacaaccaaccgggaagaaaaggcgaggccgaacgaagagaagggacaaccggagacaacaaggccaggacgctcacggaccccacccagaaaacacaactgcgactgcaggaccggcaacaccggacgcgagaggaagacgacccccaatgcacacaccgcaagagcacaagagca

SEQ ID NO: 55233 - DNA, 579 bp, Arabidopsis thaliana landsberg
gggccaacggttttctatcttcaggccgctgctctcttcagccttggaatggataaagacgcttgtgaatccctaaaagatggaacttccttggaagccaagaaacataacaacagaaactgaaaacttcaagtgtataggtttcttctctcttccgccttcttcgttttgtgattggattctgagaaagcctcattgtctctgtcttctttaagcattatcttaaatttgtggtttccaatttgaagagatgattcaaatcacatttgaatcaagaaaagaaggatctttctcatttaagtccaagatccttatatgagatttgttcaaactaattttcttcatttgaagtacaaaaacagattctacacaactattgtccagtattttatctattaccagttttcaaagccatgtgtctgaaaccaaaagagctaagaccctcctgaccacacagagatttcacgaagccggagcagagaacaatattatacaaaatgtaaatctcacaagttacaacaatctaaacactaccaagtttttacagctacaaaacgtgtgaataatcaagcaacagga

SEQ ID NO: 55234 - DNA, 494 bp, Arabidopsis thaliana landsberg
  unsure (1)..(494): unsure at all n locations
caacgcattctaacactagaaatacttgaaacatttgantgatacaaagcaagacacaacaaggcgagagagggaaaatataaaaacagcaggcggacaagcacnccctaaacacacacgaaaaccnagaaaccgccaaagacaggaacaccacaccaaaaacccacagcacaccaggaaggaggcatcgagacaaaacaggacgacgcgaccaaaagaancgagcctggaaacaaggcaagacaccgggctgcttcttaagagtcagattctaaaaaaggataaatcatgaagtcaaaagcacaacttaaaaatgacgcattggactacagtccgcgagaggaaagatgctgccgctgaagaagaatggcgcagaaagattgacggatgattgacactgagtctcacagaatcaatcaaccacacggaaagccgctattctccattctaaaacttaaactacacgaactgtgttaacccggaaaggaaaaacc

SEQ ID NO: 55235 - DNA, 568 bp, Arabidopsis thaliana landsberg
  unsure (1)..(568): unsure at all n locations
tttacctgttattgccgccgcggagattgcgactgtgataattacttttaccgttcaaggtttgtgattattatgatactgnactatatcggtaactactactatggatggggtgataatgatgacgatgatgaccatggttgtgaccacgatgatgacagcgatggcggttcacaggtttccaacgcgccgaaagctaccgataactgcaaaggcactatcgtgggtactactacagacccgctcacttataacagccagggtacctataccatccactggaaatatgatgacggtcacggttatgtaaccatccaggagcagacagtgatcgtgaaagatgataccaaaccagtactgaatgtaccgggcaatatcacagtatattgcggttcatacctcacacctttaggatgcaacagcactgctacggcaactgataactgcagctctgtgaacattacttacagtgatgtgaacaatggcagcaccatagagcgtacctggaaagccaccgatgctgcggttattacagtacaggtgtacagatcatcactattaaagacaa

SEQ ID NO: 55236 - DNA, 681 bp, Arabidopsis thaliana landsberg
ccagattggatttgatcatagccaggatatccttctatgaaatacccatttcccattcgatttatcggaaaactatacatatacatttttacattcggtttttcgcagatgtgaaacagtacccaaacttgattaagtctctgacttttcttctcaaaaaatacaaaccaaccaatgtcgttagtccagcagaaggtaagctaaatggtcagtatccctttcatcaccactcacacacatcaaaagaagtcttaacattactcttttacctgtaggagcagacacagaactgcctcgtcctgtgttcttaatgagctggagacgaagaattgggaaagacgatgagtctctattctttacgggctgcgaagaagctggcctggaggtgaagcatctcggaaaccgagtttattgtatcaagcttagagaaagcaacctctgaagaataggctgacaaactcatgaatcatccacatgctcgcctctgaaactaaaggttctgtttgtttctctcgctgcttatttggatttgctttttctgtcaaaattaatgtgaaatgagatagtgtcgattcttaactaatgtttcccttaatcaattgaatttgatgggtggacggaaaaaaaaactgtatttcatttgtagtataatatggggggaaattagtgaagaaaagaaca

SEQ ID NO: 55237 - DNA, 406 bp, Arabidopsis thaliana landsberg
ttaatcaaagagcacatatttatttactcatcctaaaaaccagacaaatccataagtctatagttatcactttaaactttatggtataaaaagtacttcgagtggggatactaatccagattaattcccagagctatggccaataatttataactgtccaataatggatgttaacctacctaggttatttttaatcgccattaaaacgttttgggccctaaaaggcccattaaacacatgatatatttgtcgttgagggcatgtgctccccaatacgcggtgggaaagtttatgtttttgttctcctgcccgttttttggcatgatttggtactctaggccatatcatatgtgacccaactcggtcagtttctgttcttttattgatatgaaatattcaaccaata

SEQ ID NO: 55238 - DNA, 758 bp, Arabidopsis thaliana landsberg
attcaatctaaatcatgaccgaatagtgagtgcttacaagcacagactattcgaaccttagttagatcctttttaccataacatagttgtacccccatagcttgtttacttctatttctttttaacacaaaactaaacaaaagaggagtagaactacagaagtagtgttgctgttctggtgttgtaaatatgtaatactggaattgctatagcattatcttgcaagacactacaatgtattgcttctatatgttattaccattgacttactcttcttttgtttgataatgagaatcctctctttctcttcaacaagatttatattcaatgttttcaacctttttttctctcttgtttctgtatgtagtagtagcgtgatgaagaaggtagaaagtttaagagaagtttcagaatgggcaaatctaaacaaagacatacttgaacttattttcaataagctcgacgtgatggacattaccatgggagcttcacgtgtctgcatctcttggttccttgcttctcacaatagaactttgtggaacacggtcgacctcaccaatctccaagagttagatttctcccgcattttcaactttaaggataaagaaagaccaatttttttctacaagcacccggttgatcataaacaaggccgtacgaatcttttgactaagatcatctctcggttctttcttgacttttttgaagtagaaggcagcataagtctcatgaatctattagttgagatcagcaagttg

SEQ ID NO: 55239 - DNA, 1031 bp, Arabidopsis thaliana landsberg
acaatcttatacacatttgttttagttggtttagataatgtcttgatgcggtttggttgcatatgcagactgaggctgagccagaagttgggagtttacttgatgatcttgggcttcgtgagaaacaacaatttgtgagcactttctgtggtcttgcatgatcattcattgccgattaagagacatattttgttctttttcttttgttgatttgctttgtgtttctcatccccttattagagcattctctatcttttcagccaatttcacagaaaaagcggtatattgtgcggaatggtgtacctgtgatggtaaataccctacttgtttcctttttctaatgggttgctgcttctttatgtaatgagttgttgttgtatagtttacgaggctgatatgttctcctgttatcatgctagctacctaccaatcccatagagctggtcacaagtagtgtgctctctacccaatctaaggtagatttctctagatataagtgtgttacttatttattacattgaaattacttgtcttgatagttatttgagacatattatatcaacgttgtataagtttctgtgcactaccaccagaaactagaagctctcttctaccaaagtgctttttatcttaccagtatatcatagatccctaatagtactaggttttacttgcagtttcaaatcttgttggaaccatttttatggaagaaaaagtcctcaaaagtctcagatgcatctgctgaagaaaggtgattataaacttgtcttccagaccatcagcaatgttagtcacagaatattataacttcagcgtcatttcccattttctctgctgtagtgtaagcgagttctttcaacgccattttggacaagaggtttgttgctacctatcctagggtttgactgaaacatcataatctcactgtgttgtgttgtatcatataattctctgcacgtaaacaccacttgtggactatcgtatattaaaatcagacgactgtgatcttcctttcatgtgttcctttttat

SEQ ID NO: 55240 - DNA, 273 bp, Arabidopsis thaliana landsberg
catgcggttcttgcggaccacaaagccacctctaggacaagatcatacgctgaagtggtctgaattaatttacactcagtgcttgcatctaaactacttgagtaactaaaagtaagttggattctcccaattagttcatgctctggttcatgatatattggtaaccatcgcagtttttcactctgattcagaaagtgtagcagaaacatgagatcttcagcttcagcgtctaatggactcagtagtctgaaaacgtaatgcgagtgagagaga

SEQ ID NO: 55241 - DNA, 471 bp, Arabidopsis thaliana landsberg
  unsure (1)..(471): unsure at all n locations
cccccccccccccccccttcctccttctcccccccccccccccccccccctctcccttttttctttntnnttnnntntntttttccttccccctcccccccccccccccccccccccctcccccccccccccttttccctctgtccccccnccccngcggggcgccccccacaccacctaacccccccactnccttccccccccctttccccccccccnctccctctccccccccccccccccccccccccccccccccccctcccccccctccctcccccccccccctccccccctccccctccccctcccccccccngccctcccccccccccccccgnccccccccccccccccgcccccccctnttccccccccccccccccgccccccctccccccccccccccccccccccccccccccccccccctcccctcccccccccccccctcccccctcccccccccct

SEQ ID NO: 55242 - DNA, 530 bp, Arabidopsis thaliana landsberg
cgtggcaagaacgacgactacgacggcgccagttctgacgcgcgcaacgccgggcttcgtgtccaggactaggaggtgcggcctgctctccgtccggtgcgtcaggagcgccttgcggcgacgtgcgggcagaccgttccggtccaacggcggcgccagaagtcgaagagaaaagaagccactgctgccgcataccggagacgatcacggcatggtactggtactccctgttgtacatatatatatcctcgtgcatgtgcatgcatgaacttcactcgcatgctaaattaacgaaatcaatactgcctcatgcggaacaaacaactcacgtcttctctcgcgcataaatctctcgcagcaatgctgggaggaagtgtacatcaagtcgctgctccggtcaggccgcggcacgctgactgggaccggcggccgccgtggcctgcggagctggacagaaccgtgtgcgaactgtacagcagacgccgacacgggcaggccgccgtccgccccaaggcgagccatctgggtct

SEQ ID NO: 55243 - DNA, 798 bp, Arabidopsis thaliana landsberg
ggggtaatgtttctatttcttataatataaaggacttaaaatataaattcaataaaaataagggtgtttctgagaaagagggtataaatagcttaaaccctagagaaactgaagaatcctaaattgatcatcgtcgtcctttgagtaatttagaaaatcaaaatgggtcgcaacgtcaaaaccaaggcaaagaggaagaacaaggtttgaactttttgaatcccagctttatcttgtttcgattctccaatctgatgttctcaaaccaaaacctaattgtgtgaattggatttatttttgtttggttttgaattataatagaagaaagcagaggcgtcttcttccgagataccatcgataccaactagggtttggcaaccaggtgttgatacccttgaagatggagaagaacttcagtgtgacccttctgcttataattctctccatggcttccatgttggttggccctgtctgaggtaatatcatttctactcctatacatgtgttcatgaagctgaaagcgtgagacttaagggataattcaaatgagaagcttcttctttgtttgtcaacagtgtaaagaaatgtgtttgcaagtttacgattcattaagttaagaaaactactgtttgtgaatgattacagtgaaagttttggtgatttgatggctttcaattatttttctcaactttgacattttaggtgataacgttgggtttgaaccgaactgagtttcctcacacactctatatggtggctgggactcaggtaagttttgaactttatatatcttcatat

SEQ ID NO: 55244 - DNA, 823 bp, Arabidopsis thaliana landsberg
ccacgtcgatgttcttcagatgatatatatccattatagtacacaactccgttgatgcaataatacctacttgtaggtttatgatcagggctgttttttatcaccctccatgattcttgagatcctaatgtaagaatatgaggcttttgatattcgtcccatagcgtatttaaatttgccaccgatagaagtttatatgtattctccttaggatcatatcttaaatagatttttaggggcttagagattttaggttgaagcaaggttatatgttctttcagaagcactatagttgtaataatgacaatcttctgtagggggcatgttatgaaaatcgttcacatcagaataacttttaaagttctcatgaaatgacaacatgtataagacctgcttatgctggtcatccttggccataaaagtaagaagaagactctgacataggattgatgattgtcgaagggcaaatgaattgatgaaatcttgttgggtggttatagaccaccatagttttgatacacaacgaaatcttacgatagattttgcaggcagtctcattagtatctcccaagtcagatcaatgggaatatattcatcagaagatactccattacaagttgatgaagactttgtaattctttgtatttctcttttcttctcttctcttttttccatggctcctaattttgcttctcttttattttgtatcttcacttttaacaatgtatatatattatgtagacatattatgtagacaaaagatatatatgttcatcatatccatgtggatatctgtttgtattagactaaagcacataaggtt

SEQ ID NO: 55245 - DNA, 342 bp, Arabidopsis thaliana landsberg
  unsure (1)..(342): unsure at all n locations
aacttctcaataactgacgattggaggccttggtttgttaacaatcaagtganngtttaggcttggacaaacgccaagaagangacactagccactaccaaagcaagcgncnacccctaaaagggcccgagccaaacacagncggggacaaccgacgcnacaaccagnagaaaaaagcacccccaagacacaaaannggagggaggagggcacaccgcagagaacaaaccggaggaaagccncacgacgccccaaaggcggacaagaggccgaccccnctagcaccaaaccggagaggcgcnaaagagggccaacaaaaaccaaagaaaagcaaggcccaaa

SEQ ID NO: 55246 - DNA, 337 bp, Arabidopsis thaliana landsberg
aaggccgaaaatcacatcatgtgtttggtttgacttaaacgtcactcaattggactttgttctaaacgaagcccagggtctttaccaggtgagcttagaggtgtttaccagatgagctaacaacactcgattattgaaaagtttgtgccagtctaaacaaaacagggcaagacatataaaattctgtctgtgatcttctacttggggagtcttacaagtggttctgagagaataagcactcttgctttaaacacttaaaatctctataacaaattattagcggatgttcgtcaagtgtcgaactggcgcgagatgtaccgattagtagcgggaactt

SEQ ID NO: 55247 - DNA, 512 bp, Arabidopsis thaliana landsberg
tgtcctcatcatctgagagggtgccggagatcctgtagatgacgctatctatacgatccctgcatgaattagtgtccggcgttgggtcagacaagacatggtcgatgagggcataccgcatgagagcaagcaacacttgattacatcagcaggcataattgttgaaggaggacgcgaggatgacaatcaccaatgatcgaacgttgggagcaacggctgtctggatgtggaggttggcgacgatggtagcctcgtaagctgtaacggggttgtcctatggggtgcaccctagggtgtaggttcgacaaccgtggggtgctgtaggccgaaatctttgcttggaggcagctgccttcttgtctgaggataaggatggttggctggacacgagcgcgtgcgttggcagcctccttgtcccaacctaagctgcagcaagcatgtcgtcgatcctcttgcggagggccgtggcctccttagtgcgtgcacgatcctcaacattcgatggggtccct

SEQ ID NO: 55248 - DNA, 349 bp, Arabidopsis thaliana landsberg
cttccaatcaagaaggaatagactgcgaaatatatttttaaatattcacgccgacaaaaaaccttcagcctagaattacacatcatgttgttgattgggagcaatgaaagagaaatgcaacatttgcggacaggctagcctatgatgggctaattagagcgtgctgtttgtataaggccactgattcatcgatattagataaaaccttacttaattcatttcacagaaggaaaagtaaacgaatccactggggctaactaataagttaagcatataagtggtcatataaacatggttacctcgattctatgaataaaccatctactattgtatgaatatgaagattagc

SEQ ID NO: 55249 - DNA, 1009 bp, Arabidopsis thaliana landsberg
taattttaatagtagagctgtatattagtggatccgatagcatttatagtaaacatagttaactcgaaaagagctacattcaaaattcatgttgttatgatctcctttgcgagtagaatccttattggggttcatgttatatcctctctgtatgatctacagttaggttgaaattggatttttgtttctccatttttcagatctctgatcagctaaagagccgtttcaattctgggctttctctgcctcaactctcagaaaattttgtgaaagcggcatatgatcctcgtattgctggagtctaccttcacattgatcctttgagttgtgggtggggaaaggttgaagaaattagaaggcatatcttgaattttaagaaatcaggttactcctgaatctacattatctattgaatatcagagtttataattttccaattgtgttcatacatgcttcctgtgacctaatcatacacatcttgttaggtaaattcattgttggatatatcagcatttgtgggctaaaggagtactatcttggatgtgcatgcaacgagctctttgccccacctagtgcctattcctttctgtatggtttgactgttcaagcatcttttcttggcggtaagggattgtcttctttggctcaattttttcacttcaaaagtggtcattaaatatcgttcaatgaaatcatatgcactcatactgtgtgcggaccatccttcatttgttgagaaagctgttgttgaaccgcaactcggcctcttttgtaatttaatgtgatcatatctcacttccctgttctcgttatcaaaggtccttaatcggatttcaataattacaattttacaaagcagtaattggcacatttatcgtgaactagttatttttcaaaaatgtaggtgtcttcgaaaaagtggggattgaacctcaagtacaaaggattgaaaaatacaaaaaagctggagatcagctttctcgcaaaagtatatctgaggaaaattata

SEQ ID NO: 55250 - DNA, 757 bp, Arabidopsis thaliana landsberg
aaaagggatctatgatgggcctaatggcccaacatacgtctgaagcccaattcattagttttcccaacttttttggtatatatatatatattctttttttaatcattaaaaagcaaattacagcatcggagagaattgtactataactcgtataatataccaatgcatttcaaacccaaaaaaaataacgacgaagaatgaagaataaatggcaaatgttcagcagagccaaagacagaataaatactccaactttcaattaatggtctgtctttgcatcatttctattaaattattagtgggcatatctcataaatagatgcctacaatactgtaaatacacatagaataattcccactttatttttctttggtcattaacataaatcaagcttaaatatgaattcttcattcataaattcattccaacactactaaaatttcaccacaattcaataatagcacttctaacataatccctatattcaaactcacacacactactccataaacatttttcgagcatatagtagggtaattacgtaaaagaaatatttaattacactaaaccgtcatcatttgacgaaactcatgaaaatcaagaactccattaccatctatatcgtaatattttatcatggcttcacacttctcgtacgttcttgattcccctaacttcacaagcatcttttgcaaaccctttggtgttatgcagcctgatcctttttccacctcgaacatctcaaacgctgtcttc

SEQ ID NO: 55251 - DNA, 582 bp, Arabidopsis thaliana landsberg
  unsure (1)..(582): unsure at all n locations
atctccatttgtaaactcaatgaccttaaactgcttcagtaaaaaaagcacacctgccgccatttgnatatactcaaacactacggatccgctcctgttatttctcaattgggtattcattgtaataaaagtacgtttttacaagtacgatacaaatgtagtatcgcccggcgctgcgtaaaagtacaaataggcaacaggaaatacaatgtcggtgaagtagaggaaaccgtcggtaaatcagcagctctttttagtgctgcactacgaatgactgtttcaggctgccgcctttgctgccccggcattcgataaagtagatgccgctgctcatctctgctgtcgggattgtgccctggtacaggtctgtgacagtatggttccattggcggtacacgcggccctgcaggtccgtgacccgcgcgctgaaggcctgtgcctgttcccagttcagcgagatatgcagctggccctgcgccggtaacgggaacaattgcaggctgccttttgcggctgcgtttaccgtgctgacagaggtaggagaataatcctggtagtagtagtggaattgctggttgccgg

SEQ ID NO: 55252 - DNA, 1162 bp, Arabidopsis thaliana landsberg
gcaattagcgttccgtgatctagacgaagatatatgaacaggcagctcttggaaactggttcgagggtcttcaggatattgatacagcaggtcttgatgaggttcctatggatgatctctcgtttatgtttggataaggagaaaacaaaccacatttgacaggagcgaaattggtcttgactcttgacacaaacacccacacccacaagtattcttatgattttgttttctaactagttttgtatataaagaaagatttgtagtgaataggaatgattgtctgccttctaggctgagtattgtttcaactatgatttaaaatatatatataacatatgtattttcttcttcagagtatctctttcattcataccttccctgtggtgcgtatagaaaaagcttagtacaatctacttaacatttcttgatttggttaaacaagttttgtttagtgtttaaaacctttctgaagaaattaggctttaattcgcagaaataataaggcctataatattttatacgtttctatgtgggcctaaatactgggctttaatgagaagaaatatttagggctagagttttgtcactagtggttcatataagtaacagacgattgcttgtgacgccgttctttctctgtttccgaccttcccacaggtaaatcaatcatcttcttcaatacttttgtgtttccgtccatcggaggattctctatacgtttcgttacaacactgttaaatctcattttcctgaatctccgtttacaggaagcaaatttgtttcagggagtaccaaaatgaggtttgtttactcaaatcaactttattttgttttctgctaatgattcagatgaatgttgatttggtataatggtagataggatttgaggtgaaaaagtttgattctttatacaaaaaactattggtcattgattgttttcatgaggagggaacaaaagttgttgatttcatagtaatgatcttgctgtcattttgggtttatagaaaggttacaaatttgagtttttttttaatggtgtagtaagcttcagagtgaagccgtgagagaggcaataagctccattatcactcactgtaaggagacaaagccacgcaacttcactgagactattgaactccagattggtctcaagaactatgac

SEQ ID NO: 55253 - DNA, 870 bp, Arabidopsis thaliana landsberg
aagagcacacaaaaccacacacatactgttgggatttggacacttcactctcctttctctttgtcagttgcttcttgttctcgaatttttgggatttggacattttttcttgttatcttttgcctaattatatggccaatttattcaattgcataagttttcgaaagtattgtattatgattttataaggtagtgatgtttttatttgctcctggtgaattttaaatattcacaaaaatcgactcaagaactaataaagaataaatcagcttataaaagacccctctggcttttcaactcctccaatttctattttatgcattcaaaatgctcactttagttccccacttctttttcagatactgttacaatcactaaaacgatttgtgtagaatagattctacattacaaaaaaaattaaaaatataaaagcatatacattggttgggatatttttgtataaataaataatgtgatcttattagagggtttattgaagcatgagcttttctcataacggacacaggaaccaattagacatttgagttgatttgaaagtcatttgattaataatatacaaggtttggttctcttttcttcacataaacttgtcgcttgtggcacaataatcttttggattcaattatccaaatcgttaccccaattgataaaagtaaatatattacggtaaatacaaattgtttatataggcccataggtatgaatatgggcttatgtagtatacatcgggccttcacaataatatgggtttcatgattattattaaagcaataactgatttctcattaattacgtcagagagaaccaatgcgcgcgtttacaaaagtaattaaaaaaagaagttcgttt

SEQ ID NO: 55254 - DNA, 741 bp, Arabidopsis thaliana landsberg
aatatactattttatgaaatttaacttcatcttgaaaaccaatcatccttattttcattacatcctttattgaattaaaaaaaaaaaactttcattgcctcgagttggaaactaatgtacatatttagacgttatatatattattaactcaattggttaattttattgacctaaatgttattctattttacgtttgcgtttttttttttttgatatatccattaattaattgtttctgtttatagtccaaatttttttttcataattaacagccataaaatattctaaagtaggagaatttcagtattacacatatatagcttattttaaattttcttaagagattacaattacataggatttcttttttcttatgtgtgatttaaacacgtattccctcacactcacatcgtcgtaattaaacctcttagtcacattaaaagaaaatgttaaactagctggtttattattaaaagctggagagtctatataatctccatttttattcattactttatatcatattgtaatggttaattaatcttatattaattagttaaccgcagaacaaaccctacgaatctccccatccaaacccgtcttgatctcgatttgactcatcttggtcatggacctcgcgaactccagtccgaaaataagaaacggaaaccgtagtcctagaagcctttccacgatgggtcgggtctcgagattagtccataggacctgatcagactcgag

SEQ ID NO: 55255 - DNA, 774 bp, Arabidopsis thaliana landsberg
  unsure (1)..(774): unsure at all n locations
aacatcgacattatcctcagtagctgtgcatgcgtattcccttgacgttctgaaggctgtcagtattttcatttgtcagtactcagatgaaaacactgtgacttaatagtttgaagtgttataaacaatagcttcacccacctctctgcaattttcaggaggaaggcagattttgttttctcaactgctaaatcatccatgggccagttaccagaaccttctagctgagatagcaaaagaagaataatgacaggagtgttaagatgactaattaagacaaagtaactatgccagtaaccatctggtgtaatgatcacacctgaatcatgacttccattgctggaatgcaggatggtataagtttttgcagtcttcgcgaatcgattttttcgcaagccactgggtgaggttcaggagggaatacggatgtcaacctgagagctgcaagtcacgaggaaaatttaaaataagaaactacagatactgaaaatatcagtgccagtacactcttgtagtttctaaattttaacaaacctgaatctaaagactgaacgctagagactttgagaggtatgccttcaatctcacgcaagcactttgataaaacttcataggcttgaaccaaatttccagataaagatattgggtctgagacataacagcgttgttgcattagattgaaactataagcagacagcgcgcaatgcattgagaaaaagagggaattttttaattctgtgtttagcagtacctttgccncatagtttagagaga

SEQ ID NO: 55256 - DNA, 980 bp, Arabidopsis thaliana landsberg
cattcttctgcttctgtagattgcgttgaaccaagcgataaattcagcatttaagggagagaatggagaaggtgatagctcactggacgatgtgattcaagaacctgtgcttcaacgaacacgtaaccggcctaaacgtgaagtttaaaaacgcacacacagcttcttcatgatgggaatagacgttgtaactgtaatacatgttgtgttttgtataagaaaatttaagcgtgtagcctttcctagtcccgtttatagttgtagttactggttttacattaccgtttgatcattttctaaagaaaaaacggatgatgaatcaaaaacctcattacagttaccattttaagttgagagcagattattttattgtggccgagctttcttctgctgtaaatttgtaattttggaagaaatagaaggacatcttttgtatgcttccattgaccaaatactgtttcgtgtaatagtctaatccgttttagtttgggcttttaaggcccagtatgagttgtctctttacttttgaagtagtagtgtttaggaattcttctcttcgcttcaaatcgacgtctgtgtgaggttaaatcgcgtcgcgttttcatctagcagttttttttggttcaaacgaacgagacacaccagctaaaggccatttgcgttagatctaaggagagagcgacgtatacgtggtttcaagcaaattctccacgggaaggagattaacgagcaaagtcgatttcagtctcctttgtggagttttctcttcaacggatcgagggtatggtttagctcagtttcgtgatttctagcgtgttattcatcgagttcctgtgtgtaatttgatgatctccaattgtggttattgcaaacgagtttggatttagcttctgatgggtttgtttttcaattgaatctggagattgattttcgtttagctgctgcacaatttgggtctgtttttttcaaaattaaagcca

SEQ ID NO: 55257 - DNA, 648 bp, Arabidopsis thaliana landsberg
caattatctagacggaagatttagcgcaaataacataaaccccagttttcaatttctagcctaaaaatcagagaattgaccaacagtttacaaaaccaatcggagaaaacacaaaaggttactattaaaagtggaatgaaatatttgattgagaagccaagaaatttacaaagtcgagaactttaccttgagattcttcttctatcagattgaacgatcgagcagagagtgagagagagaaagagagatttgtttgctgaaaagtcttgtggggattagagatggaacattaaacccattcattaatatgggcttggccattcatggttgggctattaggcccaataagatacttcttatcaaatattttctatttttcgtaaatttaatcgcgccaaaaagaaaataaatatttttcctattttcgtaaatgtctgtctctgcttttcatttgtagagctagctgtctttcagtatcagagtgaaattttagggttttacaaaagggaggttttttgcttcactctttgcttatttgggttctgggttttgattatttctacaaagtaaccacatttttcactttccggagatggagctgcaaacgatgaagataacgaaagattgtgtagttgaagtcagttctga

SEQ ID NO: 55258 - DNA, 971 bp, Arabidopsis thaliana landsberg
gggactcacatgctaaagcctggtgacctagaagcttttgcaaatgttgaaatgtacaaaagaatcgatacttatacggatcttcgagaagaaagattgtttaagactttaagtgtatacatcaatgaaacagaataagttaaataccatactttcatactccttatgttttcatcttctttgtttcttttggtgttgtacgacttaaacaaggcaatcatgtacaacaattcattccgagtaaggcactaacaccaaataattcataaaacacacaagggatggttcaaacaatacaaggctatatacccttagactcctagattagtgatttcctaatttgctggcctgcaaagaaattctttaacataatttaagccaccttgcattggcagcaacttggggactttatggttcttcattggatactcctctacgggtgctacccgcttatttgtagttccaacgtttatggacgaagataaccttgacccatagaaggacgttagttgctcgctggggttgacgaaagacaattcagaacaagagttctcagatgaactttgagcccaaggagtctgtgaccgtctagcacaatttgtactcgataaaggcaatccgaaagatcgttttctagcatcaggtaggagaccaatatcaacattgttataatcatatggaacaaggtaggtgttgctggctgagtgtgaaactgtttggtggccctaaaccagacccatgtaagttgagattcttctcacacaaaggcaaagacgcgagcgagcaacatggattcagcattgtggaagataattatgaatcaggaccagcatatgctctggattgagaagccaagctgacaagtggttcacaaatcaaaggaaagggctctttctgaagtatcacgtagcggagctttgttccaattcttagccaagattgtggttgaatgattgtctcaaacctcaaga

SEQ ID NO: 55259 - DNA, 440 bp, Arabidopsis thaliana landsberg
ataacatacggcgaatcgtggggctttcttttcataaaacatactgtagtcatagcttagctttaggaccgaaccccaatccaatggtggtacaggtccctgagtctcctgaaccactctgtgcctttggtattgcatgaaaaactttaaaagaaaaatacatgccaaaaaatacgaaatttagaggaattaccaacaagtttgtggcaaacgaaattacctgatgtggtaaaaagtaataaagtactttacattgctcaatattattatttaaacaacttggggcaagtatacaaaacacaaggagaagcaaagcaactgtatctcttacctacaaacaatattcacataaataatgaaagaaaacttgctacatggaagattctataagataaaaactttgctcttacatgattgctttgccagctaaaacaaaaaac

SEQ ID NO: 55260 - DNA, 1035 bp, Arabidopsis thaliana landsberg
  unsure (1)..(1035): unsure at all n locations
attagctttccagggctatgaaagaaaccccacacagcattttatatcatcaataaatataattccacagctactgggaataaaccagtatcgaagcatgaaactatcattttaagaagacactgcacatgaatgagatcctaacaaggatatacctgcaataatgagaacttgaaaccattaatctccactatttgttcagattcgacaaaattagcagcgtccccttcaagattggctcctcttctccacatacgtgtacctgggatgccaattccaataagactgtcaaacaaacatggatgccactgaattttctggcagaactaattaaaccctacctagacgtcgtgtacagcgcctggacattatcgataccacagcaggagaattcttgagctttagctcagcaacttggtaacttaagccttggttaatatcaaacaacatgtattggagtactgtctattaaaaagcatatttgaaaaacgcaacattacatctataaacagtccaagaacaagctaaacagaagattaagaagataaagaaaaggatatttccttgaagtataggaataataaaaccatccagctgccacaataagaaaaggttagatcattaacgtttgacaaggaatgaaaatcaattagatttaaaccacacaacttactttgcattcaattaagtcctccaaaagatgccagttccaaacatatcgagggtcagcctgacaatcaaataaaccttcagcctaactttaacgcgatgaacttaaattcagacnctggatccaaagaagataccttttttaaagataaaaaatcatgcgaataaacaacctgcttccacataggcttacgattccaaccttcagctagcttgcaccttctttgaagactgtaaaattggatgaatgtatctaactcaacccgcggaactacttaaaactcttaataacataagatagtgaaacttacttcaatgttagatctgtttcatacgataatacgaatccaggggttgtctcaagtg

SEQ ID NO: 55261 - DNA, 1340 bp, Arabidopsis thaliana landsberg
  unsure (1)..(1340): unsure at all n locations
agaagtttactttaccgcttaccaaacagcatgctccctgcaaagatcaaactttgcataaattaacaattccatttcacatctttgtaactcggaacttgtcacaagtacaatctcaaatgcacagaataaagagacgtggacaaaccttgaggaaatgtactgcaagttcagcttggaaaccatcgcccatttggacaagggcatggcaggtttgttccgaagaagcttaatccttacaatgttcccgtaaagagaaaatagattgaatagcttatcctcatcaatactctgaaacaaattaatctggtatgtttggataatattgtaagaaaaactaacttgtcaaaagcaaaacgggaaatgaccaacttacatctgcattgaggttagagacaaggactgtacacctatcatttgtgccggttatacccggaggcaagcctcctccaaaagcagctgcaatcgctgatgtgtttgccatctagtttttaagtaacagcacacgaatgagattaactatgcacataatcataacttttaacgaaaaaagaaattaagaatggacaaggaggttagattctggcgatatcttgaccgatcttgaccaaaaaagagttgctaaaactgtgtattacccacctgaggatatgccactgaaaaatagaaaaatatggattagcaaaagacaatagtgtagaagaacaatgcatagagttactatcaggtaaggcacatacctcctgtatcaccatagccaggctgcaagagaagaaaatcagaacattaagacgatataaaagggcacaaatgcatatgtagttaaaaagtaaaggaggtcatacatgcgatgaacggcctttttgcttctgcaggcaggtttggatttgtataatccctattcaaaggcaaagcaaatcagttttatgcacaccaagataacatcaaattgtgtatccgcagacaaatgaaaggcaaggacacatgatcaatacctagatcgatcattgttgtaatttacttgcagctcctcaaggctgaagatgaaagaacaggtcaatactgacaacactagagcacaaaagtgtagaagctaaccatgtcacgataaatgtcataaccaacatataaaagcaaacatagcatactttgagaactggatgtccgactgacaacacccgtcatatatgttacgaccctgcctcagagaagatgacaggtcttatttcaattattagaaaaataaggcagacctagaaactttttttggtagagtgttataaaagggaagtctagaagncaagtaccagtagagcagttctagcagaggcagcacactg

SEQ ID NO: 55262 - DNA, 906 bp, Arabidopsis thaliana landsberg
accgggttaccgcaactctcaagtctgtttatccagcaacttcgaggtcgttcttcagtagtctctgttcgtgatgatgtgaattcgttggtcgtcattatcatctaaatgagattttgttgttttttataaagtttaaggaatccgatgattgttttatggtagattgatttgatttagtttagttcgataattctttcattctttatttgattatatagattcgttggttcttttggggcaggggattcaaattcatttcattcttcaattttttcatataggattcactttgatttcactaaaaccaaaaaaaaaagattcatcggattccatttttttaattgtttgagcaaacacacacacacttgtagaccatctcttgaattgggttaggtagatcttgtcgaggatgttggcaggttgcttcgagttcatcattgttgtcgcctactcgaagattgaggagtgaagcagtagcagcaacatcagcaacagtatcagcgcattttcccatgaacacacagagattggacttaccatgcagtagtagcttctctcgcaaggaaactccttctagcagaccacttggaagaagcatctctcttgacaacagcaacaacaacaacaacaaaccgatcgagcgcaagacgaagaccagtggttgttcgcttaaacagaacataaagcttccacctttggcaacaacaagaggaaatggagaagggttttcttggaacaacgacaacaacaacagagggaagagtttgaagagattagctgaggaggacgagtcttgtttgagcagagcgaagaggacaaaatgcgaaaacgaaggtggtttctggtttgagcatttcactggccaggattcttcttcaccagcattacctttttctttgactt

SEQ ID NO: 55263 - DNA, 739 bp, Arabidopsis thaliana landsberg
actatccgaaagagagtagatgtacaatcttgtcgtagatccaaagactactacaatattgtttacttgactaatacattttgtggtaatgaaaaaaaaaagacaaagaaaataaaacatgtaccatgtttattaaaattttcctatgtgctaagatctacatacattatgtctttatcgacaagatgattaagtacccggatcaatcgaaaactgttttctctactacactgttcgttttcaaataatgtggacattattcacatttttttgacatgacattattcacatttattttttaattttttgtacattaatccataacatattaacatccaaaggcaattataccctttttttttaaattagaaactttaaacataaatagaaaatgcgagtaaaaagaagtacataaatattgaatccataagaaaccaaaagcaatagggagacctgtcaaagaccacgtgaccttgtcagtcaaacccggacccgcttttaccctaacccggaccgacaaaacccatctctcgccactcattccaagatctttaaccgtacacgtgttataatctcaacaacaaaaccaccttcagctaaacaaaaaaatctaatctaaagttaccgttaaaaagtacaactgtagtagtcgtatcttaaaaaataccactctctcgggaactacattattaaccttttccccaaactctttacttcttccaagattccccctaattgt

SEQ ID NO: 55264 - DNA, 945 bp, Arabidopsis thaliana landsberg
ggatatataaacatttaagaaaattatggtatcaaataaaaaccactaaactaatcgtctttcacaacatatgtaatcttttttttagttgtgtgtgtgtaatgtgttctattctccttaagtatgagcaattaaagcaacatctatctaactactaaaagtttacacgacatgctaaacaagaaaccttcctaaaactatagcaacaacatttttcttaaatatatggagatatagttttatttttctgtcctacggtcaaattgagcagaagaagacaggttaaaggacctaccttttgtaaaacccaagaaagaaaaaaacacattttgagcaaaggacagatttgtcatttttcgttcatgattcagatctaatttttcaacctacattaatgtcacctaatctttgcacaaatcactagacaaacacaaactaatccgctaatacaaaagccacaaaagaaaataaaaatccgattcttataaagaaagtagttttctgatatctaatgtaagattattattttcaaactacaagttaatgaaatttgaataatgataactacaagttaacaaccttgacacaatccccaaatttccgattaagattacgtaatatttttaaaaactgtttaaaaaaataatcgagttttaccagggatttgcacacaacgaccgtatcattttcccttaattgcattgattacaccaatttaaaataaataaaataaaattacccgttaaaataagtttctaacccctaattaacttttgtttatttagtactactactctattcaacgtttcaatttccaaaacaaatctcatttattattaagggaaaaaataaaacccaaaaataaaaaggcaaaaataacaagtttttttacctttttttaatatgaaaaatccaaaaaaggcacaaattaaaaatttacttgtt

SEQ ID NO: 55265 - DNA, 851 bp, Arabidopsis thaliana landsberg
cacacgatggttactttaatcttgagcaagtctcacaaatcaaggtcctaaacgctatacactggagcagtgaagatagcaaaacaagtttacatatataggccttctttgtcttcaattttccaaggtcgctttcctttcatctccctgagtatgacatgtggggagttttgcatttttgatattagagtgagatgacacataattcataatcaccggtttatggattccattgcaagcctcaccacatgcaacagtttctccatgtcctgaaaattgaagtcaagagcccttttgatgcatgttataccattactactgtatctcgtttcaaacgattttccctttgcagctgctaatgcaatctgcgcttttcttgatgcttccatagcgtagtttacgtttttcgactgcaacacccaaaaacaaaacacattcaaccgcacgattgagattaactttgactccagggaaatacttggtatatgatgcaagattgttacgcaaaatttgatatgtttgatgatggttcctattcatgttgctcaagcaagctattatcccactacttcactaaaaacctgttgatatttccatagacgggaaatatttagtcgtctaaacccagcctaactaactggagcagctacaatgttttgtaaacataaacttaagtagaaatttttttacggcacctcatcaaatcacaaaagtaacctaactgaacttacaaatgccaaaagctgtgaaagagaggaattgtttcctgaagagataacatggtttccggttacgctaggggatgatctcacagtgttggacaaagcaaacttttccgctgttaatgtgtg

SEQ ID NO: 55266 - DNA, 588 bp, Arabidopsis thaliana landsberg
  unsure (1)..(588): unsure at all n locations
tccatagtagatataaaaaaaatactcgtacgtggggatgaggtcaacgagagtcgagactcatcatgggagaataataagagtccacgcggcgaatccatcactacaagaacactaacaactatcgattaaaataataatttacataacacagaaccagataagttattggtattataacattattcattcattcgtgagctttatacttttgcttagagggaatcaagaacagctaagacaaccagcttgccactttctctgtctctttccaatgttcttttgtttttggccaaagaaatagatcaatacatcacaaaattctactcattattttggatgatccgcanaatattacatttttttgtaacttgataatcgaattttgagaggaacaaaaaatttaagctatattgcataaaacttggaattattcttcttccttttgttttgtcaactaaaacttggattattcaatcagggtgataacgtaataatccttataatctttaacaaaaagtaatataatcttagtagcaagaaggaagcataaaatgataaatctgacaccacaccatgttatgtttc

SEQ ID NO: 55267 - DNA, 749 bp, Arabidopsis thaliana landsberg
tgtcacgaaatttacaagttaagtaggcaatcccattttttttttcgttgatcaacgtcaaccataattgtgttttcgcattcaacaaaaaaaaatttgtgttttgaataaattacacaaaagtataatcatttgaaacaataaataaagaatatgatttatgttatatttataaaaaactgcccatatataatagtattttgtaaatgaattactatatcattttgatacttgaaataaaacagttatagtagtttgtaaagtatagtactgttgtaaataataaacgatatttgaaatttagctatgcaatttgcttgtatgtgtatatatacacacattctatttgtatagatggccaacagaaatcattaactttattccccaaattattgacaataatagaaagcaaatatataagattaaaaaaactttgcactataagaaacacatgaacacatggtcaccactacagcatacaaaagttgagatcatcaaaagctatgcttattacattttcatctaattaagcactgctaaaaaaatctacgagacacattaatcggttaagtttgccttttaaaaggaagaaagaaagaaaaaaaacaccgatgatgatgaatctctaaataatcccaattatagtatccaattgcaccgattgatatccttgtgctagaaaacacaaaacgatccaagatcatctttttgacgatctagaaaagaagatacttagttctgaccgaaat

SEQ ID NO: 55268 - DNA, 420 bp, Arabidopsis thaliana landsberg
tcgtgtttggtgttgattacgttcatgatggggcacgggcttgccgggcacttcgccgtttatctaccgtattggagggcgcgggcaacagctcgctgaagtcgccagtaagcattttggctgtgggaacggttccggaattcggggtcacgcgccagtcggcctgctgatatttttcataggccgtgaagatgaacattctgcgcttccgccagatcggaccgccgccgctgtagccgtagtcaaaatagcggaccttggcacggaggtatttctggttgcagccggcattgccggagggacactgcgacagataccagtcatttttccaggtatgggcattcatgaattggttggcgagaaatccaaaagccgcgccatgtaaaagatcaggccccgacttcatctggtagagaaagg

SEQ ID NO: 55269 - DNA, 1252 bp, Arabidopsis thaliana landsberg
cttatatatctaccttcgaatttaaaatgctaagatgctttttctatatataaagattgtctcatatggtgcttcacgagtcaatttccaaccaaccatataacatacatgatataggtgatcgttcaatcgtagtggtaacatgcgcctttggtcacatagatcaatcatgactctcaacaccctattttgtatctaataatgatttttctatatcttataattttcttataggttcatatttttcttatgtttagagatcatcaagtagaattaaatgaaaactcgttgaattcgttctagcgcgttgcgttaatcaaatatcacgggagttaaccaagttggtgaacctttttcaactcttattaccatatcattggtagatatgattgtttttcatgcacacatttaactatattataatataatagaacgatctcatcatttatagaaaaatgaccctattgttgagtatgacgctggataagtcatgtagtaaatacatattactaatattgatatttatttacttattagctttaaattgatcatccacataaatcctctgaattttatcatcagtgcaactgtgcaatgatatatatagtgaacattcatgaatgtaaagaactaaatattagagtttactcattatatacttactaagtattactttacaggtttcgatgggttattacgatttgggcagttatttttgtttttgtttttgtttttgttcagcttaatagatcaagaggtcaacgtggctaagaaatctaccataagtcgaggcttaataaagtcgaaaagaaacattaatttagttaattgtattatatatgtacgatagtctaatatatctttgcaggttagagaagaaaatcaaagacgagagatctgaaatatcctaacgttaccaaacaaaagaatactttttctatacaaaattgattgaatacctctctataattgatattatgtaacttatatattcgtataaaacacacgtccacgtattcgtacagagtgattaacaatatttaattatacatataaagaaaacattatccttacagtctacagaaagaaaggacaacgtgaatgatatttccatgcatgagatattttcacgatattatttttggatcttaagccgacaaaggtagtgacttttctaccttaataatacaataagtactcaacacatcataatattcgaagctaattatcgctaatcttggacatcaattat

SEQ ID NO: 55270 - DNA, 501 bp, Arabidopsis thaliana landsberg
  unsure (1)..(501): unsure at all n locations
atcccccaannnnnnnnnnnnnnnnnnnnnnnnnnnnnnnnnnnnnnnnnnnnnnnnnnnnnnnnnnnnnnnnnnnnnnnnnnnnnnnnnnnnnnnnnnnnnnnnnnnnnnnnnnnnnnnnnnnnnnnnnnnnnnnnnnnnnnnnnnnnnnnnnnnnnnnnnnnnnnnnnnnnnnnnnnnnnnnnnnnnnnnnnnnnnnnnnnnnnnnnnnnnnnnnnnnnnnnnnnnnnnnnnnnnnnnnnnnnnnnnnnnnnnnnnnnnnnnnnnnnnnnnnnnnnnnnnnnnnnnnnnnnnnnnnnnnnnnnnnnnnnnnnnnnnnnnnnnnnnnnnnnnnnnnnnnnnnnnnnnnnnnnnnnnnnnnnnntgacaggttgatgcttgtagaaagagggtttttggatgcagaatggatcatagggaaggaatggttcaagcatcctgtgagtaaatccatcgtactcagtcagatttcacgaatcttgcagacctcatgagaccttg

SEQ ID NO: 55271 - DNA, 1138 bp, Arabidopsis thaliana landsberg
tctaggtttttgacggaagaagtgaaggctataatcacagaatggaggactctgtcacgcattgtgttctagtatgccatatttaacacttgtcaatatggcttcgaaaaccgataattttccctaactaaaaataaaataaatctaagtggccacctaaatgtgtttagttattatcatacatgcatgcaacattttatcatggcatgtgaaatgtaatcataatggaggatagactgcttactacttaaaacaataaactactaattatcagttttgaaatgatttatttttgtttaaagaagagataatgttatataatgttgtgggagacaaagatagatccaagccaggtaaggttagcttgttgatctaaattgattaaagcatttgttgaacaagacttcgccatctgtaccacccattcttctttcaattatggattataatttagtaaatatcatatatatgcctccattataacttttattattgacattattgctttcttaaaagcaagtttatttaaaaactattgattggtcattgtgaaacgttatatttgaccgtcaataaaactatacataacgcaatacatacattattatatcaggtaaagactaagttatattagtatcttataaaatgacaataacatgttctacgtaaaaaaaggacaaggattatcggttactttaatagtttgaatgattcttgatctaataattaaaacattggcgttagatgtaagtttttgaaatttaaattgattttaaatgaatcagttgatctagacaattaatttggtagaacaccgatcagagacccttcttccagaaactgtgattataaaacgtgtactaagagacaagtaaaaatcttcgtttttcttaatttaatgcatagttggctatttgcgtgcatcattatttgcacaatagtaaatattcgattcacgtcgtgtgcaggaacccattcttttatcacttccagtaacttatgacgttttaggatatgaaacatatttcaccgttgatcttgttttcttgttgttgtttaatatcattcaccgttgatcccgttcttgagtttttctttgcttttcaattcgaatttatgtaaccgctaaaaattaatg

SEQ ID NO: 55272 - DNA, 605 bp, Arabidopsis thaliana landsberg
ttttattgaaattttacatgccacataaattggttaaaatacattttcttcacgtttctcgctttttaagtccctttgaagtgggaatgatactcgcgtgacgaccaaactccatcgagcctctctctctctctctctgtgatcagtttaatctactgaaagaaagaaagaaagaacgaaagaaagatccgtattattaggtaagaatgagattcccttttacgtttcgattttgattcgtttgtgtttgattctcgatcgttttgcttcgatttagcttccttctgtttttacaagtctctcttgattagaaatgtttaggtttcaatgtttcatgatcatatttagaaaaaagtttcatggtgaccaaaaaagaaagaaaattttgatggctgagagatgtcagagtcttgttttgtttttttgataaattctctgtttgtgtgcttttaaaaagtcaaatataagaaattctttgaatcatttaaagccgtatttatgtccttttgacaagtcgatttaatgctttctagaagagagtttatcagatgttaagaagattcaaagttggattataacgaaaatttgtatacctcattagagat

SEQ ID NO: 55273 - DNA, 1212 bp, Arabidopsis thaliana landsberg
tttgtgtgtgtggtgagtgtgtgatggcaataattattggaattgaaatgtaatttatgtaaacttctagatttcgtatgctttttaactctctaaaataattgagaattggataatatccgatgattaagatagcatttacttacaagtaatgttttcgatagaattaatggtcactatccaaattccaaaccatacgctaatggcttccaaaggaaaactaagactttatggagttttacataaagtcttcgttcaaacatcattttcataagtcttttgtaactttcttcctcttaacggcttcctacaatatctcgatttagaactccaatcaacatctaatattttgtctacaactttatgttttttcaccttactatatgatgtagacaatcttttgttaggtaaagtgtctagatattctttcacctaattaacacggaaacgtaaacttgtacaaaaacatctattgattatagaagagaaccgagccgtgagagtcgtttctcgtcaagaccgcaccaatcgactcaaacatgagccaaactgtacgtagttcttataaggaacacaaacctccatcgtaaaccaacgttttcgatcggttctagctagactcgccatgcatgcatgtgcgttggtgcccgtaattacgtacaccaatcttgattgatatcaatgcttatatgccgttaatcttcatctcgactctcgaggtagtagtacttgacgagttctaagttcttcttccgttatgagaaatcatatataagttcttctatacatctcgcttgattattataatctttcgccttttaatttctcgtttgattattataattaatgtttataatgaaaagaatcattatttcccaaagcaaacgaatcattttgagatagacttacagttatcacaaaaagaaatctaaacgttttccccaagatttagcctttcgtcagcatgtaattactcgtgacatattctctagctcatatttcttcttcacgcacgagcaaccaattttgttatatatgtataaatcatctttgacaattatatataatacagatttattacgagcatatgaattttcttgaggtacagaagcaaatcaactagtgaaactaaattaaagagctaaccatcaaatcaagtacattgtatttaacaaacaaatcataccacgtgatgacagccaccacattcct

SEQ ID NO: 55274 - DNA, 823 bp, Arabidopsis thaliana landsberg
atcggaccctacacttgttagtttttataaaatccaaactatcaatttcattagaaattatttgaatttatattcttctaaaatttaacacttaaaaatataactttattaataaatattaatttatactctgaaataataatattaatttatagataaatgaatttcagttataaattcataaaatatagtagtcccgacattataaaggttttactgtagtattagaatgcagttaaccgtcggttatctacctctgaatcgaaccaaaacataattttagaagccacccgatcggtttactcacttcatcaagaacagaaccgatttgtcctaatatcggttcggttctgtcggaatcgcatgcctaattaattctatttggcttcatcacaaaccgaaccatcggttattaccttcacttaacacagcagaaaccctttcttcagtcttctcctgcgttctccttcttcacttcccaactaaatctcgccggacgatcgtaaccggagagcttccgtcgaccggtaaaattcgaaacctttacttccaagaacgagtcatttctatgtgatggaatcttcttatatcttcacgaatcatttgaatgctctgatttaggtagattcatcttcaaatctctatgactcttatgaatctggaagttacgatgtatgatgttgttatctgaatatcaaatttatatagattcgcaatcattctctgttttttcatggaatctaatgcgagatatgtaaagttagggtttttggtaattctctaaaatgatctgtataatggctgatttaggtagagtgtttga

SEQ ID NO: 55275 - DNA, 196 bp, Arabidopsis thaliana landsberg
acttgtcataaggggacatgtcttgatctttagacggagccacgaaccaaagctgaagtggtcgatcaacgggggcatatttagccgccgatatacaggcgtgatccacgataacggtaccatccttgatacacgaaaggtgtgcaatgtcacagaccaccccaaccatcattgcatcctagtgcaaccctgacat

SEQ ID NO: 55276 - DNA, 526 bp, Arabidopsis thaliana landsberg
tgcttctgtctttgaaactggcaattttgatcttccccatcatgggatcacggttgaaaacgttatgggcattgtatgttccgcatctgagcttgggaatacttggtgagactagccaactgtttggccgtgccctacacatgatcgatgtgaggagactatggataaaactgagactcaccaaaacaaggaacttccaagaaagagcaaagaacgcacttgcatcagtctcactaggaaaatcttcatcacaatcagcctaaaagggtgatttagaaatccttcactgtcaatgagcttagtttagattactttactttactgtctgtgagagatcctttgactgacatgtttctatacctttggagttccactgtctctgtatgtaaatcctgttttgcttcttttgtgaatattttttcttcttcttttgaatattcatgttcttggtccacttcgttgtgcttacgttttgtctatattgattatggatggtttggttttaattggtgttagagatggacac

SEQ ID NO: 55277 - DNA, 626 bp, Arabidopsis thaliana landsberg
cgtctatatcattttcatggatactatatgaaccactaactactttaaataaattaaagtaaacaaacaaaaatcacaaattggacaacaaataaaactcataatactaaatttccaaaataaattaaataataaacttaggaatttcatagtactttataaaataaaataaaaacactacttgaagtttttttctaaaaaaatggagaagaagagacaaaataatataaaccgcttcgctcaaattctttttggcagatagttgactttttatttgttttctttatacaaaaacccaaatctccattttattttatttgtaaccatctccaaaaataaaaagtcaaatccatgagagaaaaatactctctctggagaagaagaagcaccgtttcatagatccgattttctccaaaagctctcaccttttgactcgcctctttacaaaacaaaaatcccatctttctgaaacaaaacaaaaaaaggtctcatctttctactattagttcatacactccatagattgataaagagatgatcttatgattatgaagagagtttcagatattctcaggaaagtgaagagattttagagttattgttaagtgaaagtttaatctttttaa

SEQ ID NO: 55278 - DNA, 902 bp, Arabidopsis thaliana landsberg
atttgattattttttttggtattttattcatagttttaagtccattttactcaatgtagtcttcattttttttttcatttgctcatttaaaaataaataaataacagaatattttggaaaatgggactggagtaacacttgcattgatggatttacacagttttggaagttagtcaacagagaagacgaaaagaacaataatcaaaaaaattgcaaattcgtaaaatcctaaaaatatcgtcagcaaatctacaccgcaattaaaataaaaggaaacaaatattaaagaaacattaaatagttttctctccattgatatgtttccgtatatagaaaaaatctctttgactcgccggaaaacaaaaccccgttgttctccgtctatctctccctctctctctctgcacatttcttctacctttctttgagatttgagaaaacagaggaagaagatgaaactcgacgaagaattcttacacgacagagaccattcgtttctgacagatgacgaggaaaatcaagcagcacttgcttgttccgacgatgaacacgacggatacgacgacggtcggagaggcggagaaaattcagattcctcctctccgttatcacgagaccgttctgataacaatctctcggatgtctcaaaccctccatggccacaaagctatcggtaacaaactcataattttcctctgttttttcaatctcgaattctctaaaattacaagagttcagatatttttagatgaatttatttcagacaatcaatggatttgttgaccggaatgactccaccttcggtgagtttcatgcctcaaagcagttcccggagattagcctcttcctttcagaagaagcaacaatcttcgatttgcgattcgttgtcttcttcctcaagc

SEQ ID NO: 55279 - DNA, 594 bp, Arabidopsis thaliana landsberg
ccattatttaaacatgtaaacatgtagaagaatatatattatacaattaggctaattaatttccaacgtacttttgatggcaatattagagtaattttaagaactgtaataactttaaatgatggtttttcatattaaaattactcttatatatatggtatgagaacatcattacatttcttttaagaagatttggattttgtacattttctcgaatacgaagcagataatgtccaatttttttgtgcaatagattgcgtgagtgtttaaattacacagttggttcgaatatgcttgtcatttgacattctgtcagtttcaatttgcatatcttattaattagtaatttcactcacttttcactatataaatataagttggttgtaataaaacagttggattgctacttcttattatttatttttaagacataacgagtggtatatattggattctagtacttattaatgaaatattagaagaaaaaacaaaaaaaaattcaattcatatcactcttctttgaataatttgattttaatatttccctgagcttataattaatttggatggaatctttgaataatctttcgagtc

SEQ ID NO: 55280 - DNA, 360 bp, Arabidopsis thaliana landsberg
  unsure (1)..(360): unsure at all n locations
ccccccccccccccctnnnttnnnncnccncccccccccccccccccctcccccttttcnttcttnnncttnnctnntccccccccccccccccccnccccccccccccccccccctcttccctgtccccccccccccccgccttcccccaccccccccccccccccccccccctcccccccccccccccccccccccccctncccccccccccccccccccccccccccccctccccccccccccccctccccccccccccccccccccctctcccccccccccccccccccccccccccccccccccccccccccccccccccccccctcccccccccccccctcccccccccccccc

SEQ ID NO: 55281 - DNA, 565 bp, Arabidopsis thaliana landsberg
tgtcacttgcttttcgatctcagacttcaatgcaggagcatacctataaggtcgcatatgaaaaggttgtgcacctggcaacaatgcaatatggtgatcacaatccctggtgggcggcaaaccagttggcactgcaaatacagactgatagcgcagaagcagtgactgtagatcactagacaactcagaaatgatagtccggtccttctcatttaactcagtcaaatggcacacctcaatcagagaataatgtcctttagaagattgcaacccaaacaatttaacttgagtacccctgtaaggaatgaccacccacttctcagtccaatgcacctccataggactaaactgctccagccaatccataccaacaataagatcataagtcaagagtggtacacacgtaaagtggactagaactcgcactaccccaacgaccaaacagaccctaccaactgttgagtacactgcatttgaccccattggcacctgaacagacaattccttagtcataggggttaacctgtaaggtgctgggcacccgggaactaagaaatgaatgaga

SEQ ID NO: 55282 - DNA, 624 bp, Arabidopsis thaliana landsberg
ggcaataaaaaaccaagatgctaggtggttgtgtttagttgaaggtgatgttacatattggattgaaagactgcaactactttgattttttgatgataggggctttgttttctagacaataggggcgcggagggaagacattgcagcagaagatgctgctattgctactttggattggtgatgtggatttgacgtaggcatggatgaggtgcagaaaatgacatgatgttctgaggatgcaaggtgcataacatttaagcaacacaagagtgttgtatactccctccatccctgaaaacatatatattttagtgtacgcatgttatataattgaatttaaattcaaaaatagtttaatatgatgcttaatttgcatttgtgatatcatattttaaaacaaattgatggtcaaagtttcactttaaagacttttttcaaaaaaaaatctatgtcttattttttgggacagagggggtagaagtcacggttattggaaaaattcccaagtcatgtctttatacgtaagttagagcaacttcaagagggcactaaaaaatccttcccaaaacatcttatcagggactgctgaaaaaatcgataaaatgtaactacaatctttttaaa

SEQ ID NO: 55283 - DNA, 1585 bp, Arabidopsis thaliana landsberg
tgatgttgacatggaataattgttgttacttgtcaaataataagaagaagaaaaaacagactaatgtatgttcctctttgattgttctggttaggcaaattacttgcatatctccacatgtacgaattagtaatattcattcataaagttagtatgatttatagattcaaaaaaataaacacagatcgagtttagtttagtcaaatatttgaatgttttcaagaacaagaagagtttctgcaatcaactgaaatatcattttcatggtcttggttcaaaaccagcagtattacaaacagtgagaaaggtttttggtatttgtaacaacaatgtattgttgcagtgactccaaattcaaaaatggaagtcatgtgcattcaccaagttacggcaaaagtaaaagactaaacttattactatttccgaataatccggagcgataccctaaacaacattcacctcaaaagttctaaataacacgaataggctgatttttgtatatatgcttttggctgacgttttttttttgttctttgctttaagacttcaattcttttaagcaaaaatttggatgggaaataaaaaggatgatgaggtggcctacttgtattgagcggataaacatcagccaacaaaaatctttgttaaaataaaaagtgaaagacagagagagagatggccacgtggacaaacatggtgggcgtttacacgtggaatataacaacactccgcgttgctgattatttgattccatttaaataaaattaaaaaatactgattattctttcttttgttcacagaaaattccttcataatgtaaaattcattcacaatttctcttttaaataattaaagaccacaaattttgaacataagaattagaaaaattaaagatcattcactagagtagtcgacattattattaatttagtataaataaataaggtgtgaatccacgtgggatgacaggtgggagcgaagtctagtgcatgtcatgtaagattttgatttactttcaacacgcttcatcgctatttggaccacttcgctgactttttttttttttttttttcttactactgagtactagtatttcttacacatatcagagccaaaaatacaaccccgacgaatctttctttagatacaaataaaaaatatttactcctacaagtttcattcaccgtacgttttacttgttatatcattgcaatgacgcggcttctaaatatgtactaccatatgtgtgtttgggaatctgacagttgtatattgcactggatccaaaccatttcagaacaagagtacattttctctgttcgtacgcattatttgttttgtgccgactgcgaatataacgatttccatttattcatatactaaatatcatacaatccataaatgaatagtcttctttttttcttgggggaatttacaattccaatcaaactaatttcttagctaatcataacggtagtcttgttttctgtaacttaattcttcttcttttttatttagataggaacgttaggtatctattatgtaaaacttgctaacaacaaatctctaaatctttgtttatatc

SEQ ID NO: 55284 - DNA, 717 bp, Arabidopsis thaliana landsberg
  unsure (1)..(717): unsure at all n locations
gtaatctcaatctcaaacgattttggaattgaaaatccaatctctattgtttatgttttaagtaacgaaactcagttatagaaaatcgaacccgaattgatcgtggtaatgtcgaaaccctaatttcgtgggtttagggttttgtagcacagttttcgcaaaaaaatgaagaagaaacaagaagagagttcgttggagaagctaagtacttggtatcaagatggagagcaagacggtggagatagaagtgagaagagaagaatgagtcttaaagcatcagactttgagagtagttctcgaagtggtggaagtaaaagcaaagaagataataagtctgttgttgatgttgagcatcaagatcgtgattccaagagagaaagagatgggagagaacgaacacatggatcttcttctgattcgagtaagaggaagagatgggatgaagcaggtggtcttgttaatgatggtgatcataaaagtagtaagctttctgattctagacatgatagtggtggagaaagagttagtgttagtaatgaacatggtgagagtaggagagatttgaagtctgataggagtttgaagactagtagtagagatgagaagagtaagagtcgtggtgtgaaagatgatgatagaggtagtcccttgaagaaaactagtggtaaggatggttctgaggtagttagagaagtnggcgatctataggtcgaaaca

SEQ ID NO: 55285 - DNA, 844 bp, Arabidopsis thaliana landsberg
caaacaaagcttaaaaggactatataatataagtctctgacaagaaagattttttagagacttacttcaagagttgagccgtaaaaaggcgttttctctccagtcaccataatctctagaggacccgtcctcgttttctctgtgcttggatcgataaatccttccgcaggaccctctggatctcccgtttgtaccacaaatccatcagctgaaaccaaaaacacacattaatcaacattcttcaatcccatatataaaagcaaaactgtattttgctactgtcttacatctctggatctccatgccatcgtagaaatgcctctctaccaagtccacaaagtttccggcggtaacaggggcgttataaccatcaagaacaatgcggaacacacagtcctcgatgttgggattgtccttgatcttgaccttcatgtccacactagctcttcccttgaggagaggcatgttccgatactcttccggcacttcatatggaaagccatcaaccatatcctcttctattctgcgaatgccccacatgaagatctcagctgcagtcatcaatcacaaagggtctaaatgagcataacccatctcatttcttttatctctcattcctcttatgttaaaacttacccgccaacatatttgagaatttctttctgttttggagcaactgcgtctctttttcgatcttccactatcttaagcatatcttgcatcccagcttccatctcttcaatcatttcattaccatgatccttctttgattcaccagaacccggcacaagtatactgctcccttgctgcgatgggctacttgcctgccttacattatacaaca

SEQ ID NO: 55286 - DNA, 657 bp, Arabidopsis thaliana landsberg
aagtgttgttgcctagagaaatctataaggccgttaagacgtccgctccagctcctaagtcgagtaagaaaaagcctaagaacgcggaggctgacgccgacggacctagcgccgatgctccgtcagatgatgatagtgaggtggctgacgataaaaacggcgccgtatcagcgatgattactcgaacaagtagtgtcgtaacggccattgtcgggctctgtttcggagtttggcttatgtgaagtgacgtggcatttacctcgctttgggaatcttgtttttctttttttctttgtgatctgtcggtttaatttattttacatattcttttttttgttcacgttgatacttggtgtggagatttggaataattaattgttccacttgtgttggatctgatatgttttattctaaaaaaatgtgatgatcattcaaaagagtgattggtacgttggaatcacgtgtatctataaagatagtgtcggtggtagtcgaaatagtgtgaggctgtgagctgtaagatgcatgttacatcctttgtggtcgcttggatttgacccatgatgatgctccatcataactacactaatatgaaatatagtatactttcaattacagaggaaatcagaatagggacaaagattataatacgagata

SEQ ID NO: 55287 - DNA, 1418 bp, Arabidopsis thaliana landsberg
aaccctaataagccttgagtcacaataagccatacaagatccgaacaagatccgccgttaaccaacaagtcgcgcgacgaaacccgccgagccgcatagcaacttccgccgcaagccgccgcaagccgccgcactctataatacggggttgattggaaaacactttaaaaactttagttttaatttaaagtattaaaagccaaaatttgaccaatcatattttaaagattttatttatttttaaaagtaaagctgctcttttttattcaactcacgttcaaatttttaaagtcacaaaaataagattttttagattataaaaagagaataatagaataaagtttgttttttttcttttcaattcctccacaatgattgaaaaactatttctcaatcaatgagtaatttatctcaaaaatattttaattaattaataattatttttttatttccgttctttgatttttttgaatacccaattatggtttacaaaaagaagttgtaataaggcatcacatcccgccaatatgattcagtgaacaattgtatcttgacaatttaaattcattaatataattcttattttgatgaaaaaagtgatagttcatccatccaaaaacctatcaaatctttatatgtattaaatttattttttatttattgagatttgagagtatctatctatttaattttatgttgtatttttctaaaatttataataaaatttattttgttactatactgccataaaaactaattttgcataatttataattctaaaaaatatatatattaaaaataatagtaacagtttctaaagtttttactttttagttaccaacttaaaatctttacagtcaaattctctacaaccaaaatttctacggtcaaagtccatacaaccaaaattgacggtctttaccaatgggcccttacatcatcaccgccatgacttctagagtctttactacaccacttaagttaaaggttacagccctttaaagaaatttaaaaaatgatgttgcagcctgaaagagttttacattccacaagaagtaaactctatagaccataagtctaataaatcgctatacaccaagacctgtttcactacaccgtgtcttgaatctttgcagagactgtctccctcccagttccattcaagatttccatattggacaggggttagatcacaccagtccgggaataaggattagaagtaacagaataaacttgcagaagtgtgtttggtttgcactctttgctcctcaaaatcactgattttctggctattcgatccaataccaatatagtagatgggaagttcatttgttcgcctatacaacacggacccacgttccaccacacatggggcagcaataaacccaacgacttgtccaccaggtttctcgttcatt

SEQ ID NO: 55288 - DNA, 837 bp, Arabidopsis thaliana landsberg
gcaaatcccttccacaaacattacacataggagggccttgcggcagatgtgtcaactgagtagaaccttttttacggggtttcttgactacctctccttcagtagtggtcaccccaataggggtagaaccagacgctgcggccagcgcttccaataatacacggaggttcccaacttttatgatttctggagttccactaacgtcaccggtaccactagcactttgttctatattccctgtggcttccttggcggctgccacgatcaactttgccgcggaaacggcttcgttacggatgctttcatccacattgagactctcactaagtcttagagcaggaaggccaagaacaatttcacgtatgtctccttcttcatcgctccaaagataatcactctcgtcagaattctcattcatctcttcctcagcaattttagacttctcgggattactcataatttcttctttgcagagatttagaataacacgtcttcaatttcaatcgaagtggtctttatatacagtttctatgatcacacggcggttatgaccgttatttttttgatgtgtgtctaacgtgttcgctcagatctctctcgcgccttttctttaaaaggttgcgtccgtaggatccaatcaaaatctcgttttgacgaaattgcccctgccagaacttacgcttataacttggtttcttcagttggtatgaaccggaaattaactaaaccggtacacatgtgacccatggtccgaattcccacctcttcttatgaatatcatgatttttttttggattaagagtcttgttcttttgtttttctttctgtaagatattg

SEQ ID NO: 55289 - DNA, 551 bp, Arabidopsis thaliana landsberg
  unsure (1)..(551): unsure at all n locations
aagaagacagatggaaattgtatttttgaacgcactaaaaaattcgtaatatttaaaccgattcatgtcattggtgaatgtttttaaaatggatcaaataagacaaaacataaaatattgaagcaatagatttttagaagaaaatgtaaaaacactaaagaaagtaagannnnnnnnnnnnnnnnnnnncttaaaaacccactcacaaccaacaccaaacggctacatcactttcggtgaccgcatgatcttgcacttgaagttaaagaaatactcaattcctaatcattttaactcattaatttaattaaactaaatatattaaaccaatatatgaaaggcaaaaggtgaacaatatttcagctttttggtaaaatttgtttcgattctgctaaatatcattttgctttggacctggttagaaaagtcagatcaaaattggaaagaaatacacattagtgagtacatgtaataataaaatttaactattttcaatacatgattntaatatttggatttattaagaagaatataattcaattgttcagtga

SEQ ID NO: 55290 - DNA, 585 bp, Arabidopsis thaliana landsberg
acgacgggaaaaacaaacctcaaatgatgactcatcaagggtccttgtcagtgtaatccaagagcgaatccaaacaggccgaaagtgaacgcaactgccaaaaaaaaagcagttacgaccataatatagccattaccaaatgtaatgaaacttctaatttcctgtccacctactttggagtctttgttccgttttgtctgtagaataaatccagcgcgaggaggttcctcacactttttcctgtccttcacttgaatcctggactcatcttttccacctctctcttttatctctttctcggtaaccttttcttttacctctttctcatcagtattattcctatcaattttcttcccctcagacatagtctctgagttgtttttcttttcagccttcttgtcttcacctgtcttagtgtctttcttgcttgaactagaggcaccctcctttttcttagtatccggagatcctgtttcctgttttacatccacagttttggaggcattcttgtctttcacatcttctaaagattcggccgtcggtttcatctccacactacctgaatcagaggatttcttgcctacc

SEQ ID NO: 55291 - DNA, 901 bp, Arabidopsis thaliana landsberg
aagtgtcattggcacctaacgcttttgttataattcgtttaacagaaacgaaaagtcattagtccacagatttatatacatttcaatactaattaataaaggcaaacaaaaagagctaattttaactcttcaaaatttcttgtcattggcaaagaaaatatgaaagacactcaacgaacggtatgtgtaggttcacccttctagaagtgtcattcgaattgcaaaataaacgtcttcaaccaaatgaggaaatggtttcaatatcatcgaaactcgaaagatagcatcacttttttttgttctctagttcttatgattttaaaatgaaggttctaattaattaaacaatgtggatttgacaaaggtgataatatcttaatcttaaaaatagatatcattgattttataaaccctgaatgatgcacttgatctaatcataacataagttgacgacgaaaaaccctaataagtataaccatacttttttttacatacttacaaaactttataaacaaaaaaatccgaaaactgtaatcataattgatattacaatactgatataattaatctgttgacttcgagcattaacacaaataaaatttgtgtatcattttactataaacaatcatggaagagtagatatttgagcatattaacatatgacatatcaaacaatgaccattattatgcaaatataattctaatcttatggtagtaattcaataagtttataattatcgtatgacaaagattaacaaagcaaaaagcagaaaattcgtcgtttattacaatcgagatctacttgaaatcaaaattacagacagtgaatggagtgatatagcattacacgtgtggagaaacaagtgcgaagtcaatatggaaaataattaaataagagagt

SEQ ID NO: 55292 - DNA, 642 bp, Arabidopsis thaliana landsberg
ctgggggaccgcctgcaataacagtaacatccttacaagaaaaggacaaaaacaccttttatgttagctgagaaaaaggctcagtgcaatgggggggtataatagtagttcactcttaccacccgaagtattcttgtccattaagactcggcggattaaaaaaaggtttggcctttccgtggagtagtttcttgacattttctttctgctatctcttacacaattgggtatttagctgacacgacgaagaaggtctctcatcaattatctgagatttttacataagaaaggctccgacaaagcagatggaagacgatatgtggtgcgttagctcatctggttcttctagaagctatcgatcggaaactgctgctaagtatcaatcaggtttattatccaaatcccctcaatttttctttcaaacttcatttttagggtttatgattgaagattggtcttaattgggtttcgattgagttgagttctgttttgatgactttttgtagttggtcgtttaagttaaaaattgtagctttacgttttgctttttagatgagagacgacttttttttttctcttttgctctcgagttaattagtggtgaatatttcagggccttatcaagatctggaagagtttgag

SEQ ID NO: 55293 - DNA, 1577 bp, Arabidopsis thaliana landsberg
attcttaagcatccactggcattacatgaatttgggttaagcgaatagagtagtgtagaggatcgttgaccttagtataaaattcaatcgcaaacatttccgacagaaatatataaccttattattaattaacgttgagtgtagtgttaactatgctgaagagtaaatacaatttgaatagaaaacattgttatagtagtctttctctatttagaatatgtgcaatttgaataaagttataccggacctaaaatctaggataacttttatcaataattcaaacgcaaaataattttggtaatttctaaaggagttagtaaaggaataattgtgagttacgttcattttagacttatcgaaggttaatatatttatgatttttatacaaggttagtaaattacagaaaatcactttcgagggaacaatatatgatttcaattttttgtcgattcatcttctgcactgaactgattttggttccaatgttgaaaaaagaataatgtcgaatcaaactgaaagataataaataattgctatgatgtgagtctattatgtatatcaccatgcaatatttttctgtatatatatattacaattaatacaatgattgagtttagatatagttatgtattggattatatttcttgtaactaaccttttacttcagtttaaaaccaatttgttgttaaaccaactattttttccttttctttattgagtttgatcatgtgggactatattggtttgatgatggatgaataaagaagtctcgttgtctttatactatatgataaataaatcggaccagttgttgtacatgtagtcagagactaattcacacttattaaatgtgtttttaattgccaatttgtagaaaatttgtcaatttgtaactaaagaagtagttaatacattctggttcagtgttaaagggatagttctcaaagtctccggatacaaaaagtcttcatttttttaccatctataaatagcaagatgcttatctgtgtagtaactcattagttctttttcctcttgaaaaaaagaataaaaagaagaacagaataactctataggatcttatttttttgtcaacctaaggtgcatctgagctagaagagagatagaaagaagttcacgaactcttaagtttacttaaatcatattcgattaaattcgagtctggttgaccagtaagatcacgaaaaaaggtattaacttatgtttttattttatgttatcattttctgatttttttttcttccttttaaaaagaattctgtttattttatgtaatgagtgaatgatagtcataacaaagcctagagagagagttcctacaatcttttgtataatctgtcgtttaaaaacgataagtttagctttttgtttttgcagttctaatttttagtaatcactaatcaggatttatacggaaattcgaattaatttacagaacatgcatttatataaaagttttggcaatggccagaaagagtagccagtcgtgcatccattgaaatatatgtataattaatttgtgaaacattttcatattgttcttacccgttaaact

SEQ ID NO: 55294 - DNA, 907 bp, Arabidopsis thaliana landsberg
  unsure (1)..(907): unsure at all n locations
gtctaatcatctctatagtttcgttaacatagtccccattccccgaagtctgaacacgatagaatccatatatatttatatatttatcgtttcctttccattgctttaaatcatcaaaggttagagtggaggagccatcaaatgaccgagaacagcaaatgtgagatattgtgtcccaaaaatctcacgctgtatgtcataatctatcttgttgagatcaagttgaatctatatgtaaacccgaatctgaacgatttcaatattgctaaattttgctttactgccatgtaagattataaaactctagaattttctatttttcatcaacaacttacacatatttgattttagatcgtattaaaattcagattattacatggaaacagtataacataaaccactaaattacaaacctgagtcgaatgatattgctttcattcgatatattataaggtcatatagtaatttatgttttctttatttttcatctatttgtcccaatcgaaaaaaccttcatattcaagttcttcatctttcaaccatctttgacgaatcataggtttttcttttccaccatcnnnnnnnnnnnnnnnnnnnnnnnnnnnnnnnnnnnnnctccgatctttaaatcataggttagatccaaaagtcagtcaaaaaaaaaaaaaaaaactaaaatacaacttatacataaaaaaatttaacatcaaaacaccattaaaaggtgaggcaaccacggaaaaaaggtagatgcatgacatcatgagcatttcaaatgccgaaagttattaggatttagcgaagtattgtttcgaagaaccacgttatatcgttcgaaaataaaaaaaaaattctaatagcacgagtttaaagttgaaactacttgataaccaatttagggaaacga

SEQ ID NO: 55295 - DNA, 971 bp, Arabidopsis thaliana landsberg
attctttttgtgtctttttatatatacaaattatttttctgtgtatggatatttggcgatcgcattgcttgtccatatacttattagaaatagaaatagaaatagaccgtgaagtactaaatgcgtaaattaaaagatagataatctaaagaatcttaaacccattacccttttttttttacctttttaataattccaccacaacacaaaacacaagttgcaaactccacatatcctgcaaaccattggtaacaaacaaacgcatgagtttcctatatatgtctgcgtctacaacatttgaaagcaaacttttgtctctttttaactctcttaactttcgtttcttctcctaccttcttttaccaacctttcctttctcttacacacatatatatatatacatatatatagagagagaagaggacaaagagttgaaagatgaagactctcatgtcttcatagaaacaagtgatatgtgcgctaagaaagaagaagaagaagaagaagacagttctgaagccatgaacaacatacaaaattaccaaaatgacctcttctttcaccaactcatctctcatcatcaccatcatcatcatgatccttctcaatctgaaactttgggagcatccggtaacgttggatctggtttcactatcttctctcaagattccgtctctccaatatggtctctacctccacctacctcgatccaaccaccatttgatcagtttcctcctccttcttcttctccagcatctttctacggaagtttcttcaacagaagtcgagctcatcatcagggattacagttcgggtacgagggttttggtggagccacgtcagcagcacatcatcatcatgaacaacttcggatcttgtcggaagctttaggtccggtagtacaagccgggtccggtccttttgggttacaagctgagttagggaagatgacagcacaagagatcatggac

SEQ ID NO: 55296 - DNA, 564 bp, Arabidopsis thaliana landsberg
gaaaaaccaagagaagagtaaaaagatcaacctgggtcatcatcatacaatggaggagggggatccacttgaactgcagcaatctctgtatcataaccacatacacactaatttacatcacatatatgccaacgaaaccatacatgtattctaagagaaaatatccaataagttgttaaccatcaaactacgaacctaaacctcatacaaaagaaacctcaagttttcagaagaacataaaacatgaagcacactaaaattcccaataaactgcaactgtctatggatggttgattaattgaaaaagaggtttcatgaagataccttcatcagttggtctgagcctgaagatataaatctgacagaacgttggtccacagagacgaactttagcttgataaagtctaggctcgggatcggatgaggccaaatcccgagccaaaaacgttacccaataaagtatccagcacaccacctgtaacttgccgacacgtgatcgacgactcaatccgcttcctggatacaaactttgtgagcagtaagacaacaatcatacgggtacga

SEQ ID NO: 55297 - DNA, 372 bp, Arabidopsis thaliana landsberg
cccccccccctcccctcttcctcccccccccccccccctccttcccctccccccccccccccctccccccccccccccccccccccctccccccccccctcccttcccccccccccccccccccccccctccctcccctcccttcccccccccccccctccccccctcctctccccccccccccccccccccttctccccccctcctccccccccccctctctctccctcttccccctgtccccccctcccccccccctccccctttcccctccccctcttctcccccctccccctcccccccccccctttccccttctctctccccccctccctcctcccccccccccccccccccctatcctcccccccc

SEQ ID NO: 55298 - DNA, 924 bp, Arabidopsis thaliana landsberg
atccgaaagccagacttggtgtggacaaataggcttcaattagtgtttgacggtgcagttgtcaagctagggggattattcagtatgcacataataattctcctattcagtgtgtttattccttcaactcctaacaattttcgtaattattttttttttttttcaggtgctacccccatagccataaacgaactaatttctgaagagggtctcactggtgaccagatccgtagccacttacaagtcttgcgggatcgtcaaaaggctattgcagacaaattagccttggagtgaagaaaatattgaagatgagagataggattaaatagaaagagtgatagtatagaacgtttctttttcttttgttgttaatcttgcatattacaaacaattactatatcataatagaatttatgttaatgttggagttattaaaaaaaaaaaagttaaccataataacattcttactgtacgcatgagtgatcatttatcacaatctattagagcaaccccaatgggtgggatgatgacagtccctaaaaaaccaaaaaataataatattttaattttttaacatagtttgacaactaaaaaacctacacatgtacatttaatcttcaggtcccttatataagggtttttggagcccttctctcctgtgtcccttccattttaattattttttattttttatattgtaagggaccttaagagagaccaccattgctggtgcaggctgtagaaaaatttgtttagcttctccttcttttcttaattttgacagataagtctcagcctctctccccccataagggtatgtcttgacatttagattcgttgaatcaaaagtttttcatgtttgttcatattgtggtctaatcttcttaggcagatatgacctcagggaagaaagattattatgag

SEQ ID NO: 55299 - DNA, 1042 bp, Arabidopsis thaliana landsberg
agtcaaaacaatttccttggaccagcaatcaagtttcgtctagataattacaggactaataataattcgcgttcaattaaatcttgtctaatcaccggtgaccaaaacataactcacggcgtcatgttaaacttgctgcaaatctcacgaatttagacaaattgacacttttgggaatagtcaaacactcttttaattcagtaagataccaaaccgggaacgtctttctactttcaattatataccaaaccggaacgttctttttatttgcaataccacccagagttgataagtaagagcaaggggatttttagtcagggttttaaagcctttatggaataatacataatccagatttaacaagtgacaagattgtaacaaacagtcagagattgcgaataaagctatgttgaatttaatcgccactcgcgcatccttgacagccgcagtgaacgcattcgaccactttctcttcacgcaagtgtttgggaacacggcatacacatgttgttccatagttgtggtctcttggctgtatgcagcgcaagcagcataaacgttcatatcccgactgcaaaacacaaaacagagagtttttagagttactcaacacaaagtatagagacatgtataaatgacaaaaatcttagttcaatgaaagaaaacaaaagtgaaatctaggtatatgtctggatagtagaacctacaaagagaagatgcaactgaattgacagggaggagtttgttaatgatcgattcatgagagaccatcattaagatgtgggagtattgttacaagttagaactatccaaaattcggcaaatcgtgaaggcaatgcagacttactaattcatacatcttaagcactttgttcaaagtataattaccacaaatcttatttcttcaccagcacaaggcaacaataccaattctagaacccattcgttagtgagatcgttacaagtaagtgcatattctagggacatatatttcacaggagcagcttcaagactcattgtgcagtaaggcgatacgaggctc

SEQ ID NO: 55300 - DNA, 562 bp, Arabidopsis thaliana landsberg
  unsure (1)..(562): unsure at all n locations
tcccaagttgatgaacctttccccatgctnnnnnnnnnnnnnnnnnnnnnnnnnnnngtgaattcacgctcaccggagctgtgcctcgctggtctgccgcacccgcatggcgtctggccgatttagctctgccccatgcccatgctttggctctaggtgttccccatccctcaccggagtcgtgccagacttggcacacccgattccccctcctcgtggctgagattgctcgtcggagtaaccccgaccgccagagcgccccctctgccatccactcgcctcctgtcacgttctcacagctagaaccccgccattgaattcgctgggcccccctcactggtcctagccatctccgacgaccccagatcccttggagtccgcgcttgcctcgtctccagtgacttggatgggagcagcgcagtcgctgtgcttttaacccctgcctgatcctagccgtccagcctgatccagctgtccagatcgctggataccgctttgcgtgtggagccctgcccctaggcccaccagttggccgcctgcgccctggcgttgggccgactag

SEQ ID NO: 55301 - DNA, 115 bp, Arabidopsis thaliana landsberg
aagccgctggtctgatggggttaacacaaaagctaacttgacaggatgagtcagggctggataagtaaggggaaattatggaatatgtacgatcgatgtcacatatgtgagatgc

SEQ ID NO: 55302 - DNA, 1271 bp, Arabidopsis thaliana landsberg
ggggaccagttccaatcattaccgtagtacgactctgctgatagtaattttaattataatgaaatacgttccgatctcgtgaagtgaaagtaatattgtgaaaactgcacatatctcattctccaatgtattatgctatctcaaataattaaaaacagttaagtatttcttagacattcttataaacaaatatgtgatgcaaactaatctttacattagattaaaatgatcctcgataaagcccaagaaaagatctggcaagaacacatatttattagaaaaatgaacccaacatgataatgagcctctgattgagttgaagtgtcctcgccgttgtgtttacattttcattaatactcaattaataatctcatgtggaccattttttataaaatattcctgaaaagttgtacactgatgcaagccagcatcacaacctttttgtgaggataggacagaaaataaaataaaaacttaacaatttgacgttaatcgctaattaaattcgattatactcaaactcagcagcatcaaatcaaatattaaactgttattatactcataaataataattaattatgttgtttagtcaacaaaactgttactattcaaccctacctatatagtaaaatccttttcctatttttgtttttaccataattatattttttaaaattcccatatatgtcacatagaaaaatcttagctgtttacaaaaacgtataacaaagtaaatataaaaaatttgttaattgttaaacttgaaccactaatataagttgggtactagatattgttgaaaaccatattgtaagttataacttataactaaaccaatccaaatagacccccacattagagaaatgattaaaaaaaggtcataaataacacatatgagttggattattaatgttaattgattgatttaatctggaaacctactgtcttgcttcgcgtgaacactacgcgcctcccaaaaacaaagatgccaaaacaagaaacaacctgcggacctcaaatctcataacccacgcgccgatatcacgcgccgaaccagcgcactgtagtgtgaaatatccacagttttaaatttcgtcttctctctctctcaaactatttctcgtcacttccttcggacaattcccccttggaaagtccagcctaaccccccgaaagattcggagatatagagagattcattagaaccggtttcgtagctctcttccgccggtcaatttgaaggtttccgggggagagaaattgtaagaaat

SEQ ID NO: 55303 - DNA, 564 bp, Arabidopsis thaliana landsberg
  unsure (1)..(564): unsure at all n locations
gatctcaagctcgccgccaacggcggcaggaccatcgcgctgcgttcttacaagaagccgctggtggtctacttctacccgaaggacaacacgccgggctgcacgcaggaaggccaggacttccgcgatctgtatccgcaattcgtgaagaccggcgcggacgtgctcggcgtgtcgcgcgacagtgtgaaatcgcacgacaacttcatcgccaaacacgaattcccgttcgcgttgctgtcggacggcgacgaggcgctgtgcaatgccttcgacgtcatcaaggaaannnnnnnnnnnnnnnnnnnnnnnnnnnnnnnnnnnnnnnnnnnnnnnnnnnnnnnnnnnnnnggcgtgctgcggcgcgaatggcgcggcgtgaaagtgaagaaccacgccgccgaagtgcttgccgcgctgcgcgaaatctgaacaattccggctgtgcgtggtccaccacggtagcggtaatcacggccgctgaaaagcactttnttccgccggctggctgcgctagattgaagccggtcgccggtttgcccgcgtggcgtcttcagccaaagc

SEQ ID NO: 55304 - DNA, 555 bp, Arabidopsis thaliana landsberg
  unsure (1)..(555): unsure at all n locations
gcataaaaactgaacttgagctgaaattccgggcccgattcttgagtcttatactnacccattaccaaagggccacatagggaactttcttttctcacttctgttgcaaacgggaagacttttatggggctaactcttcacttaaagtatatgaaatcacaatggaaaaggtgggagatcagggtaattctcttctttatgattgacaaaagtcgaacattgaaatggatgcatttgcatgagacatgaaacaaaagctgaaaaagaaatctgtggcggcgaagctagaaaaagaaaacaaagcaagcaatatgcacacattgagattaactactttgctactggccataatcaaatagattttgaagctaaaaaataaaaagtgaatatacctgatgtgcataaatagtatcataaacaagggtccagcagacttctgagagatagagagggagtacaatagatggtgctatgcttcctttaactgcaaccatcctaacaatgcttcccagtttatggtcaaacctaaaaaggcctgaggctgcaattataaaa

SEQ ID NO: 55305 - DNA, 965 bp, Arabidopsis thaliana landsberg
  unsure (1)..(965): unsure at all n locations
tgtgcccggagcaacaatggctactatccttatgcttggagctcttcatgctcgccgcctctatgaagacaagaaggtaatgtagtaagtagtaactccacaatggcaaggttctttacatagagtttggtacttcttcttagcatcgttttctactggctgatacacagatcgaagagaaacgggagaagggaatcgaacttgagttccacccagatatcaaagtataactctttttgctcttgtctcttcaacttcagtggccattagttcttaaatctcaatgtgttcatttgtgggattgtggttgtctaggcctcgttccttggagttctgcctctgcgatcaatctcaagagcttggggctcctttatgagtctggtgagttcttcttgttgaagcatttgtggtaactgttgaacatgattttcaattgttaggtcttattcctctcaggaaattccggtgtggatgcgtccatatgcttataaagcctgggctcgagctttccattcaagtatgatcactttcttcttgtatatgtctgctgttggtttgactctagagaaaaaagtaataaagtgattccctgactgatctttctnnnnnnnnnnnnnnnnnnnnnnnnnnnnnnnnnnntgaagaatatacttcattgcaggatttctttgttcgtagcttgaaagaaggttgcaggcctatcgaccctgatccttgttgtctggtaactggtaacaataatgttgtaactttcttttatgcagactttttttattagttttgctctctaagatttcgaagatatcaggttagtcctgtggatggcaccgttctaaggtttggggagttaaaagggaatagagggatgatcgagcaagttaaaggacatccttacccggtaccagctcttctaggaaataacaatctgcatcccatggaacctgaaggtaagaatgagtctaagg

SEQ ID NO: 55306 - DNA, 774 bp, Arabidopsis thaliana landsberg
taggcttcgaacaaaagagaataattaagatcgagattggttatatttctttatatgtgctgcctagatttttgtatatatactttcattaatgtataaccatgactttgtaaactgttgatcccgttgatgaaaatgaaaggaaccagaaacgatatttatactttaaaagaatgtttacgagaggacagaggatatataatgctaaggaaaagtcaagagagatagttatgctaaaatgtctttattatgtcatgaattttgtttacttcttcctttgcgtctttcttcttgtcaacgacaatgttcttttctcattggtccattaaggaagcagaaaaaaaatagtaattaacagtttatattcacgtcggccaataggagaattcctattcgttcttatacgaagcaattgaaatgttaatgtacgtatatagtagtaaactttgaagaaccactatattgactattataagaatatgatgatctcttatggacaaactttataaagttttatccagtgcgcattagtatatgacatatccgcatgatttgttcaattcagagaattaactagtcagaaactcaaatttcatgttttattagtagttaatttcgtatatatctatctgttttcaggatagctagtcttttggtttttggttttaaatattcgtatactaattatttttttctcggttccttataatattttctatttcccgcatttttcatcggtggttaatctttatcacgtcgtgtcattcatctact

SEQ ID NO: 55307 - DNA, 470 bp, Arabidopsis thaliana landsberg
agcccggacaagacaaaaactgacactatattcgcctgagaagaatggataaggtgcgcgccggctggcacccggggaggcggcaccagtgccacacgccctggcgccggcagcgcaccatacagcacccccacccggcaccaagataaccgggccctataacacccatgtatgtggattgggaacaaaattgaatgaagcgattgcagcacccaggccaaacaaaccgtcgcatctgcgggactaatcagaagcacacacagagaccgcggggcacgtaataagagttaatgcagaccttacataacaaaaacatacacacgagtctgagccctacaagtactgcgggcatgcgaagggactggaccctcaaacaacatcttgctgatttaatgacacaccggccttgaacaccctggaagaaggctacgacacatgcggggggaaactatggacgagacattacctca

SEQ ID NO: 55308 - DNA, 777 bp, Arabidopsis thaliana landsberg
ttgaaatgttttagacccatctatacaaaggaagattctatactataatctaacagaaaccatgtcttcaaaaacttatcttgacttcagaaagaaaaagtacttataactttactgatgaatttacaacaaccaaacaagctaaccacagagttaagaaagacttacattgtcaaggaagttttcctgaccggaaaacagcaaactttgtcatgtcggaattcgaaaactcaatcttctcctctgtaagaaactcctcaatcattgtcttaacacgctctggttcctctgtctcacattcaatctcataacaattcccaaaatcatacttagtctcatcaacctcaagtttaacacctctccactcataaacattcctaacattctcaaagccacctaaacaaacaaaccctaaaaagtcattaaacccatattcctctttaacccttttcaaaaccctagatccaatatctgagagcttagccggtgactcaacacattctttaccaatccaatactcaatctcctcttcatcttcctccacacgactaatcccattagctagagttggcttcgctttaagagatacgatacaacgcggcggagaaggagaagccgcggaaacggcggcgttttgaaggaagcggagaccgaggacggcgcggcgaagatagaggtcgttcctgggtgtgtcgaagaaggtgttgcgttgataaagaatattgaggtggtatggagtgaggagagtggtgagtcggaggttaacagcggcagtta

SEQ ID NO: 55309 - DNA, 798 bp, Arabidopsis thaliana landsberg
agttaatgaccgaagctcgaggacttgatgacgttgtaaaggtaatgcagagaattcagagcggtttttatttgttttacaagtgaagtcctctttaatctgtgtattttgctcagatcttaaacgacataaccggaaacttggatgctaaaaaagcctgtactggtgcaatgaaacttcacaagaagtatcttaaaaaggtttgctttatactcttatgagtttgtgtatgatccttctttagctatcttataactctctgattgttctgtttttggtatttcaggccaagaaatagcattgcagaagattcacgagtagtagcgtttttgtatgtttttatacatatttgataactcacaaaaccggcgacaaaaaagtgactaacgattccttgggtggcaagaattctgaagaaaagagtccattttacacaacaacttctcgttgtaaactgttcatacaaatccacacattttgtaatatttgtttcacaaaccaaaacaaaaaaaaagcacacaaaagaattatcatcgatgtcatttctaaactcattggtgcacttctaagtcggattatatatgtaaataaggatggggtaggtgaataccaggtcatacatcagaatgaatatatatatatatatgtatgtgttcataaaagaaacgaaaaaacctttttctttctatttcacagtaccactctgatctccgaatctatataaacataaacacgcacgctctactctcacaagagaaacattacacattcaatagcctctattacacataacccact

SEQ ID NO: 55310 - DNA, 411 bp, Arabidopsis thaliana landsberg
tccacccataggggggggttcatagtatatcatcatcatcacacgccttatcattatgattcataatcttcggaaatagctccttcttcttgggtatctttcattaatccgtaaaacacaataatagattttcgattaaatggcttttatttatttaataaggatattttggagaaaaaattattacctttgtggattcttcctacgcacttttgcctttatggtataaaacggattttcccttcccacttttgcttttattatgtaaaactatgggaagactaattaatctattcacgtttaaaaaaaaaatcggtatacttaactgattaaaaaggaatgaaacttgataaataaattttggaaagcttttttgcttccagataaaaaaagacattatcatttgattat

SEQ ID NO: 55311 - DNA, 215 bp, Arabidopsis thaliana landsberg
  unsure (1)..(215): unsure at all n locations
cccccccccccccncacttcccccnctccccccccccccccctcccccccccccccccccccccttaacccgggttcagccccccattaacccccccccccccccccccccccccccccccccctcccccccccccctccccgtctcccccccnctctcccccccctccccctcccccctccccccccccccctcccccccttcccccccccccc

SEQ ID NO: 55312 - DNA, 918 bp, Arabidopsis thaliana landsberg
taatctaactacaattttaagcactaaacaaaactaacaattttaacaaaacaatttttttttagttatatatataaaattgtaataaaaagattttttgttttatatttatcttataaagttgtaagatatatttatatatatatataacaatgaactactttcaatagaataacaaaccatattttaatatattgttgcgtgggatttttctattcaatatatatgcagaagtttaaaaatacaatgaacttacccattaatgaaatatggcgagatatttgggtatctgcttcaatgttagaacattgatgttcatgtcgttagcaatttccaacagacagacgtcaacaatattcgttaggttccatatcaatatatttttttgtagagaattacacttggcatcggacttgttgagaaaaacacataattttcatcctccgagaaaaatctgcgtagcgatgaaggccctagtgagacaaagttttcgtcttgtaattgagagagctcctctttccactgaagttgtaaagcgttccaacacataagccacataacacttacggtttctggagtaccaaaaaatactacaaagttaacatcgattgaaaatatatgggactgattttatagatacgaaaaaacactgatatagaatgatgtagaagaaggtcaaatagagttcataggtttgaagaaaaatgaagtcttttttcatctaaaatgtaattatgttgatataattgttcagatagccaactaggtggctacatgttatcagtgaaaaaaaaatagaaagatgtacatccatgtttagataaacaatgaattgccttattacaatgtcttttggagaaaactgaagtcatctattaaaatctctatgacatattattatgagattttaataataaa

SEQ ID NO: 55313 - DNA, 358 bp, Arabidopsis thaliana landsberg
  unsure (1)..(358): unsure at all n locations
gacactacgaccgccggtganaacgggggattacaaattaaatccgaccaacaagaagccaggaccagggagacgtacgaaaacgacaccccgaaaaaccccccacaanacggaaaaaacgaacccccccgacgccaccacacaccagcccgccacgacaaaagccgcaaggaccgagaagaaacgaccagaaccgaccaaggccaccacgagggaggcacgaacggcacgcaggagacacacaaccaaacgggaaagccacgccggaaagcccaaccgaacagcagaggcgcagccaccgcccacagcgggcaagagggcgccgcagacggccaagcagcagccaacgaggagggag

SEQ ID NO: 55314 - DNA, 1300 bp, Arabidopsis thaliana landsberg
tgcattttcttggctgatgtagatgaaactactctgaattgctaagtacttcatcatctaatttagcccaacattgaatcgatgccacatgaccatagtcactaaattcgtctacttctggttcatgcttcctgtatttagatagtaatgcctagtggaaactgggaaattctcaagtttgagctactttctgttccagttgatctactactctaagtgaatgcagatataaatatatgaatctgtcacgcttcacgtaatgaaaatccttcaacttgccaaaatatatgcagtatatctctcttcacatactggcgattcaagattttaaaagcttgaatcttaatgttgagcattgcattcaatttcctgagggaatgatagtcttgttacatatcagttaaatgataccttggtttgtcatctttcagttaaacagaaatttgttgtgtggacttgttatgttgctaaccttttgttgtctttctctttgtaaggtggtgggcgccatcaaaatttgaccctgtaaaatctcctatgcttttctttgaaggcggtcggccaatacttccacctatacctcctgctactggcctagaccgggttctaaacaatatggtatgcggtctggatttctctgttttcctgtgttactataacgcaacttgagatatttgatactgccattgactactagataatctgttttcaaaatgaacatgggctatgacatttttgggcaagtattgcatgactttacagcgttttgtattgaagaatcagtttttgagcaaacaccaaactgtgcgatatgataaagtaatggtagtgaaatattctgatccttatacgacgttccgccattgtaacaggtaaattttgtggagaaaacaaagcgacctggagggatcataatcttccggacacaatcacctaggcactttgaaggaggtgactgggaccaaggtggtacttgtcaacgactgcaacctttgttacctggaaaagtaagtcagtttctatcagtttagtcgttgattaaatagttaatctgcgttataaagcatgtggaatgtcatactcatgccaagtcactcatgaaaagctacatgaaatcattagtttggtctggccagtatggatacgacgaagttcgaaccagggatcaaataagataatgggactggctagatattgggtagaggagctgagagattttggaacttaagctttagtctagtaaattgttaggagacgcttataatcagcctcatattttaatggtaggttgaggaatttt

SEQ ID NO: 55315 - DNA, 1421 bp, Arabidopsis thaliana landsberg
attttgtaggaccaggcagaagaaaacctcatcccaacctggttccagtgggatgtgaactcatatttctttatgatgaacacgttatttctttgaagtactcatcgttaaatggtcgattttctaaatgtagaaccagtcgacgcaaacgcatcgtttaatagtagtgtcagcaatataggtatacatttccttatgatgagcaactaactctattaaatgtttttccctttgtcgtccttcatcttcaatgacacaattgccatatatatatatatatagctaaaaccttggaacgattgcctactcttttacggaattcaataattattcgtagagacgaaaatagtgctactcctctacaccaagatggtgcaggtcatcaaagttctacgagcacatcaggtcattcccaatgctttcgctgcttcatttctttccaatacaatataaaacaaagacatacgatattttcaaaagaaataatcccatttttcttgtcttgaccacaggaaaatatgcagtgtctgagcaacatggacgttggaaaactattgatggtggatggaaaattcatcgttaaacgcccagcaaatagacaacgaattgactatcctctcttcttaccccctaaaatgaacgagttttttgtttgattgaaacccatagtaagtgattgatgatagtgtaatgatcattttgtactgagtttaaagcatagaaatcattgcactattactggaaactttttatttcttaaactaataagtttcataaatatattgcaaaagatgcaatagagtgctagagttttggtaatgattttttttttaatttatgagtgaaatattgttatccaaactcatgtatagcttattgaatattagcggttgatgctttggattttagtttttacttcgctggaaacaaggaaatcatattgatcaaattttacatgtatgatacctcaaaaagatcgtttataattgattaaaaaaatctagaaatttaacaaataaatattatacttttgagtaaacaaaaaaaacaaaaaaattgaatttatatattatcatttgtgattccaatcttgtgaatttgaaacatcccaccaagaaaaaatcttgtaaaatttgaaatagaaattttccctcaaaaatcaacgaaacaaacaaatctaataactagaatacaacttaatgaaataaataataaagaaaaagttgttctaacttctaactaacgaaaactttgacacacaaaaaagctcttaactaaaattaaatatttgttttttaaaaccaagtctccatttatatgcacgatgatcttcggtcatttgattaaagaaagaccccatctttagaaaaggttatatataattaagatattaatgtgacaatgccatatttcttattata

SEQ ID NO: 55316 - DNA, 1000 bp, Arabidopsis thaliana landsberg
  unsure (1)..(1000): unsure at all n locations
cattacaaagcaatatactataccaaatattatgaacaacttgaacggcaccactgcgaagaagctcgccaacactagcatcgacgccatcaccatgcttgcatgctacaaccacgagtaagagacgctacactttaaaagagaacacactttcgaaataacaaaaacgattaatatcgcgatataaacattagttaccttgctagccttggaggtatatatagaccgcaatttcaagatggtgacgttaacannnnnnnnnnnnnnnnnnnnnnnnattaagccatattgagcagacacaatgctctcagtcactgtttggtcagattccgtgctcactgttaccgcatcctcactttttgtatggaccatcttatttctagcttgagccattttagccaccacccatattaagcaagcagctatagccttaccaacccactccctgtaacataagtttagtttcttgattaatatatgtatccatgactaactcatctccgctatgttacttttaaactcacttgtagacggttaaaatagtaatggctaaaacaaacagtgtacgagacggcctttcccaataaatcacttcttggaaccatggtaatacgtcttgcaacggcctcaacaactcctacagaatatctcattattgtcagttcgatacaccgtaaattatgccaacatgcacattcataaataactacttaccataagaactgctacactttcactaatcccttcttcttcgagttccgctgtcgtggctttagccttttcaataacctttccctcttctctagattgattcactgcactttcaagagacgcaagcatttcttctttatcagtcactttggtcaccttctccttgcatgtatcttcaccctcttcttttatcatgtcaccaagctgatccatgttcatattcctcaatatggagctagcactacacgggtttctggtagtgcctatctttagactaatctctgcgagc

SEQ ID NO: 55317 - DNA, 201 bp, Arabidopsis thaliana landsberg
acacaaacgccagcagaacgccaaagtatctcacttttaaaaaaagacggcgagacccaggaccgcgaggtaaaccgaagcgttggaagtgcatcttccacatgcattctaaccacagatgaaccgggcaacccgcacgagggatgcttatgacacagggtcgccccttgcataacccagaatcaaagaacagaaagacta

SEQ ID NO: 55318 - DNA, 629 bp, Arabidopsis thaliana landsberg
  unsure (1)..(629): unsure at all n locations
agaacataaaaggtctttgtggtattggctcgatggatgcggccttaaaactttaccatgagatgttatgccaagaagaacccaagtcacaacctgatgttgttacttataatatacttcttgatggcttatgtatgcaaaaagatatctctagagcagtagatctcttgaactctatgttagatagaggttgtgatcccgatgttattacgtgtaacacctttttgaatactttgagcgagaagtcaaattcttgtgacaaagggaggagttttctagaagagcttgttgtaaggctcttaaagcgtcagagagtatcaggcgcgtgtaagattgtggaagtaatgctgggtaagtatctggcaccgaagacctccacttgggcgatgattgttcgagagatctgtaaaccaaagaagatnnnnnnnnnnnnnnnnnnnngctggaggaacctgtgtacttgaacactacagagcatttttgctcagatcccgttttcaccttaagagtctccatgcgtgggaactttttgcgcttctggagttttggaataccagaaatgcgcgcgaaaaacaggtagtcagataaactatatttgcaattctaactttgtaaacatgttactttga

SEQ ID NO: 55319 - DNA, 462 bp, Arabidopsis thaliana landsberg
catggtgatgagagtggttctctacgagcaattcccctgttgctgttataatgtgctcttcgctgtagctgagtccgcattcgagcgtccgtacatctgctgggcagagtcattgtgagacgctgccgactagaggctgggttatccaggttgtatatctcgttcccgagaggtcgtcgtcacgacttctctggtgcactggctcgtgggcaaggatcaggtcttcaccgtcaacagatgacccgaggacgtcttgcgcgatgtctatgctggagcactgcgagtcgccgcagctcgctcttgcgctcccgagcatcttgcccggacgtcatagaccaccgcgtgacaggcacttcatgtgcagtcgagagtggtcctgctgcgacgtatgagctcacgctatctcttcagaatgtctagtcgcaggcatgagtattagcgtacatcacaactcgtcggtgt

SEQ ID NO: 55320 - DNA, 562 bp, Arabidopsis thaliana landsberg
cacagtatcgtacttggacaggcaaactggacacggtgtgggcatggccgtccctggttaagggggcagcccagtagcaatcaggttagtatatacccgacggctgccacgccgacctggaactcgagccaaacctaatctttttcctagcatctcccgatctccctctctcctctcgccatctctcgcgccagtcgcgctccctcgtttgctccctttgtctttggatctagcgatcacaatcttaggtttattaagtcctctatgcaaacaacaactagagatttagttggactctttaatgaccatgatggacaactattaaggtcgtaaaatctatttcatctattgcactatccgctaatatttggtctggtaaggccaaagaggatcacatcagtgtagttgctcattttgtcaactctgatgggttttataaaagatgttgcttgatttatgagctatagaagttgcagatatgtgaaacatagatgcacgtgttgaaatggttatagatgactatgacattagtgataaattttttgctattatgttgaataac

SEQ ID NO: 55321 - DNA, 1398 bp, Arabidopsis thaliana landsberg
gaactttgggttcgtcacctaaaattgtcgtcgatcactctaccattcagttcgagtacaggataagcagcgacgcagtcatccacgactctttcgagatagcgagggagtacaaagagatactggcgactttcactttgtaggatagggagaaattaaaataaaacggctatctatttttattttggacggttaattggaataaaaatatctggtttatttaatattgtctttataagtaagtattcgtgtaataaacgattggtcgattcttagtttttacttgcgaatctgaagaatctgatgatcgatgacgaagatgattcactaaagcctcttcttcaattggaaggttctggttcagtaaaattttccggttaaattactcaataagacggttcagtggttaagtgggtcgatgtctattacttaaaatggatcaaggttttagaggttttaaataatggatcaaattaatttcgtttctgaatctgtgtaatcttttgttgttttcaaaatgttttaaagttataaagagggcaccgtgcctgtagcaacatgtaatgatagatctcgattttgttcctattcaatagtattttggtcactaaattatgttttttttttaagcataaaatcatctttgatttttctttgatccaatacttatttagacataagcatttggactaatgattttagaaaatttgcgtgggtcaatcatcatctaatataaagcatagtccactaaatctgataagaaatatatagatagacatttaaatcgaaaaaaatcctttatttccaattttgcaactcttatttggtaaacatatctagtattaattaaaactttaattagatgtccatgtttatgagaactttgttgttagtcaaaagaatccaatagcaatgatacttcaatttccacgtgtaaatattaaaaaaaatagtatctaaccatcgcctaaactggactataaaaataaaaaaatcgatgaagaataccttcaacttcaccattgcaagatttaccaaacaaccaaaaacttctccagtgaaggaaaaaaacatcgactttgaaaatgaagatcgcttccttaaaattgttgttattggtttctctactttttgccgtaacccgtaagtaaacaaaaaatatttaaagtttcattttgtgcttttagtattttttatttacatagtttttcattgattaatatgtttttttttgcttcttatctcttattaatatatgcagaaaatggaattagcattcaaaacagtgaaacttctgtcaaccaaaacttatgtatgccgaatgaaccaagatgcaccggttgtccaggtggtggtagtggtggttattgtggaccaccacctccatgttgtaagaat

SEQ ID NO: 55322 - DNA, 586 bp, Arabidopsis thaliana landsberg
  unsure (1)..(586): unsure at all n locations
ctggcataccatttttatatgttctgttggctaaatgcaagtataacactaacaggttgctaaaatcagcatgactgtcttcattcttggtttaacatgtgttttgtttctttagtaccatggaggcaccaacttcgacaggaccnnnnnnnnnnnnnnnnnnnnnnnnnnnnnnnnnnnnnnnnnnnnnnnnnnnnnggtcgccatgattgtttcagtttctgtatgtcactcacagttaataagaggaagagaagtgtactggaattgatgcagtagattgttctagatgtgtgatggtctatatgtaaccaaaactctgaaaaccatggcatgttccagtccgctgaggcagccgaaatgggtctcctgagggacctgcacaaggccatcaagcaaaccgagctggtgctgatctctgtcaaccccacaatccaatccatcaggaactacgagaaggtcaccaaattctatcagaaatgtatcgagtgcaaactagctactcatggagtgagtgcagttgtgttctcctttaattcaatgcatcatatcagtttgacagcgtcatctgtcactacatacaagt

SEQ ID NO: 55323 - DNA, 1376 bp, Arabidopsis thaliana landsberg
catgcatagccgaaaatatatcgttaatagattttttgtaaactaaatagaaatttgtttctacagtgatagaataaattttctttaagcttcatgaaattttcaaaaaattattcaatattttagatgttgtacgcttgctactgtagagtattattttgtgtccataactattttaacaatattataaatgagtgagaatacgaatggagagaaacgaaaatcttcaatagataaagattggctggttttgaattctagtcaaaaattagctttattgctgagtgattactcctacaatggttttaaaagcagagattcttcgtaagaagcaaaatatgtaaactaaagtcacttttattttgggcatcgttctaaagccaaattcaaataaaatatcgacatttctccttcctttgaaatcagcatttacaaaaacgtttgtagaaacacacaaaacatgactaattttgttttcaaaggctatatatgtttgtggctattcattatcaaagatatataagcggtcaccaaaagaattttgcaggtcgaaatgtacttcatatatcataaatgattaaaagtgataactaatcatttttactagcctgaattgaagattattgcaagaaaactttttgtgcaagggaatactaaatttggtaatcttttttatatataataaattaactcgccgttaaaataaaaataaaaaataactcagtaaatttgtattagagagagctatttcagcttggagtatatattgacatggattaatgaaaacaaaagggtaaaagaattgtcaaacgacagcatatttatcattcaagtactcatcgtataaaataattatataacgtattatctgcgccacctaactaacacaaacttcacgcatgatcgtgatgtatgaaaattccgatctctaagtactaattaacatcaaacaagcttttgttaaacctaatgcatcactagcaactttaatgttataaatatcataatttcttacataaaatactaatatgattcatgccaaaagttatctaattcatatatcatgcgcttggaataatataaatattttcacaacacactttcgtgattgttacgaacatagatcaaacagaaaattcaacatcaaacaaagaaagaatattgaccaaagaaaattgagtatttttggaaaataaatttggtaggaagataagtgggtgaacaaaaatgaagtagatataaattacaaagtgatttaacaatgacataaatgaagtaatatcactaagaatgtttttgcgttcttgaaaagagaatctaaggatattataggaattaggttaatccgcctaataaatgtttggtccgagtccaac

SEQ ID NO: 55324 - DNA, 1165 bp, Arabidopsis thaliana landsberg
gtattacctgtctttccatttctatatactcaacaaaatcatcatacaattaagttcttttgcgtaatttatcgtctaagtgtaacactagacacatattcgcagctaataaacattggattcaattgcaatccactaaaaatacactcaaacaaacaaaaaaatcaaatacttgaggaaccaaaagctaaaagtgtcactattatagctatcaacataaactttatgttttgccatcaatatttatttagaatataaatgagtggtttttaagtcgtgtcacgatttttaaagtccataaacaccaccgatctccatataataataaggtttcatcatatgccaaatccaataatacgtgaaactataccagttcattgtagacttatttggttatattattactacctccaatcattgaaaatgtatatactttgtttagtcgttatcacttgtcaatgcatatcaaatcaccttataaatttacccaaattcactattgaattgttgatgcactgtcacataagatcacagttgtcttatagtcgtcgcactgttatgacaaaaaaagtgtcgactcatattgaaacaaaaaaaagactaaacaatgttggcacagcgatgcgataaagaatcgaccaagagacaaccgagtgatttgtgttgtcaacgacaaatgaaaagttgcctatttttgttacttatcgtttgaatacaaaaccgtagatcgatctaaacataatccgaatatactaattttttgtttaaacatgatttattaacaaagtcatttaattattgtaatacaaaaggtttttgccaaaacaacaacatgctactttttcatcattttcccggaagaaactaaagatacatgtggcaccgacacttttctaattttctatcagatcatgtggcccaaaggatttggaaacaaacagtacctagaatgcattctaatcatagatatttatttttataaacctacgtctttaggcatatattagcttaacactaaaaattacatatgttttttttatatataaagaagacgaactcacaactttattagtcccctacccaaatttaagagcaggttaaaaacatagaaaacatcatatattgtgattttagtgttacgcaaatattgtctaggaaatacgtt

SEQ ID NO: 55325 - DNA, 1722 bp, Arabidopsis thaliana landsberg
  unsure (1)..(1722): unsure at all n locations
gagtttcccaaatcttctcgttgttttgtgtcgtattgatcaaactagacatggtataaaagttgttatttgaaatccgtaccgtctcaatatattcttgaggttctggtaaaaccaacaaaaaactaaaatctcttagtaacatttattaagaatatatatatattggatcttttatccttcagtttgttttttagaattaataataaacccatggcatttgcctaaccttctatggggcagagacggatctgtatgagattggaggtgtggttgaattatgtttctttacccgtgtgattggcttgtcatcggatccagtcacttgcgatagttgttcttgcacatgaaccggaactcttctttggtttacttgctcactcccaacaccttgagtgttgagtcattatgtaggttgttatcgtattttatccttaactttcttaaattctcttgttgtttcactttcctttctgaccaactatacataaaattaaatagattaagatttgtgcatggcacggactcttacctagttaactttaaattcttgcttgaataacactttcttagacaaaatatatgaggtagtgaatcagactagttgactagaggaataaaaggcaatgcgttaggtgacaggacaatattaaactcaatacggaaaatttagtctatactactagtattaatatatataaccaaaagtttggaagaaaaannnnnncaccgatgttgntgaatcgttatccaacataaaacctagtagacgaaacaacagtatgcaagactcaaaggaacaaaacagtgtttttataattaagtaaaagttttactattcatcaattgggactccctgattgttttccaaataaaaaacaataataataagaagaagaagaaaaaaattactttccacatcgattccaattatagaggagaatctttgtagtgaaactgacacgtgttctccaatattcttatactcattgactcttaccaaagtaactaagattctctaagattctctaagattcttcatttcacaaagattctcatttttctcccaaatataatttctaattattacagtaaaaaatcaaataaaatccggaaacattaacttttcttccttttacattttaacctaactaatcgggactatataactgtcttcttgccaaagatttcattacacaactcaaagaacaaagactcatactcaagattatctttctcttttaatggctctacgcagagcaatcactaaacgtctcattgactgttacagatccgatgtaacacaacaacactcatttttcagacaactctcaccttataacattaagatccatcgtcagtacatgacttcaccgaatggtccgaatcttacggaccggattgtcgggatccgcatcgagtccgtttctccgccgaggcgggaggaaacaccggtgatgggtttatcggttagtgagactaagaagttgttgaggctatatcaaatggagaaagtgaaagagagactcagagagattcctaaaagctctgtttcttattgggaatttgttcagatctgttgtgagagttgtgggaatgatgagcaagggtctcaaatggctaagtctctggatcattcaggatgtgtcgggggtttaggagacaatcttttactacatccctatcaggtgagataacaaacactggtgcttcatttttaaa

SEQ ID NO: 55326 - DNA, 325 bp, Arabidopsis thaliana landsberg
ctaccatacgaattccaaatcaatatatacatgcataaataacatagaaaaagaaaaactgtttataatttgtagctaaaagtaagaatatctagattttaacacatacctaattatgtcctcatctagcattgatacataattatcttaattaaatgaggtttaaaaaacataacctaaatatgggaagattacttatgcaagcgggggatcatttatagtgcatgaactattaaatgtgcagaacttactaggttaccttactagacaaggtaatttttgatggactgcaattcaaatactttgaccaatataaggaatgaga

SEQ ID NO: 55327 - DNA, 809 bp, Arabidopsis thaliana landsberg
aaattaacatggtatcttctctgaggtaagactagtggcgataacatgtcatgaccacaattcttagccgtcaatgttagccatgtacaaggaagccatgtaagaaatcaaattccaccatgatcgaaactcatcaacctaaaaaccctatctattcatcatacattacgatcaacaaacccctaagcaacttcatacatactccaaaatcctaacaaaaccacaattccagtttcatatataatccaacaatcgcgtaataatttacacacaaattaagaatccgatcaaacaataagaactgcgaacatttcctgattcgaacacaaaaacacaatgagattgaacaaaatcctcaccgattagaaaacgaaaacagcgagaagaaccaaaagcgatctttgaagaaggaaaatgctgcttcaatggacgacgaacaatctcgatcctgatgctataataatcttgttatcttctcaaatcaatgacttggctatgagaatcgtctctgtatactaacttgtatgattttatcttcgtcgaaaatttccgattttgttctttctttattcggttgtttgcgttagtcaactgtcgtcattgtatattttaacctttttctaatacaagcaaaataaagtatagttattattatcttaatgggcctctttcccttacgacccgacccggcccgtatctcctcaatttggttcaccacaattatcagctccggtgactgaatatccgaaagttctcatggcgtcgaagcaaaaattctgactcgttgatccataaagcgaactctttcc

SEQ ID NO: 55328 - DNA, 290 bp, Arabidopsis thaliana landsberg
  unsure (1)..(290): unsure at all n locations
agaacacctacagctgccatgaagattagtgttagcacaacgtttaaaatttatcaaacaaggcnagggcggcgcaanggctgcgctggcgacggacccaccggcaacaaggccagcgcgggctcgggacacaagggaggatacggaagccaaagcacgatatatagagaatatactagtgacgcaagatacccggaaagtgccttgtatctatgaagttcttcacttcagcatgagagcgatcagagacatatgggatatatgtgattgcacgtatagaacatatgtgt

SEQ ID NO: 55329 - DNA, 444 bp, Arabidopsis thaliana landsberg
  unsure (1)..(444): unsure at all n locations
cccccctccctccccccncnccccccccccttctctttttcccccccccccccccctcccccctctcccctccctctccccccccccttcctttttttcggtttcccccccccccccccctcaaaaacccccacccctcctctcctcccccccccctccccccccctccccccctctttccccccccccccccccctccccctccccccccccccctccccccccctcctcccccccctcccccccctcccccccctccccccccccccccccctcctcccccccccccccccccttcccctccccccccctcccccccccccccccccccccctctcccccctcccccccccccctccctccctcctctcttctctttctccccccccccctccccttttttccccccccccccctccccccccccccccttccccccccccc

SEQ ID NO: 55330 - DNA, 217 bp, Arabidopsis thaliana landsberg
  unsure (1)..(217): unsure at all n locations
gggcacaaacactacccctgcacacccagaaaaaacagggacttccagcgtacatgaaccgaaaaccagcgcacggaaaaccaagcctccaccgcccccccccaccaacaagggggagaacagggaaaaacaccaggngagcaacgaacaccacagacggccagagcagaggcccagacacacccaccgnggacgaaccacgcggaggaaccccagg

SEQ ID NO: 55331 - DNA, 906 bp, Arabidopsis thaliana landsberg
gacaatcggtcacctctacaaaaggttgactttgagctcatcataatagtaaccagtactaacgcggttctgacaaaaagaaaacaattccctctttcatttctttaattacaccacatatatcttcttttgattcttcactttctagtctcacaaaaacaaggaaacaattaaaaccaaagtgacgaatattaatggcgttttcttcttgttttctcttagttcttctgcaaatcttctcagctttacttctttgtcttgctcaagatcagtcaggtaaaaaaatataacatcttcattgattcaaaagtttcttctaaagctttttctttgctttgttctcaggattcatcagtttggattgcggttcgcctagagaaactagctttcgtgagaaaacaacaaacattacttacatttccgatgcgaatttcatcaataccggtgttggtagaagcatcaaacaaggataccggactcagtttcagcaacaaacatggtataataaatagctttctcaagatcaatgaatgttatcttaaaacctaacacttttacttcttccacaaggaacctacggagttttccacaaggcataagaaactgctataccttaaacctaaccataggcgacgaatatctaatcagagccaatttccttcacggcggttatgacgacaaaccctcaacgcaattcgagctctacctcggacctaatctttggtctacagttacaaccacgaacgagaccgaagcatcaatctttgagatgattcatatcttgaccactgatcgtttacaaatctgtctggtcaagacaggaaacgcaacgccttttatctccgctttagagcttcgtaaactcatgaacacaacttacttgactcgacaaggttccttgcagac

SEQ ID NO: 55332 - DNA, 590 bp, Arabidopsis thaliana landsberg
  unsure (1)..(590): unsure at all n locations
agataagacttacactgtttctggaaaagattcttcttcggaatctctttatagaacctgaagaagttgttcttgtagtgttttttaaagtttaagctgcagcagagaaagagattaatggggggttgtgaataaataagagaagagagaggaggaggaacaaagaagggagctttatgcagagaaggaaaaaaccctaggactagaggtggtccacaccgcccttagcaacggtcacatgatggaccctaccagtaaacatgaagaaccaaccacagccgttggatgatccaacctggccccaatttgccagcctggcaaattctcaaaatcgcagaacaaatattttacgtagcaccaagaaatataaattaataaacaaagatattggtgaggtccacgtttcgcttctcatgttctctcaacggtcgtcgatgctgatctgtttacacgacacgtggtgctattcgacagagtatgttcggcgcaacggacggatatatnnnnnnnnnnnnnnnnnnnnnnnnnnnattcattttaatatggttttgttttgttttgtttccttctaattttaaagagttacactt

SEQ ID NO: 55333 - DNA, 804 bp, Arabidopsis thaliana landsberg
catctcattgctctctccttcttaagcgcaggctgaaaatgatctccctggtgcattgatacctgaagcctctgggcttcttcagtatacgattactaaagaagctataggtaaattcatttcatttcaatgtattcctgtgagggatgatgggattgtgggtgagccaagaagttgcatgtcccaggaacgtgttcgtccaggtaatcaatgtcttgttgtttccgtgctataagatgatcttggaattttctgatgcaatgtgaacttgaactagtttggcaaacttttagaatgcgagtttgaagtagatgaataaatcctatatataagtatagactgagaatcacagatactttgaagtcaagtaggcattcaaccaagatgaacatgaattcttctttttcctacaaatgttttctctgtctatttcacagcaattcttgccataaaggtttacttattatacgtggttttgttgttcactaggaaacccaagcacggtatctcttcatgttgttggagctcttgttgaaggaaccatgctatctgcagagaaagaatattggggtggtgaagaaggagcatcagttttccggtggttccgggtatgtaacttcaactttaccaaattttcaaaattaggatgtgtttctgactgcatctcttttttttccttttaccttcagttaaatttaaattgtgaattttcttgcagactaattcagatggtactccatgcgaaataaagggtgcaactacttcgtcatatctactgtcagtcggtggatatcggtacttcat

SEQ ID NO: 55334 - DNA, 1250 bp, Arabidopsis thaliana landsberg
gaagactaattaactctgtatacatattctgaaacacgagaggtttaaagctcgatgtgtcaaactggttggtgtatttacggggcgagattgatccaataaccttcattaggaagatgtataaagcaagaagttacgttgagctcttccgaatagattatggatatgaagaaaatccacaaggaacccggagaccaaattctcacttcatggttttatatctcacaacttttcactacttatacttattatcagtggtttttaaatctaaatatgtgtgtgtttggcttctgcagagatgttgctttgaactaaacacattagatataagttggtataagagaatcataggagccttgaaaaccatccaaggttcagaatttttctctaggtcatcaattaatctttggaaaaatgttatttttgttttgttttgattggtgggtttggtttcaggtgtatcatttaccatagatgcacaaccggttatgggaaatccgatggtatatttatgtgggaacatagaaattggagtgctcatgaagatgcttgtgaagacaggcattgaattgtcagcaatggaatatggagtcgagtataaagatgcaaacttgaacccacctcctcccaagaaagttgaggctccttcaattggaacagctgagacaaaggacgtgaaagacacggtgcctcctcctcttcctgaggttgttaacaccaagttgtatacaagaaagtctcgcggtttaagaaggttcttttgttaatgaatcatgtcgtcattagcacccatattatcattttcttgcaaaaccaaataatggaccatgagaagaagaaccgttcgaaagaaaataaaaaatgaaaacaacgtcctactcctcatatatgtcatatgtgtgtgttattaatcaagtacctagttggtaaaccttcaagagtttttcaagaatgagataacaaatttgtgtgcattagtgttttcatattgttttttttttttcatactactgctctagttgttgatgctattatatgctaaacataaaaggcagagtgcatttaaagaaaagcatagaagcttatcgttacgttttacatatttgcctttataaatttatagatagtgtttaattgataagaacataatgttttttttatttatatataattaagcatcaaatgttgagaagtaattacagaaacgtaaaacatttgacttcaatcgcatgggatttgtacataaaact

SEQ ID NO: 55335 - DNA, 283 bp, Arabidopsis thaliana landsberg
gatctcaagatactttctgaatatgaaaacaagtgcgatcctatgacagtcacatgagagtagcggcatctgtataacgtgcatacccgcaccaagatggaagccacggcagcaccggcaaagatgttacccactaatgagactggcagatgggaaagagaaaaaaaatggccaaagaggggcacactaaacgcgctaataaatgccacgagaccaacagaaggtcccaccgaacctggaaagacaaatgcgacgaccaacgaccggatgagaaacggccacc

SEQ ID NO: 55336 - DNA, 735 bp, Arabidopsis thaliana landsberg
taacttgaaatttgagaaaatattttaaaatcactaattgaataacgggtgatttaacaaaaaaaaaaaacctaaattttccaaaatagttgttacattacagcccctaagtaaacggttcaagttcacatttacaaattgagataattaactaattatgggtccaattgactgatttggtttgttcacgtgaaaattgagagggttttatgcaaattacaataagtttggggtttttaaaaaatatttgaatctctcaatcctaaagtcgtatcgccggcgagacattcaaatcgactccggcaatatcacacactccctctccgatacagatttccggcaattacctggccctgagccataaatggcgtctcgagtgtttccctcgagctcgtgtggccattaccggtacgtgttatagacaaatcctgtaactatcctttaatctctcgagctttgtatatatagcgtttcgttgtttgttctattcctgtttgaatatgcgactgtaacaaaattcatgaaaattgagcttttgtatataaattcctactctatgttctgtcattgatctgtctcatttctcttggaatttgtactcttgttgttgttctgttgcctcttccagtagaataagcttgctggaatctgatgttgaagaagagccgctaagtattgtttgaaaccatcgagcagaagctttaggtatccttgtgagattgttcttgtagtcaa

SEQ ID NO: 55337 - DNA, 1280 bp, Arabidopsis thaliana landsberg
actctttcgcttcaactttatttcaggtgtgaacttgaagtttggatctctcattcgagtttgtatatccttgaagaactgcatgttcgggctcttgggtccaccttttcttagctcttcatactcaggtcccgagataatgttttcaaatgctccaatcagaatgtcgacatcactcattacttcccacacgtttgtgtagcgcccatcaggccctttattcagtttcttcaacgcgttctcaacagcaagcttcctcgcctttttaccgggtgaaagctcctcaggttcattttcagatttcaacaactctgagattgtcctgtactttggtttctcctcaaactcaaacaacttatctaagtatttatcagatgcctcgttcgggcgtggctctgttggaatatcgtcgtcatcatcaccttcatcgccagtccacagcgttttttcctcatcacttcctgaccaaacgctgtacaattcatcactatcatctccatcaatttgatcggtgctatccttagcttgttgtctagctttcttaatctctttttcaagacggtttcttccgctttcttgttttgtcttatcattgctttcgtcttcacttcctgaccatagagtatcatcatcctccatttctttctcccatgtttttctaaagtcatcatcacctggtttcacattaccaaatagattgtagtcttttcctcttccacttgcataaaatcgagttgctgcaacacattgaaacaaccgaagtgtcacatatattgagactctacttttaaacaatatcaccttcccaccagtgtgtactcaattccaaaaaaactaaactttaaaagagtcatgaacaaataaactctctgcggcatttccacgaacacctggtctactacttggactaatccgaaccaaaaaaactaaagacaccaatatacgaacaggctcggagatatcatagaggcttaaaagatcaaaacatgttggagaaaaatgaaaccttgtatagtctgacgaaactcagcaaatacccaattttgagcagaagttgtcggacacgaaagcaagcgactttgtgatctacaattaaaacagagaaactacatcagcttcgtaattaggaactattggtgctgttttatggaattttcagatcaattgataaaccttttggttacgatagagaatagagaggagagtcttcgcgcgaacatccttttctcttttaacggcttttttgatcgaatcctattttatgaagcaaacttttttta

SEQ ID NO: 55338 - DNA, 415 bp, Arabidopsis thaliana landsberg
  unsure (1)..(415): unsure at all n locations
cgaagagccaagngccgaaaagctcaaattaggaggcccagacaacacagaagcggacaggccaatcgccagaccagaacggacccgccgcgcgccggacagaacccggagaggcggcaccagagccacacgccccggcgccggcagcccaccagcagaaacccccaccaagcaccaagaaaaccgggcaccacaacacccaacaaagngganagggaacagaacngaaaccaaagacggccacacccaggccaaacagacccgcccagccgcgggaccaaccagaagcacacacagaaaccgacggccaggcaaaaaggggaaagacagacancaccaaacaaaaacacacacacgacccngggccnaacaagaaccagcggccggcgaagggaccggacacgcggacaacaac

SEQ ID NO: 55339 - DNA, 559 bp, Arabidopsis thaliana landsberg
ctgcccacgccaccagtcacctccccatctgcctcgctggcatgactcttccccgctatgccgactagggatggcaatgggtcgggttcgagtcgggtaaaaacccgcctgcaatcgcaccggtgaagtctacctaaacccgcacccaaacttgttgggtttcgtgtcacctacggggttttactcaatgtacacttttaagcaataattcaggtataagcaattaagtaccagcaataattgagttatatctacagattttgagccttctcatgttgagagcaacaaaacatttcatgagtcattcgctaagttacttcttcaaaataaatactattgcttcttaatcatttttgcacaaaataaagaataatccaaatttcggattaggtgtgggtcaatcttcacccgtaccggcacccgttgggccagatacgcgtcatttttgggtttgctcgttaaattgccatccctaacatcgactatgtgcatgtctatcagcgacgtgacgaacgagtgccaccccgctcctaggctgagctgacagtgtaccatacta

SEQ ID NO: 55340 - DNA, 564 bp, Arabidopsis thaliana landsberg
taatcttgattttgattttgtgttgtttttgtcgttaagactttgaaagtctttttgtaatccaaatgaataaattccttttctttttcttcctctctgtctatgtttgtagacttttgagattgcatgtaaatatgaatatcttacatgcattttgataataaacatcatttaagataacatcaagacatgtagcaatggttagtttgaacatgtaacatcactttaccatgttaccacccagattcaaacatgtatataatatgaaagaaataaaacttttaagagggccatttcggttagtttggtttctaaagaaataaatgttaactgaagtaaaaagaaattagaaatgggtcgacttgaattgtggttttcaatctaaaatgaactcctaagtgtgtaaagactaataacttcatcctggtttataatcaggacaaaaggaaccattgttaaacgttttgaacatataacaatggttccttttgtcctaattataaacccaagaacttattagagaacatactatcgccgagccaacctcactccttaactttgttt

SEQ ID NO: 55341 - DNA, 196 bp, Arabidopsis thaliana landsberg
gtttccagtgaagaaagacaagaaatccaagttattgccatgatctatgatgcagcacagtagcaggagtgaggattagtagctggtgatggaaccggagcttgatgattgcaaatcatcgtgtcgtcgtcatgtgcaagccataagcgacgtgcatcggaagatcgggatacaagctctcgagcatgctgatacg

SEQ ID NO: 55342 - DNA, 319 bp, Arabidopsis thaliana landsberg
ccccccccccctctttttttttcctccgggcccgggcccccccccaaaatgggtccccccccatgggggggcccccccccccccccgggggggccccccccccccgcgggggggccccccccaaccccccccgggggggggggggggggcccccccccccgggggggggccccccccccccccccccccccggggggggggccccccccttaaatttgttttggggggggggggggggcgccccttttttttttttcttttttccccccccccccccccccgggggaaaaaaagtgttttcctcccccccccccccccc

SEQ ID NO: 55343 - DNA, 471 bp, Arabidopsis thaliana landsberg
tctggcgttccgggcccactgccagccattgcgctatctgtttctcccctccgccgcgaaatccggctgacgcagccgctccgccgcgaacgtcgcggtggttgatctggccgctaccccgggccgggtacaaatgaagtcgcgcacccttcctcttccccctcctagtacgcacccacccccaaacccctggaacactgttggcggtatcgtgggcgatttcgtcgcgggtgtgggcgcggcggaatccatcgcgccgccaccagcggtccgtcgtcgcctgaaattggagttgggggcggcgggcgcttcgctgtgaagctctcggtggccggagattgtgctctggtggctgggaggtccggttaatttctcgtcggagcttcttcttcacggcggaccaagtcttatcgttgggctgcgactctggcacgccggttaggggtaagatctcgtgcataatgttggttg

SEQ ID NO: 55344 - DNA, 796 bp, Arabidopsis thaliana landsberg
caatctcatataaattcgatttcggaataaagatagtcttgtatgattcttgacatggctaaaaattacgtctcattccatgacgataagactcaaaggaaccaaatagtttttttttttttttgggtgaatttcttgatcaaaggtgacccaagattgatccggaaagtcgttcttcattcatgacctattacaaggctatcatattcatatcccgtacatgtcttattacatcgcacatatcatatgatcgcatcttatcccataccctcgtatcatcctatcacttcttttttgggacgtcatatcaccttttatatttactgtccattagcaacaactgtcgagaatccgtcggttatttgtcaccgttaatatagcgttttgtagttgtttgaattttaacttaacttactgacggaatcctaaccgatatacgatggaaaccgataaaatttccccttaaatatgcatacatactcattataactacattctttcattttctgaaatagaaaaacgtgaaaaaaatagaaatgtattcttcctcttcttgttttagattatgcatggacgaaccaaaggtgaatccggagttgaacttactaagagaaaaatacacatgaggggtaggcgagttcatggaattggctagtcaacaaccggaagaaaggaaagagacttttatgtctcgggaatcctttcgtgtcttgtcaggaagttcttggtcaaccgttggagttttggtcgacggattcttgatggtttactaccgacgaaatactaaccagtcgtg

SEQ ID NO: 55345 - DNA, 1137 bp, Arabidopsis thaliana landsberg
aaaaaacagtcaaaagatattaggctatatgggccgaagttgctattattggtgggccttagagatctttataccttaacgaatcgtttcgtctttaaaacgactgttcggcgattccgacgccatcccatctgagtcccggagaaatcgatcgtagctctctgtgcccttcgcttaaaaaaatatcgcttctctcgagaggggaaggaaagttcatttctttttgtccaattctttcaacttctcgttccaatcccctcaattctccgtttcaccgaacgcacttcgaacccttaattgctttttgcgggtcaagtttcgattcgagcgttttagggtttcgtatctgaatcggtcgacaagataaacccttttgtgggggtttcctctagatttcgaaaacagaggtatgttaaacgtttctgccccttttgaatctcgttcgagcaattattgagttaggcgttcgatgatgaaccttgtgatagctaatctgcgaattgagcttgagttaggccgttctggttcttacctaattcaacacccttactgttagttttaggcacggaagtcttaaatagggtttagggaatggttaaccgaggttaggatttagggtttcgaaaaaagtgttcagcttccgtggtttcgtgaattagggggaattgtcttgtcttgtttatgcttctgcagcctttattttatgtttcctttggattttgttcaattctaaagttcttcagtagttggctgataaatttgttatcatcagctttctaattactgatagcaactgttttccacatgactgtaaatctctaaaagggatagctttcgtttggatggaaattctctgaaactaaactacatagtgatatggagacacaaattcatcaacttgagcaggaagcatataccgctgttttaagggcttttaaagcgcagtctgatgcgatttcttgggtactttcttcctcctttgcattgattgtgttctgtcagtctcacgacttaatctctggaatatattttgttgtaccatttccgcacctctagccaaaagaaagcttgataaccgaaaagagtaaagaattgagagtatctgatgatgaacatcgagagcttctcagtagggtc

SEQ ID NO: 55346 - DNA, 421 bp, Arabidopsis thaliana landsberg
tgaatgttttaattttatcatatgttacagcaatcggagttagcaatgacaggtgatgttactccatcagcaaatagagtgcggtcgccgccttcaccaagatacatgtaatgcctcctcctccaccaaagaccatcgcaccaccgccttctaagaccatgtctcctccatcatcaaaaagcatgcttcctccaccaccacgttctaagaccatgtctcctctatcatcaaaaagcatgcttcctccaccaccgcgatttacactgacaactcaagcttcaagattacaggacaaccacatcagtgtaaagaaaccaaatccagttccaggtttgttagaatcataatcaatccttggaaaactcaccagcaagaaataacgttaacttggcataacctagcaccagacttataatgatca

SEQ ID NO: 55347 - DNA, 944 bp, Arabidopsis thaliana landsberg
tttccactctatttataggcaaagagatgagacagagaagattaaattacttcttaacaaaggttgttttcactcaaccacatgcattctcaagtgtctgctcctcacattccccaagattcccatttactcacttctctatttggtacgtaagtcacacaatatgattctaaattattttacacattattcgttttgttcacacttgctttcgactttcgtaaacctatatagttcatccaatattattcggtaaattcgatatttatcaatctttattctcgtaggttaaaggagacgattgatacgtgggatctacttacgtatctgcatgattattagttataaaagttattgcaaacattaaattactttcatagagagcaatcattatattaaggtaacttaattttattatatatagtcaagatttaaaggaataaagaaaagattctcaaaacatttcatcactctccaacaactattcaccacattcaatggagtcaccaccactatacgagatatcctcaagctcttcttctgaaaaacctagacaccatttccaatcccttgatctcttccctaacctcaaccaaaactcttgtatcaacaataccctaattgagcctttaccgcttattgatcgcataaacttgaactcaaacctagacctaaaccctaatcccttgtatgcggaagaaggagagcaagaggaggaagaagaagaagaagaagaccgtgaagtggacgtggacttacacatcggccttcctggttttggtaaaccaagcaatgatgctaaacagctgaagaagagaaatgggaaggagatcgccacatatgacgccggaaaaggcatcgagaatgaactttccggaaaggcatactggatcccggcgccggagcaaattctcatagggttcctcatttttcttgcatgtatg

SEQ ID NO: 55348 - DNA, 1038 bp, Arabidopsis thaliana landsberg
  unsure (1)..(1038): unsure at all n locations
aagggcgaccacagtacacaaaaattatgtattgaagttctatcatgaaatcattattgttttcgtcaacaaatacattatatacaacagtgcgcatcttatttgcacatgattcatttaaaatgtgcagatatgtaaaatacatagattttactctttgtcatttatcaaaatatatataactaagtcagtattttaaaagaaaatccggtataacgtagattcggcgtataaattttggccgcttttacttttaaacaaactttttttttatttttttggtggggttttttattacctttgttagaggctagattgcaaagaatcacgttgctagttttaagtattatacaagacatacgattgattattaagtaaatcaacaaaatttgttaacatttcgaataaaaatagattgaactatataactaataaggatataatatatgtgctgatcacattgtaataactcaaacaattacttcttcttttttaagtttgatcttattttgaatacaatattttgatggtagtaatacgtttttggtaataacaattgctattaattcaatcacaaatgagatttaataataaaggtcaaatgatcaatgcatgcatttatattattaacttaaagaaaatttgacttggtaaatcacctatatataaacgtaaaatatttgcaacataattctaatgtagcgtatatatatgtatggactatatataagtgtgttgaaaagccaaaatgaagaaccaattgataaatcacatgatagtgatagagcacaaatgatatattttttcacctaatcatttacattcttacgtccataataatcacatggacctcaaatcaaatgaaacgtcgaaagctacgagtagtaaacaatacaatgtcatttaggaaaaaaaaactgttaatctgtttaaatgtaacctaaagttaaaaataatcaaaataattagacacatggtaaggctcatttctttctttcctactcatcataaacctnggtggaagaaataattaacgct

SEQ ID NO: 55349 - DNA, 174 bp, Arabidopsis thaliana landsberg
tgaacagtcaatctagccccctttcttatgagctttacttgatggctcgacttgtaattcattctatctttgctggatgggtgacttcctcccagcgcgcatagatcaattaaggttcacgatgatagttaaccagattatttttcgctgattctcctggtattgaactttaca

SEQ ID NO: 55350 - DNA, 1166 bp, Arabidopsis thaliana landsberg
cttcataggctcaagcatccgttgaaacatttacagcacgatccacaagccctctctgaagaattgtggtcctaagcttgatgctaaagcagggaaatgaaagaaatacccagtcaggagaaagagaaagacagtagggaagttgtagaacagttgtaactaacaaaaatagcaaaaaacttctattaagaggtcaatgaagaagaaagaaataaatagaccaaaactctaagcccaaattcacctcagactctgaagaggaactttattagccagaacagagtaagctgctttgcgtactgattcattaacatcgagcgtgcaatcaataattgcttgggtggttgcatttgaaggaggcagagataaaacaattgttttgcgtacctcctgtaaacaataaaaacatcaacaataagactttggcaagcattgaggacaaaaaatcagaatgtaatttatgatgtcaaagcagaaatggtaaaagatagaaactttaccggattctgttccagaggaagcacctcaagtagcaaatcaagaatgtcactattctcaggatcattcacaaagcgtgaaagagacctcacagcaaatgtacgtataacaggaactttgtcccgaactcgcaacatcatacaatcaattacatcatcccatagttcatccgctacttcaacttcatctggcaacctcaaaatgatctgtaacaaacacaatgaacagttgcattaaacctatatatgacctaaaagacatttacccattaaattgaaggagaaagaaccctaattattctcttatacctctgaaattatctgacacgccctgaatctcgcgtttctattcgcagcaacagatccagcaaccaaaaactttagaagttcctctagatactcgtcgcaatcggaatcaccatctgaattactacgaagacaagcaaattccgctacgaatctaacaacacgctctgctgcagcggttcttcgttgagccgcgatggaaagaggggttagggttttgagaaacacggaagagaattgacgaatagaagaagacacggattcggattccgattcagatgaagatagttttgaacggattgtggcgagctcctttagcttccggttgtgagtggcgtatgatgtgcgagtctcgtttaggat

SEQ ID NO: 55351 - DNA, 323 bp, Arabidopsis thaliana landsberg
atattattcttacatattaaactcataaacctatacaccctaatatcctttttaaagcttttttttctttaaaatttgcatttactaataaaatttttatgattttaaaggataaaaatttcaaacaaaaacaagcaaaagctttttggtcattatacacaaaatttgtgttaatctacttaatcccaacataatcgtgttcatctacttattaatagtcatatttctttcaatttggataattttcacttaatctcaaaacattatgagaattatttctttcatcaaaaactcagaaatacattaattctcttttaataatc

SEQ ID NO: 55352 - DNA, 552 bp, Arabidopsis thaliana landsberg
gttcaaaatgtcatccttttaggtttcgctgtttttgagagaaatttgggaaattttctaatttagcgtttatttttttttacacggtttctttaatctaagactcgggttaaaaaattggaaattctaatgcgatttttgcatttctattaataaagtaaaacttggtgagctagtataacacccctggtgttcaagatgtttctgtacctcttcaaaactacacatcctgtgactcgataatctctgtcgactgaaattgagaggaatagactgagataaaacctttcttcttcctatccggtagattcttagattgcgactataaagaagaagatggctgtatatgaacaaaccggaaccgagcagccgaagaaaaggaaatctagggctcgagcaggtggtttaacggtggctgataggctaaagaagtggaaagagtacaacgagattgttgaagcttcggctgttaaagaaggagagaaaccgaaacgcaaagttcctgcgaaagggtcgaaaaaaggttgtatgagggtaaagaagaccagatag

SEQ ID NO: 55353 - DNA, 478 bp, Arabidopsis thaliana landsberg
tgaaaaggacttagtttaaatgatttgcaaccatgtgcatcacatttttggaagtggtatatgtctttcatccagcatgagaccatgtcctacatgatatgcaagtgctatgtactatatagtcatgaactgccatgaactcactttgcgagcaggtgtgtgtacggggtaccttcctcaacttgtcaatttatcatacacagggccatgacaagaatgcccaagataaactctaacagcagttatgattggttaccacaggctattttgttcagatattcacgtcagcacataactaagcagatgacattaatgtagacatcagttagctatggaaacacgattcagatgcataatcgaacacactctgcagttatcgagttgcatcctcatatacacacctccaatgcacagcaacaaccttagtacctgacgtccagcacaatcgttgcagcacgaagcactaaacaccagcatc

SEQ ID NO: 55354 - DNA, 825 bp, Arabidopsis thaliana landsberg
cggtaaaacctatgaagttatccctaaaaaagctggaacctttttccataaagaccaatgtttaaacctctctatatattattacagcctatcacgaagctctgtttcgctggaaagtctgagttccttgttgctgcatcccatattccaagacctgaactatctgtttggaatacatcaaagttatctttatcatggtcatatgggttacgcatagaaggtcagtattataatgcttctttgatttccccatgaaaactcttgctgtggtttacttagaaaatgcttgttctcgttctatagctgtcacctctgcagtggattcgtcagcatttgcagtcttggctgtgatcccaaaaacttttaaaacagatgaatctaaggagaacatcttccgtggtagagatggtgccattcttttgtttaacggatcagatcccaagccggtatctatatggactgtgatgaaggtatgacataagaaatagcccgttagtatttaaccttggagagacaggaaagaatccaacgagttaaacaatgtctaaattgcaggctaggggaggatcaatctcatttttagaaggagataagtctcagcttcgccttgcatatgtaaatggaagccatgaatatgttgtctttgatcccaatagtgatgagtcacatgagcgtagcgctgttgactactatggtcttgctggtctggaagagacaggtagttaaaacttataacatatttgaaagaacctttgttgattataccatgttactaatccgaaaagttttaaccttttaggagacgccgggtacactatccttata

SEQ ID NO: 55355 - DNA, 810 bp, Arabidopsis thaliana landsberg
gaactcttctttcctaattagattaaccaaaataaagaatgtttgacctagttttcctaattaaagtaacacaaagattttgacccaaaaaaaaacgtctttgagcgctcgttttcttgtcgacgagagagctcttaagacagaacacaaagataaaaagagaaacccttgttccaataaaataaaaagaagtgacacatcgcgtctcttaaattttaatagacgacgacggccacttcttgtccgaatcgtacgtcaattcttcttccatctctctcgcaccataatatttattcttcagatcaccagcgaccgagcgaaagaaacgacacttcttcgccgttttcgtccacatgcagttttggggatagcacgttgtgagtgattaagcccaacagataaagagaaagatgatgattaaggtgaagaaggagacgatgagggcatgcttaagctgctctatctgcgacaatatcctccgtgacgccaccactatctccgagtgcctccacacatgtcagttcctctttttaacccaccaaatgtttcgaaattcgctgacattggctttgatttcttctcaatttggatgattatattatagctctgtcttcttcgtctcgtcctataatcgatacaattgaaaagcgggtcaatgaatagtttttgttgaccaaaaagaatatgcaattttgactgcttcaatttctccttcttcgtctttctagtgataggtgattcagcatttttatgtatagcttccttgtgggtttgagcttcttacttgtatgcaattcaatttgagttttt

SEQ ID NO: 55356 - DNA, 1009 bp, Arabidopsis thaliana landsberg
caaactgggagatgcttttttaacataaaaaactatatcagtctactttctttcggctatgctatcttgaatgtgatgaaactttgaccgcagatgtgaaatcaaatgtgcagaattgatggggcgattgaattctttcccagatacaattgtagaaaagtactttaccttgcgaaggtgcaggggcctcaaaccaagtaaggtttagaagtttgtaatctcccaccaaagtagggctaaattgaatcttgtggctgataagggaagagtttattgcggatgcctgactagctgagaaactaattccagaatgaggggtgatatccatcgatatgttcatccttgataagcttagcacatagaagttaatcagctcgatttggtgaggtaggagaccaagctgggtagcaaattcgttcaagaacatgttccaactaggagtttctgaaacattcaagagaaggatgtccagttttataggatacacgcagtggcaaccaatacttcttcgtttaagcaccatatctgatttgcaacaatctggaagaacaacaaataaacacaatgaatcttgaatcaaaaagttattcaaattcaaaatggaaaagagagaaagttgaacttaaattatccttgtaaaggctaacattgatttagttatgagaatggataatttcttacttgaaatggagggcgacaaaggtggctgagttaaggcatcaggaagaacaccattgctagattgtgctggagcaatatcaaccaagccggctccaggagactgagcattccttttcatggaaggtttggagaaatgtgagctggtagggggatgatcagaagcgaccaaacgactataagggggagaatgctgaggtgcttctgcttgttgtggtgcgaaatactttctgtgaaaccgcggaaattcagctggtagggccagatcagtgataactggtgaagaagaagaaaataacgttggtgaaactggcagtccttcatgttgagc

SEQ ID NO: 55357 - DNA, 521 bp, Arabidopsis thaliana landsberg
ttggattcaaaaaaatgttttatgtttatgtaatgtaattgagcttagtttaggtggtaatggtgggagaggaggtgatgtgattttagaatgcacacacgcagtttgggatttcagtggattacaacctcatattgtaagtgtatctgtcactcttttcgtgttctcggggaacatgtctcatgagaatttctctgaactggtaatatcaatgagttttgcagaaaggtgggaaagctggacacggaacttccaaaaacaggataggaaacagaggagaagacaaggttttattatgttctcattagttgttcctgtgcttctttcttttattgttcgggaattaagatgttgtttcgcgcttgtttgtgttaccataggtcctgctagtgcctattgggacagtgattcatcttcaggagggtgagattccatctcagggttgaaaatgagtctcccaaagatttggatccatgggaccttcctggctcactggttgaggatcctgcatccgaggagaa

SEQ ID NO: 55358 - DNA, 410 bp, Arabidopsis thaliana landsberg
gccagatggtctcgatctcctgatcttgtgatccacccacctcggcctcccaaagtgctgggattacaggcgtgacaccgcgcctggtgctttcagtctatttttaacacatcttaggcagaactgaagtaactttttgtttattttgtttcattaggttttcaaccagatgaagaaatgaatgaaatctgcaagactgaatttcaaatgcgattgctatggggcagcaaaggtgcacaagtcaatcgggcagagagatttgagaaattcaaccaggttttaactgccctctcgcgtaaattggaacctcctcctgtaaagcatgcagagctttgatatatcctcagaggacccttagaatatcttttcaagtttccccagcttcatcttttgggaaagcttaatgtttt

SEQ ID NO: 55359 - DNA, 1370 bp, Arabidopsis thaliana landsberg
tgtcgatgatatcgtttcttcttgttaggatgaagaggatcttggtcgtttcctgatcctccttcttgattctcacttcccgatttagtattcggactgtcgaattcatcgtcccgaagaaatccttcattattgttgtcttcatggttgtagttgtggttattgctgtctgcgttgttcatagccgcaagcagcatatttggctcgaacatcttttcttatactcgggaaactgaaagcaaaccctagaagcaaaaaaaagtagagagttttgtcaaaatttagggtttgaagaagaagggaaatttcttcgaggctggaaaaatatggcaatacttttgtccacgtcaacaactttacaaccttctttttgtatgaacaacaataacttaaatctttcttcggagtcgtttatctttcttcttgaagatcatacaaaatgatataagcaaacagaagaattggagatgattgtaggaaacaaaggacccactaattgaaagcaagaaaaaagagccttgcataaaaaagacatcacaatcacaaattaatttgttattgaataaccaacccaaaaataatgaattttcacatactcaaaattattcgaaactaccgattttttacccttttaaaagaaaagaaaaaaactaatcagcagactgaaataaaaactatgattgattcaagagtcatatcatatgtagtgtagatggaaatcaattgttgtccaaagaaaaaactttaaaatttctacactataatagctttgatggatggtgatttaatttaaaatttcgaggtattttgatcagttttgatttagatgggataggaaagagaagacgaaaagagaaatgttggactcatttgttcaaagcaaataaaatgggaaaaagtaggtacaaataaattcccaactctatcctgtttattaaaaaaacaatattttcgtgagaacaaaacaaaatttaattaaaaataatcattagtagattttcaaaaaaaaaaaactcttcaggaaaaagtgtaaactactatttggcgattaagaaagaaaaaaaaattgaaatgaaaaaaatagtattatatctgtgcacctgtgcgacggaccaacatatagttattatacaacttacaaccaacgtgacataaggcctgggtgatgtattaattttttccagctatttcttatcatcatcatcgtatttaaacgtttctattacacacattaatatgtaaatgtatactactactataaagtatatacacgtgtttatatataaaaccaaacgtataatgaaaatatggatatacgaagagaatacaaacctttttgttttttttggtaggcaagggaatactaacct

SEQ ID NO: 55360 - DNA, 325 bp, Arabidopsis thaliana landsberg
  unsure (1)..(325): unsure at all n locations
caaaattaagagggcccaacttgaagttacgggatttgaaatatttcggcgcgaggaaagcnacacacacgaaaccattaaaaacacaaccccccaccaaaaaaaaaaacagacgcaaaagcaaagcaccaggaaggcagacaccgcaggggaagaacaagcgaccggccgaacagagaaacaagngagacaagaaacancaaaacaagaaagagaacagaacgggggacccaagaccacgggcacgaggcaccaaggccaaaccccaaaagaaaggcccgccaacaacaagaacagacgnaaagggggaagggggcaaacaaac

SEQ ID NO: 55361 - DNA, 1070 bp, Arabidopsis thaliana landsberg
  unsure (1)..(1070): unsure at all n locations
aacatgggcactgtcaaatcatacaaagcacacaaaatcacaacacactctctttctctttcttttagagatctttatctattctcttgaaatgttgttcaaaaggaggaagaggagacagagattgggagaagtgaaatttcgaaattaaaagaattaaaaatagaaagacctaaacgaaggagagatcaagctagctaggtatggcttgtgggctccacttcacaagtgatgttgttattacaaaaagtttttttctttcctactgttttgaatctgccgatgaacaatgtttcctgataagaaaattttcataaatttagtctctggggtgtaaaaaaaacagaggttctcatagtcacgtccctgactaggatatgggcgtcactgtccctttccgtctgctcttttgttcataaagataggtatatcttcttggataaaataaaaaagagatcaaacgaaagagataaaaaaaaaagtattttgttagggaataaatatgtttaatatcctttttttctcaaacttgttcattattgttattgatgagaatatgagatgattttgtagttacaatacaaattagcaactaaaacgacacaaactttgcgacgagtaaatttattagcaattatgttatccaatgggatgatcgtcctacaaccgtcatatttcgtgatctcaatttcgtcaaccatatcaaatgacgacacacgaatggtttgctaactgaacgacatttgtagaggtcgataaatcatcgcttaaataccgaaaaataagtaggtctctcgtgcataactaacagaaaatactttgagaaagcaagagtcacatacatcacctctcgcatgactctaagattataggttatctcatcttcactcggatcatgaaaatgggttgacgagaccattgctcgttaacaattcacctccaacttgttaaacacatgtattcgagacaaatcatgcgcaatcattaaatgccattgcatggagatgtggattggtattcggncatatgcaaatgcttatctcanaagatgtgacgcaccacataagcta

SEQ ID NO: 55362 - DNA, 1104 bp, Arabidopsis thaliana landsberg
cggcaatagctctttcaggtgaacgcctactactcctgtgactcctatctgacggtgaagtagacctctcatgtcttcctctagagtatctctcatcatctgttcttgtccttctccttttttcagtatcctctctccctgatcgtcttctcttatccccaacttccctatctctttctccttctccttttctctccctatccctatctcttcctatatctctatccatttccctactgtttctcttctccctttctctaccatcatcttctctctctctacttctcccaatttccttctctcctcgagctcttctcagtctcttcgtacgtggtgaaggagacctagaactaggagccattattggagtcagggtcgttttctctcttctttgcctttggaaagatcacacattgaaaccagggtcagaaggaaaaggcatgtgagctccagataacacagtaaaccctaattcccaaatgcatagaaactagaaatggagcaaaagccctaaaccaaaaaacgtaagctacagatttcaaatactaaattcagaagttccgggcatagtctagggttgcaagaatcgttaagagaaaaaatcgctgcataacgagaaagaaaaattttacctggtggccggaactgtgactacttcggcggagagaagaggagagagtgaataataataatcgcagagataaaaagaatcagagccaaaacgagaagaatcatttatttggcctcttttgcaaataaatggaaactgaggggttcaatatcaaacaaattgtagacggtatggtaaaacttccattagttgacacgtgtcatatcttgtttggtagaaagtatatgtataattagggcagaagccgcttgtaacgtcgtacccttgtacttccttcgagatttttgtttcttcgtcctagtttgcaacaaagattttataattgatcatcaaacaaatcggtgagcctgttacaaatcgagtgcaccagctttaccaccaactttgataggatagaagacaaattcaagatcatagatatagttgaggtggatagcttaacgacataaaccatcagaagtgacagtgatctt

SEQ ID NO: 55363 - DNA, 482 bp, Arabidopsis thaliana landsberg
  unsure (1)..(482): unsure at all n locations
ccccccctccccccccccccncttcctctcccccccctccccctctctcccccccccccctccccccccccccccccccccccccccccnccccctcncccccccctttctttgggtccccccccccccgccccccaaaacacaaccccccaaaccccccccccccccccccccccccccccccccccccctcctcccccccctccnacccccctcctcttccccccccccccccccccccccccccccttccccccccccccccccccccccccccccccccccccctcctccccctctcttttccccccccccccctcccttccccccctcccctcccccccctccctccccccccccctctttcccccccccccccccccccccccccccctttctcactcccccctcccccccccccccttcccctcctcctccccccccccccaccccccccccccccccccctctccccctccccc

SEQ ID NO: 55364 - DNA, 436 bp, Arabidopsis thaliana landsberg
acgataccctaaacattttcaacagcattcctagagaacccataacccaacgatccatgccggaaactgaatactatcaacaacgataacaccaagagaagatgcttgaactgatcttataacctaaaactagagctaattagctatatcaaactaacctcatcaacatggcgttttccaggcaaccacgcagcttcatgctgcgaggcagtgtcaccatccacattagcttccctaatctcatcctcgcttccatcatcagctttataagtagaagtagctccgccgctacttcctctctctccatcgtaaccgctactagtcggactcggtggttcttccctgcttccatttccaccggattttccgccttaacaaaacctctcctccgctagttcccgccacaccttcacgcaataaacctccattgctaact

SEQ ID NO: 55365 - DNA, 489 bp, Arabidopsis thaliana landsberg
gctgaaatcatgtcgctcgagcgaaacaccatccacattgttcagcaatgcaaaatgcatatcggtattatttctgaaacggtcgatggtgcggttgaggttatggatgagaataaccgttcccgaatcgttgttataagtaggcaaggctggaatctccatcacatggtcagtggccgccagcgggtaatgcgccatcaaagcagccttgtcgctggtaaaggccaggtattgcccgggataaaacagcaagtcagtggcggaaatgattttgtggttgccgatggtatcatggtcgatattggccagcgcccagtttttgaggttgaaggtcttttgtgaatggttgtaaatttccacaaaatcactggcgcctgtgggtggatcaaacaatatttcgttgaggacaatttcaccggcctgtgcctggaaagctagaagaaaatcgacttcctgcgaaaagccggtaccgtttcccgagcaatcggc

SEQ ID NO: 55366 - DNA, 776 bp, Arabidopsis thaliana landsberg
gctctgttaaaaacaaaagatagcaatttggcagtttctgtttctggcaccacaatagtagatcctgaaccaagctcgatgacgtggcactccatggctgcaccgttactccatcaaattcacttgaaaaaaaaaacaaaaaaaaaatgctagtaattttgaaaattctgcttattttggtactttactttttttttatggaaattgtaactattaggtgttgagtgaataacaatggcaatttggtaagttgtttattcaaagttggaactggagaatactaagtttgcgactaaagccttaatcaaaggccttatcaaccaatagttgaattagtttatagaccacaaagataattaggttacacgtcacggaagcaaggagctattggtgtcaccagaccatagtatttaatttcaagtctattaattgtagaaggcaacccaaaatccactccttgaaataataaaacactgtcttaaattcgtatttgttgagtccttcaccaccattatgtctgattctgcttatatacaaatttaagtaaggttgttagacggttcatgtctccgaatctttgatcaattgtaaagtgtaatgtaaaatagttttttttttttttttaattttaaatttgcgactactatatctaaaagtctactatcaactacaacttcacttgtaaattgccatactctcgaatagatcatttttgatgaaacaagtataaacaatcatccaaaattaatcaccaatttgagtgcctccgagttttt

SEQ ID NO: 55367 - DNA, 664 bp, Arabidopsis thaliana landsberg
ttcccgaagacgttgtttcaggcttccccgtgtttttagtcggtgaactattttccggtggagaatgtacggtggttagaccacgtgaaagcttacgataatctaaagagcggcttgccctcataggtcccgcattgtcacgacgtgccacggtacaactaccgggacggttaagcttatggccttgtatcgcggataaggactcagaccgtgaacggattcgacggctaatgtgctcaggaggtgaaaagagagcattttggtagtttaaagggatgagtttcccgccaaagattatattttctgccggagctacgtcgtaggaggatgaggttagaaactcaaaaagttccgttgacggttctttgtggtcttcggtggtggtgggattaggattcttggctttgaggggaagatctcggagagatagtgcgtcttctttttcttcttctaggtgatgttgaaatggttttgggagtttagtagggttttggagattagtgttttttgtagtttccatgttttttagggagagagagagagaagacaatgaagatattgaaagtattaatttttgtcaccatatatatacatggtctctagaggggtcaaatacttttacagaacttaaagtggaaactattttgttttacgggttagaatt

SEQ ID NO: 55368 - DNA, 866 bp, Arabidopsis thaliana landsberg
  unsure (1)..(866): unsure at all n locations
gtggaaatgtgactctatttgaataaatagacttaaagattgcaactttcagttttttacattacaaaaaataaagatcattttgtttccatactttgctccaggcatttagaagacttgatttcccgacattgggacgtccaacaatagctatctgcaacatttcaataaggaagacatattaaaacgtatgcccttcttttaaacatgaacgagaagaatgaatactattcttaaattttacctgcaatccgctttgaagaagcttgtcatagtttgctgtatctaatgcactttctacgttttgagacatgctggttattttgttaataactgactctatatccaatggtggcatctcgtcctcaaagtctaaacgagcttcaatttcagtgaggagctcaatgcattgtgctcttaaggatttgaccaaagatgaaaaacctccctaaacaaaaggtagagaaagactagaagttataacaatgatctcagacaagccacatcaagctattattagacacgatttatcataaagaattgcaaaatgaatacctgaatcccttccaaagcagcatctgcggcagcagaagacttggccgaaataagtttttcgacattttcagcttgcgaaaggtctaaacgcccatttagaaaggcacgaagtgtgaactctcctgaatgcaccacaaatccagccaaaataaagcaaaaaaaaatgattcagaatctatagctaaaactcatagataaagtcaaacatcgatcaaagaacctgattttactaatcttatagttaaatctcacagattaattgatacataggcaaagaaacccaataaccanatctacagaaggaatttgag

SEQ ID NO: 55369 - DNA, 1256 bp, Arabidopsis thaliana landsberg
  unsure (1)..(1256): unsure at all n locations
aatggcaatatgtgaatcagatataattgtgtatctgtgaatgactcagatactatattaagagggattcccttaatagtaattatgttccaacatggaaacataaactttttgaattttgaaattattgaattcatcttttcgtaaaatatctttgctttttactgtcttcgtgtcttaataattgaaatcagatgcacccaatattgatcaattttcggaagaaacttgaatcatggattccatcacgaattattatcaattactgttaggtaacaacaaatagttcaaaacagatttttgtttctcataaaatgaattcattgatttggactcaaatgcagagttgtgcattttagatgtcatgcacaatagagaatatttcgacgaagtttcctaatatttgtatattgtagcatttcttcattgttttttttatttattgaaatcatttacaaaatatcgtaaattgtcaacaatgcttcaatgctaacctctcgtgaatctcaaagtcataatagttgttgttaggtatcttttcttgatttgaatacattacattgatagcactatagtttctttaaacttccaactatacctctatattttctaggaaattcacatcacccatatagtttctagctaacactatgttttcaaaacatcatactaaatgtcctataatctttttggtgttccattttgttttctatgtatcgaacactactactaagtatagtactaacccgaaacaagattagctatgaatatttgaatcgttatgtaaatgaaatggcagaggtccagatactttgaggtaaaatctatgcaactagtaccgtaatggtggaaacatttgtaaggtcggattcataaaaaatacgtatatatacattcgtttatgaaggattaatctaatatccgaaacttaaataagcagttaaaatagtagccagaggaaccgaaacgttgtcgtctaattgatcggtgatgggtagcgactcgaccaccgtggctaccattgagactattgctactctctgcaaggtcgtttcccagttaatgtgaaggtacccaaggcttgagtagtagtaaagtaatctgcaaattacgaaagaaaacggttaggtttagtagcaaactcatctcagttcttaagacttgttcatcggcaagaaagagacatnttgatgattaatagtgcgattgattattattacgcgatggagatgaagaagccgaatatgaacatggag

SEQ ID NO: 55370 - DNA, 392 bp, Arabidopsis thaliana landsberg
  unsure (1)..(392): unsure at all n locations
gcaacccccacaaaaacacaagcacaaggtcaaaagatactgacgacacggacccacccggggcccgagaaaaaactaagcccgagcgcccgcccgacccaccacaacgccagacaaaagcgccaaccaaacaccagaggaggaaccacaaaaaagaagcaaggaagaacccacaacaaagaagnggngcgacaaccagagcaaggaccgaaaaacagacacggagccacagaggacaggcagcaacacgaacaccaagcaccaggcccngccggaacccaagacaagaaagaacaaggaggacccaacggagcaagaacgcggaggcaggaaaggcaccgaccacacccaagacgaaggccgcgggcgaccaacaccaaaggagaaaacac

SEQ ID NO: 55371 - DNA, 1038 bp, Arabidopsis thaliana landsberg
  unsure (1)..(1038): unsure at all n locations
ctttcatttcttgctttgtttctttcaagtcccatttgagattttgtttttgttgaattgggtttcaggttcctcatgtcaaccgtactgattatcagctgattgacatttctgaagatggatatgtatgtgttcttaaatagcacttgttcctttatatggtttagttacttgttctgttttgtaatcattttacaggtcagtttgttgactgataacggtagtaccaaggatgaccttaagctccctaatgatgacactctgctccaacaggttaagttttgcatgttcatcacattaaatgttgctagttaattaaaatcaactctatgtcgatttctgaaaatggaagaaaaagtgcagagtaatgagtgacctgattgtgttaatgaaacagatcaagagtgggtttgatgatggaaaagatctagtggtgagtgtgatgtcagctatgggagaggaacagatcaatgctcttaaggacatcggtcccaagtgagactaacaaagcctcccctttgttatgagattcttcttcttctgtaggcttccattactcatcggagattatcttgtttttgggttactcctattttggatatttaaacttttgttaataatgccatcttcttcaaccttttccttctagatggtttttatacttcttctaattgattgattctttatggttgtccaagtgtcaaagtgttccacccatnnnnnnnnnnnnnnnnnnnnnnnnnnnnnnnnnnnnnngcgttatgtagagacgtagaagcaataccacaaaagagtataactatagatatatgctaacaaaactcaaaagttaagatcagtttagtattcaaaattgaacagtaaaaggttaaaaaaaatatgtatacttatgaaaataactaaattcatagataatcttttaaaattcagagtttctttttcttatatcaaattcaaaatgaaaacacaaactgaaataaacaacgacacatatcataaggtcttttatattttgtattagatcaaaactattattgc

SEQ ID NO: 55372 - DNA, 787 bp, Arabidopsis thaliana landsberg
ttttttctcaattcttctgaaaaaagcgggtccaataatttccttcggaaaattcgaaaccgaagaaataatacaaggtgtgggtcaaacggtcaaagataagagacgaaggttgaaacaagtgggccgtagggtgaggcccaaacggtcacgagcattagccttaccatcaccgacaccgtccacaaacggagcatctgacgtcgaccagaaccgacacgtgcaacacacgcgcattcgtacggaacggctcgtctctcaacttgaccttcaagctcaccgtttagacaaaatgcaaaaataatcttattttataaatattccatttaatggttttacctctttttcagcaccgaaccgtaaatatagtaattaataatcgtttctgaatgcctccatattttaacagtgtttataacttcttaaagtttttactatgcaagttgtcttatgacacagagctaatatacataattaattcattaccttatttatttaatttactagacttgttaaagtattcttcagaactgttcatagagtataggtcgcatatagtatatttacaaaaatatataattactcacaagttgccaaaagattcagatacgtttcatataataggacccaattttttacaaaatttgttcaaattgagttaaatcatcaaaaccaaattttcttctgttatagatcaaatttataaaaatagctatttgctatattatatatatatatatatatatatgagcgtctgtctatatacataaatgtgcgctgtttcagt

SEQ ID NO: 55373 - DNA, 1337 bp, Arabidopsis thaliana landsberg
gaacgagatggaagtgatgcaacgacagtttgagaagacggggaaagtgaagaacacgctatctttttcggcttggaccagcggttggaagaagctaagtaaactgactaagatgagtggacaggagagccatgacatatcctctggaggagaacaagctggtgttgatcatccaccccccaggaaaccaagacgatggaggaactcaatttcatgaagtgatagtgatggttttgtatcttcttgattttgattctttgaaaagaaaaagcttttgtttgttcctaatttgtaatgtttattggtttctaatatggaataagtgacataaacgattcgatttttatcacaaaccaaaaaacgccatttgtttattacaaaaccatttaacaatacaacaatagagacacaacaataccagtagcatgtgggttgaagcaaaagacaaaggaatagtttgcattattacagacactcaaattaattacatgaacatgacatcaatatttcataaaaatcatggacccatctagtcatcatatggacaaaagagtgtgtgtgggtcagagatattttattaccttaggggagattcatagatcacgcgagcttgagatgagactttgaatatttgccttttgatttcaccatccacactcagccaaaaaagataatcattgtccatcaatgaccatgacgactttggcttttcattccacacagagagaagaagaaagtgacctcttttcttctttaactttttgaaatttgcagtagcatatataatacttaaaagtagtccactatatacagctaaaaagctggtgcagaggatacgtacccaaaaacccacttcacacgttttaactcgtcagaatctttcacgccttatctgtctgcagatttcttgttccccatgttgtctctttaagcaacaagattggtgacttgtgagtggtggagctttggttcttaacctctgtggagattaagtctcgtttcagcaactttaggtaatcaattgcttcgtccagaagtaagagcgcttcgtttccttttgcaccagggactacgctctcgagtattttcagagctgtgcggatcttgtctttcttcgactgctcgttgctcagaccagaaccagtgtcctctttggtcgatatggtttttgattcagggagctttttggccttaagaaaggaagatccattgagttgtgtggagctctcagtgcccacaagtgatgataagtcgctgatgttgttgaccttttccagtagtttctgccttttacaaggaccatcgatttcttctaattcccttttggtgcaaactcc

SEQ ID NO: 55374 - DNA, 664 bp, Arabidopsis thaliana landsberg
  unsure (1)..(664): unsure at all n locations
taattttgaactttttgttttgttttgttttgttttgataaacgagatgtgtagtacggactagggagagtgtggtcccgccgcatggaccgctcgttttgggatatggactctacgccacgtgacggatggcatgatcggtgcgtggcggtgcacggtgtgctcgtgcgacacacgaatcggtccgcacgtcgagacgtcgccgtcgacgactattcgcctcactcacgcgcgccaggggatcgcgatcacatgagctggcagcaacggcgacgactccgttcctattcctttccacccacccatgcatgcggtccagcagtccagtgtccacagcccaaaaccgcgtgggacacagtagcgtccacctgcgatcgtacgtttgcaggtccagtgcatgggctccacactagcaacttgcagagcgcgacctcatcggttagcagccaaaaacattggcggtacgatacaaatagaaccacattatnnnnnnnnnnnnnnnnnnnnnnnnnnnngatggggacatgggtttggatcaactacgggttgatttggtgataaggggatacggggggattggagggaacgagggggaaatgactaatttctgtcaatccctcaatcctcgtgatcctgtcacgaatagcctattgtattgtgtggg

SEQ ID NO: 55375 - DNA, 332 bp, Arabidopsis thaliana landsberg
  unsure (1)..(332): unsure at all n locations
caaaggaccacagagccccgagaacacaagagagaaaaaccaacacaaaccccgttagacgattatcaagcgcaacaaccaggacaggacacgaggacaaagcaacgcgccacacacagaaacacaaagagacagacgagaaacgacacggcggacggcaaggacaccaaagggacanngaaggaaagggagggggacacggcgggaagacaacgaaagagagccgcacagaggggccccagaaaaacaggcaagggacggagccacaacgaaaaaggaccgggggccacgaaggaaacagcgaggccacaggggacaagggccgagaacgg

SEQ ID NO: 55376 - DNA, 459 bp, Arabidopsis thaliana landsberg
cgaacaattgcgactggatttttgccggaaccagacactcaacgcagctgaccgacaatttggcgagaacgacggagcagcctgcctctgccgaatcagacctcgccggcgggcccgtcggagagttgacgcctacttacgtgcctgggacagtagacactgcggccactttaagcttcccggcccggccttgtgctgatggtttcctcacaaggtcgagcagaaacggcccaatacctttttaactcgactggcgaaatgcaaaatgctgagcgagcccgttccgctgacaccgccagcaatcgcttcgcgtacacagtttttttttccagcagcctgcgccgggcagcttttctagcgtccgcacaggttttctgcgcggaattttctgagcactagatcacatcaccagggcgtccgtgcaacgatcaggattatgtcgcgtaaagcagagaggtg

SEQ ID NO: 55377 - DNA, 475 bp, Arabidopsis thaliana landsberg
  unsure (1)..(475): unsure at all n locations
ccccccccccccccccccccccccccccctccccccccccccccccccccccccccccctcccctccccccccccccctcctccccccctcccccccttcccgggtgncccccccccccgcccccacaaaaaaaacccacaccccccccccccctcccccccccccccctcctccccccccctcccctccccccccccccccccccccccctcccccccccccccccccccccccccccctccccacccccaccacccccccacaaccccccccccccccctccccccctatctatccccaccccccccccccccccccatcccccacctacccccctccacccacccccatcccccttccccccccccccccccccccccccccccccttccacaacccccccccccccccccccctccccccacctacaccccctcccacacccaccccccccccccccctttcccccccccc

SEQ ID NO: 55378 - DNA, 1120 bp, Arabidopsis thaliana landsberg
cggaatggggataatatggtctatcttctaaagacaaagccacataataacaacgaagacatactaaaacatgcagactctcctcttactcatgatacgacgtcgtcatctcaggtcgacgatgacttttccttgaagcacaagacagaggtcgtaaatcttttttcttaggtttcattgtctaactttcctcaccttgttaaatatgatactaatagttatattttattgatgttggaatctcttattcagaagaacttgatagaggaagatgagggtaaagcgaagaaaaactgtttcatgttgtacgcgagagatctctcaattacatgggcagagtctcacacaaataaatattggagttggttctctgatcttgaccaaacatcaaggttatgagttttattgtaagaaagttacttttgtgtttttttgtttttttaagatttcactaaattctgcatatttgtatacactatacagtgatgtaagaactgaggttgcaaagatggaacgagtagcttggttagaagttgtcggaaaattcgagacggagaaactaactcccaacagtttgtacgaggttgtgtttgtggtcaagctaatcgattctgctaaaggatgggattttcgggttaacttcaaattggttttgccaaccggagaaaccaaagagcggcgagagaatgtgaacctgttagaaaggaacaagtgggtggagattccggccggtgagttcatgatatcaccagaacatctctctggcaagattacgttttcgatgttggaggttaaaagtgaccagtggaagtctggtcttattgtgaaaggtgttgctattagacccaagaattagaaaatccaaacttgtaagcttaaacaataataagaacacgaaatttattatgatgatgatttatgtacacgaggcatgagatttatttgctatatacagacacaaagacacacttgacgacacattacaaagggaagatgcgcttttatgcattaacagagacactttacaggattgagctctacatgctggctaccatcgctttgcggttggacggttaaggttgcaccagcttcactttgcgggtctttgatcctcttaccc

SEQ ID NO: 55379 - DNA, 934 bp, Arabidopsis thaliana landsberg
ccaaagccggggtgggcggtgtcaggactcctctaccttgttaacttctttttttccaatttctcaatcatctggatccggtgctggtccacctaaaccgacctttcactcgagtagcttctctagtggctcaatggcgaaggaaagtgaacgcaagagctccatggtgaacctctctctgcttcagcctctgcttagatcccctccaatgaagttgctaccatcaaaacaatcacaatcctcccgatctaaaattttgcagatctctgcaaataccattagcctcacccctgatctgaaacgtgtgagtctcgtgtctacgccgacctctctcacaccagcgtcaatgagcctgaatccaatcttccatccgccgctttagaaccaccgtaccatatccatcctatgtccaacgtttgttcagctagagtttccgttattgggcttttccttcagcccattaacaaaagctctaccctgtctcccaactcttctatctatttggtccaagtctgttccttaatcccttttacgaaatccaattttgctgcatcgtttctatgttttgtgtggccgtggactccaccagagacgtgaaacgatggcgaagtgttgggtttgtgtatgtcatttcaaaacctggtcaccaatctcatttatggctattcttcatttgtacttgacgatatctatatggcgatgtaactctcttcatggagctttactggttttgtatcttaagccgccaatcgtctctaagtaccctaccattcccatttcatcatttgctcggatcatgcccccacaaagagctattgcatttcccatgtgtgatcccgacctatctagaaagcctctgttcaaaatcgcaatcattggtgttaatcaccaccacaaatggctaagagggaaggagactggcaaaaagatcctg

SEQ ID NO: 55380 - DNA, 358 bp, Arabidopsis thaliana landsberg
  unsure (1)..(358): unsure at all n locations
ccaaaagaccaaacaacccaccaagaaaaacaggtgagcccgacaagtggggcattgaagaagaaaggggacaaacagacgaaaaggacccggaaacaccagaaaacgccacacccccgagacagggggcaacaaaggccgaacaccanacaggaaacagaacacagcaagaacaacgaagacccccaaaagaagaagcagcnaagacacaactaacaaccaaacgngggaacnggaaaaagaaccaannaaccannaaagggaannggcaacaaaaaaaaaagcaccacagacaaganaaaagccangaaacaccgcaaggagaccgaacaccaccgggagagccacaccacacaaa

SEQ ID NO: 55381 - DNA, 756 bp, Arabidopsis thaliana landsberg
gcaggtcgactctagaggatcccctggtccaaaacctatctcgagaacaatatgggtttgtgatctgggttgttggaaacaattctatccctgaagaaatccgcagtctcacaacctttttgtcatgggagaatcttgggacatgtttacttcttgatccaaacgcgcacgtaggatctctatgttgcagccaccgccgagtcctcctcgtcgaagagtttctcaacctattcctaggcgtgccgatctcctagtcccgataattaatcaatccttaaattttgtcaatatttctattttagttctaaagtttctccagtttataaatctgatactttctctaatttattaggttttctgggatcttacttgtcctattgatcaccttcgtccacaacatatgctacggttccatcgacaccgctctcaaagccttgggctatcttggatttcgatctcttcgtccaatccaatgcacttaatggaggagtcatcgatatgcttcgaagatccggtgttgaggttcatatctcacaaccgcctacgaagaccaaaaagagatccaatgcaaaccgcaaaggttttcccgatattgaattggggaaggctatgcattcaaaggcattggagcgtaatccaagcccaatgctcctaatttcctcagattctcgtcttcacaccgacgtcttacatatcacgagtcttgcatttgagataatcttgtttcacaccaaaaaggcttccaaagatcttaag

SEQ ID NO: 55382 - DNA, 625 bp, Arabidopsis thaliana landsberg
ccccattttaaaaaatattggaacacttaccaaaacctccagcaggcgggaaccggtgagcagcatcaccagcaagtataactctgttctcatagcacatgaatttctcggcgacttcagcatgcatgacccatggcttaatatcagctacatccaagtctgaaagctcatgtcccaccaaattgaatatcagcctcttgcacatctacaaaacaatcatcggtcaggcagacctgacaaacaaactcgcatttgaagttggtcacagctgggacagagataaaaccacagaggtgaatgagtcttcacaagtgaaaatccattcttctctcggtaatgatagtaaatacctcaggactgaaatcagatagactctgttgaggtggatagtatggaatctgcaattaaaagaaatgaatatctgctaagttacggtatataacactacttttaagtacaaaaacttggattaaagtatccttgaatttttgggtcggggctatagctacctgcaaaacaaattctccttgtagaagatcatgggcaacaagaactcctataccattcggtgtaaaaataaaaaataacatccctggtctgttactgatcaggtactcaccgagct

SEQ ID NO: 55383 - DNA, 279 bp, Arabidopsis thaliana landsberg
cgctctgttttccagaaacgcaaacgctccttctctccctcaatttcattccttcgttcgagaaacagagcaatttcacttccgctcacgaactcttcggaatcgtgagctcaatcgtcggtgaagaatgaaactctgacatcgaagaaatcaggtgagtcgctgtaagttggaggggagaggaagaacattgtaattggagagttgatgtatgttttgggcccttgagaatttttgagagtttgggcctttttattcaaagctgtagcccaagttccc

SEQ ID NO: 55384 - DNA, 1041 bp, Arabidopsis thaliana landsberg
  unsure (1)..(1041): unsure at all n locations
gcaatgttcatggctacattcactctttcttcaagacttaacccaacactcccatcagagtttagcttcttacctttgatccattcttctaagctcccgttactcaaaaactcatacaccaaagctagaaactcagtgtttttgaagtctatgcttgagcaagaagttattagcttcacaagatttctgtgcctgacatttctcaaagcctcacactctgcgataaagcctttatagtatccttgtgccttgagatcgatgacttttaccgcgacatcaactcctcctattatccctttgaatactgacccaaagcttccaatgccgagaagatttccagggttgaaattctcagtaaccctcctgagctcatcatatgagacattcatgaatggttccttgacgagtgaacttgatgatgctgatgttatagactttcttccttttcttttcagaatcaagaatgttatcacgcatatcacaattacgcctaccacacatgtactaatgctcactttcaaaagctttccctgcatccgagtttttcgacaagatgcatggatgcatagctttggatttccctccatgtaaactttcgaactattcttgaaaatcccaccatttgggatccgtccttcaagattgttgaatgaaagattcaagaacttcaaagcttgtaaatcttgaaatttcaaaggaataaaaccagaaaatcggtttgacgagagatctagaaactctagacctttcacttctgctagttcatcgggaattggtccaaagagatgattcctagccatgtttagcttctctaagctctggcaatctttgatggatgagggaatgttgccaaaaaacttgttatcagagagatctagactcacaaggctttcgagacgacttacatcttgagggattggaccagaaaataggttgttcgtagattcaagncagcactcaagctaggtaagttaaaaactccataaggtattcttccaattagcctattgtggacaggtccatggataacgcattcttcag

SEQ ID NO: 55385 - DNA, 101 bp, Arabidopsis thaliana landsberg
  unsure (1)..(101): unsure at all n locations
aaaccaaaaaacaaanaaaaaaaaaacccaaaaagcgcccagcacggaaccnccgcaagaagcgacgggnccaacacaaaaaaaaaaaagaaaaaaagagg

SEQ ID NO: 55386 - DNA, 1285 bp, Arabidopsis thaliana landsberg
  unsure (1)..(1285): unsure at all n locations
taatcaaatttctttaaggttatcgctacttcagactatcaactcaatcaatcacagttcatgggggcgtgtattcttaattaaatctaacccttttatgaaagacagctaaaagagaaaataatcgcttaccggaactttttgagcttgcgaagaaattcaagtgagcaggcgactgaatcctgataaaccctaattcgaagttaaaggtaggcgtttttttattttttgttttttgtattgtttcacacagattatataatcgtttaagggcttattgtagtaaaataggcccattaaggtttagggtttttaaaaggcccagaaaaagaaaaagagaccaagaaacctagaattgtgaccatcgacgtcgacttttgttctgccggagagcacgaccgccttatgtattacaagtggtgtttcttttcatttttatttttggcttcaatttttgcgttttctctgcaactcgccgtcaagggtagaagaattaggggttcctgttcttaactgcttgaagatgacgtcttatggagatagactgaagtcgacctccattaatggagttaagttatacaatgtttcttctgctcccaatgttcctacttggcttaatcctaagaagcaacgagctctccgcaaaaaccctcgtaagtttcacctattgtttctgtctcagctctgaatcgttaaccccttcataaacactgtctcttaaaggctcgtcctttttttctgtcttcgatgtaagattatatgcaaagagtggagctgattcaggttttgatttttgagactgccactactagaatcaaagcgactgcagacggagagtatctgattgcttcaggtgcgttttctttctttgtaacttcgatgctattgacaagaaataatgttctcttgtgacttttcactgatttcgtttttgttgaattaggcatatatccaccacaggtaaaagtttatgagctaaatcagcttgcattgaagtttgagaggcatttggactcggaaatagttgatttcgaggtaccttttattgctccatgagatgtgtcttaacaccattgatagtaactatcttgtttctggttttttagtatgtgttttgttggctctacagatattggatgatgacttctcaaagcttgccttcttatgtgctgatcgttctattaatttacacgccaaatacgggaaacaccacactttacgaattccaaggtactttagctttgttggtctatgagatatatctttcgnggtctaaagcatcaca

SEQ ID NO: 55387 - DNA, 1261 bp, Arabidopsis thaliana landsberg
  unsure (1)..(1261): unsure at all n locations
tgaacacagaaacatacacgccgcaaacaaaagctaaattcactgccactctttcggaaatgatttccacaaagcatacagaacatgaagaataggatacaaagcacgacgatgtgaaagcagaccagagaaactttcagaggacgataataaccagagaaatgatctaactgggtgtgactagtacaaaaccaaggtgtaacttacagaatatactccaagatgccatccacctttggcttatatttttttcctttggctttccgacgtctagcttcaacatggaaacttgtaggacaatctttattcgagcattcacctcttacaaaatcatccaccctagtatatgggatgagggctaacctatctatattgtcccggttaccttcaacctttgaccagacaagatcggtagaagaaaattctggcaaggtaggattttgcacaggtaaggagaaaatctgatcccatctagccatctgcattcattatgtagtcaaaacgaccattagattacacaaattaagaaatgtcatgagttgaaacattatgtcagaatcctgggaactgtatactacaacgagacatgcccaaacagagattttcaatgcaacggagtttgatacatctgttcacaattgtagcataaaattcccaaagcacacatatttcacatcaattccaacaacaatcaacaaacttttcacagtaattggcataacaaaactcaagaatcgcatcaatttctccatttttttcaaccaacttcattttttcaacaaatgaatcagtggataataagaacactccaccaatcagatgaattatatgatcaaagaataataacgacagagctaacatgaccaatccacgaactcaggagatatcacatagccaaagtgcaaacaattaaaactcaaaatctatctaagctcaaacaccaaaaatttcacaaacaacattcacagtagaaagctagaaatagctcaagtgctctaaaaaagttcaaaaattagagagactcagcctcagggattttaccgagtcttctgtacaaagaacttaaatctgaagtacatggatcataagctagcttcctctcgcacactcagatgaagaagcactaagacaaattatactaaaagaatgttcaattataaaacaagacaaacaatcagaagataagtcnancattatacncaagaaaagataagaagaactctaaatataatgacttcgagacaaactttacgcaatcaga

SEQ ID NO: 55388 - DNA, 930 bp, Arabidopsis thaliana landsberg
aacaagtggagattattgcatctgtgtgtgtgaactctctgagaaacaaattaaaaaattacaatgggtctcattgtctcaaaggtagatttcgaataagcatgtatggtctacactacacattcacttgcatgagtccaaaaagccataactttagtcttcttctgaaatagttgcttcctaataatttaaaaaatattggatgcattggctgcatgtgacttcaaaatatttgtatgtatattttgaaaagagatatagaacaaaacttggacaaaactacaatactagtacgaaaaataaagacactgcacatctaaacacaaacaatcatattgcgtttatatgttcaccgttgttagttaatgtttttagtaagaaaactaaaagtaagtaaaattaggtatatcctaaaatatttattttagaaaaatatataatgtgaacggtctaaacatttgtgagttttaatataattatgacgattgaaagtatcaaataaaaagtatttgaggcaaataattcttctggtatctaaccacacctacacattacaagtaatagggagcagcatcttatgtcatgtcttcgaaagctatgaacactaaaaaatgtttagttgctgcaaaaatttcaccaaaaagggaagaagagttcaaagtatacctacaatcccttaacgaacaaactaaacaaacatttttgcaggcaatgagacactatcaatacaataagaggctcccaaaacgtgtttgcagataaacacaagtaaaagatccgaaggagccaacaacatgatgatgaataataatcgtatccaacattatgggaataattaaacaacataagtattgagtgaagactcgcaagtcaaatccttaagaaacatcagtaagagaatccgacaggttttattaatatatgaacaat

SEQ ID NO: 55389 - DNA, 807 bp, Arabidopsis thaliana landsberg
aattaacagatatcactttcctacgggcgtagcctacgaaaatgttcgcccacgtcatccttctaagattcgagaccgtccgatctggtttcactctttgtttcctttcttcggtgatgatcctagggtttctcctcagaagaataaaatctcgcttctattgattttgattctcgctattgctagcttgatctcagtttatgggattattaatcacttggtaagtctcttccttcgatctaggaattgagatcttcaaggctctatgttctaactgttgaatcgatttgggaaagtatttagttttgttttgagtaaagggttttgtttatttaggtggatatggattgacattgttctcagactaagattgcttctatgtctatcttctgcagaatgctccttatttatgtaaaaaagatgggattgtgctaaactgtcctcatgtaagtgtttgaaaactttggttatgtgtttttttgaatgcataagctttgaatcctgtaaatttaattgcgtgttggtttgcatttgtaaggcaaaagagtcaccttctccttgggagaatcctttatctgcaacaacttcttggaagccttgtgctgagcggcggattggtggaatctcaggtattgaagggcatcgtcattttcgttgtcatgtgttattgatctgtcttttcgtgaaagttcaagtctttttccttggttagcttattagattgtgtcaactgtttttttttcagatcttcctcctgagaatgaaacaaatggctatgtattcattcatgctgaaggtggtttgaat

SEQ ID NO: 55390 - DNA, 947 bp, Arabidopsis thaliana landsberg
ttaattccaaaacataagaaagtagttcttctatttctggatgttaagttttaatattttaaattagtaaccaatatatacactcccatctcatccaccgttttaaactagtgaaactctaaggatgcaaatggttttttcaagatgaataaatggaaaatacattaagtttgaaaaaattgagttgactattattcaatccgttcttgtgtaaaaacatagaataacttgttcaatttttagtttttttttaatgttgaatggattgaatcattttttcaacttttttttatctcaaatagtaaaaagtgagatgaatgttcattccattttatcaacttttttatttagatcaactatttgcaccctaagactgtgaaaaccagagaaattgaattaaaaaaataattgaattaaaaaattaaatgaaaacaaagattaattgaattaaaaaatttccacttagaaaaaataaaatgcaggttttaccgatcattctaccattggcacttgaccgtctctttacttttcgcctcacacatatttgactttcaactggaaaggcgtcccatcctgattctagccagaatctcatgtactcggtaagagctttttctttttgtcccgattaacaatctgattaagctttgctataaaagatttggatttaagagatagagatttgagagatttttgctccgtgatgtcagtccttttggaagggtattaggaaattgctttatagaaatgaatgctcgatgatttacgtttggtgaatgaagaaacaatttttgctttagcaactatttatggttttgaacaatctgtttgtttttgagtactccatttacgtgaaatgaatgatcggactaatcgtatttttctctttgtgatcttaaacagaactagaatacaaatcttggcaatgggatattatattgactttc

SEQ ID NO: 55391 - DNA, 493 bp, Arabidopsis thaliana landsberg
aggatgcataaatttcaccatcttcacaagctttgattactctcttttttcggttgcttctctcaactccatgaacatagtctcgtttcttccctctccctgatttgctcataagataaatgtactgatgtctgatccccatcaatggatgcttctccagcaagaaaactttgtggtaagcttcccttagaacaacagtctgggtccgaatcttgtgcgacatgtaaaatatacccgggtggtgcaccaaagccttcttgaacctcatcccgaaccctaaatactcccctaagcaaatcacattgtctgtctcagtcttcttagatactaaaaggaacaaaagctcatgaagtactgcgacacgccacttctcagcctgatcactgtacgaccccaagtgaaaagcattttcataaggcgaaatgtatgggagattttgccattgctccacccaattcttcaccgttttatgcaattcgtaccttttggggaa

SEQ ID NO: 55392 - DNA, 360 bp, Arabidopsis thaliana landsberg
  unsure (1)..(360): unsure at all n locations
aaacaggacgccggaagccgcccccgggcgccaccataccccaatacgaaccaccgcgaccccacggcgaaaaaggcaaagcaaacaccncaaagcccgcgaaccaaaacgaggagggagccaaagccgccccccacaacggcgagcgggcacccaccaggccccgcgaggaacacaccacaaggcaacgggacacggaagacgaagccccacacaaagccgccgacaccgccaaagccggagcccggagaggagcgcgccgnaccggccccaagacccaaagaagcaaaagcacaaaacgccgcccgcgcaacgaaaaaacccaccaaaaaggaaaaccaaacaccaggggagcagacc

SEQ ID NO: 55393 - DNA, 421 bp, Arabidopsis thaliana landsberg
gtctgtttgatccgctgtaaacctggtcttactatgcttactatgcacgttatcacgcgtgggtcgaagctttgtactccgttgattgccgggcatgtgtatgtattgagtgaccctaatcactatgcaccctggaggtgcgcggcttggacatgttggcctttccacttaccagtctacctattgacctttgttagcgcggcaggtaaccaaaacggttccagtggaccggaatcttacccagagctcacattgaacctacaaggacccgctccagtatcggcgaaaatcctgtactgagcatctgctgtgttagaataaaaacaaccgtgtccaactgtggattgacatattgggaaagcttgaagacagggtgcaattttactgaccaagaggctgatgagaactgaccgaacctgct

SEQ ID NO: 55394 - DNA, 233 bp, Arabidopsis thaliana landsberg
tatatgtctgtgggtgttcaacactcgcgctgacgtgaaccagtctttagagggtaagaacattcacaatctctctaaaccagctcgtcaaaacttccgtctggaggacgcctaatactaccaactccgctaaggcatataaggtagcagtaatcatttccgaaacggctacacaccgattttcttgtgtaggcacctaaggtaccgatcattactgggtactgtaaaaacca

SEQ ID NO: 55395 - DNA, 1140 bp, Arabidopsis thaliana landsberg
  unsure (1)..(1140): unsure at all n locations
gaactattttgcgcttttaaaaaagcaagagcttgatatcccagcattgaagtccaaattgttgcgatgagttcaaagataatcctgcagaggacagtgaaattgatacaaagtttaagaagatgcaagcatctcttgaaaaagctaagagattgaacatgctgtacaagagtgatatcgcttctaaggcatgtggagatgaagaaatggatgaagtttgcaagcaagctgaagctgcaactgctgaggtgattgtctgtttgcagaatgagcttgaagttcttcagaaggaggtcaatgatttccagtcaaaagaaaacgtgactgaaaagcaggtagagattttagaaactcagatggaggagctgcaggataaattacgagacacgaccatggataatgagcagttgcaagagcagctcagaggcaaagacatggaattactgatcatatcaaatgaaatggaacttctcacatctgagcttgaagaaattctgctgaatgggaatgaaggccttacagatgcgtgttaccaggctgatcttatttcgggttccttaccagataaaaggatatggatatctgaacaggttggaggattaataagaacgctttctgagagggaattaatgattgaagatcttgaaagctgtttggaggatgccaataaaaagcgatgtgatatagaatccatgttgaagtctcttaaaggggcagcaatagtaatgaatgaagcgcaccagagagagttcgaggaaaaggagacagatgttctcctcctgaaatcgcagttgtgcacaaaaacagagacaatattaaggcttcaagagaagctgaagatggctgaaaggttgatttatgaagcatcagattgtgcaacagcttctctaataattgtcaaccgatattctgaggtaaccgaatcccatacttttgagttgaagcaaaaggattttcaggttgcggaatctactggaacaattctttctctgaagcaacaagtacaagatttggaagctacctgtaaggaatttagaagcaaacttctagaagaagaaaagaatgcttctgctaaggatcangagaatgaagaaattgaggagactagcatttcagcgatgaaagagaagctttctaaat

SEQ ID NO: 55396 - DNA, 780 bp, Arabidopsis thaliana landsberg
aactccctgtttacagctccaacagtccaatacgaaagagagcaagattagttaccttctcgttaatcatattaatcatagacataacatgctcgaacgtagcagtctcaggatcaaaattcggccatagatagttctccaaatactgactcacttccagaatcataactcgctgaagtggaacaggtttacgaccactagttaccttaagctccgtcacataaatctccttcacaacctccggatcgaacggtttctcagggagcttacctccagtcttaatccagctctcctcagcgattttcgttaacctatcttgctgaatctccgataaagtgatggagctcggcaaattagatccaggctttgactctagaggcttctcagcaggatggctaggtaactccaatggatactccgccactctgtggcgcttgaagtcgtacgtgccagttccatagaccttcgtcattctctcacgcgaaagcttcttgctcagagagaagtgagaatcaacacatacagccatcgaagaggttcagagaagggatttagagtgagaagagtaagatttttagggcttaagcggaggtgagagtttcatcgacgacgtcaaagataaaaggcggttacgtccgacccgacccgacccgagtgatgctagtttaattatagctggacttgggccgatattgggctaaaagtattttagtctggactggaactagagataatcttaagagtaacattaatatacataaataatggtgagcgaaagcc

SEQ ID NO: 55397 - DNA, 1257 bp, Arabidopsis thaliana landsberg
ctattgttggttttacctgataaattggcagttgcgttgttgtttcccatatcatctcctttgttcaattttcaacagatcaaaatcttttgaacaaatctgaaaacccgaaacagagaacaataagaggtttctgtctgaacggagagttccgggtactgtttgtgtcttgcttgataaagtatcaaacatgtttggtaattttattgatttttgttataaatttgattcaatgattattagttggcgtcactttgttgggaccctacacaacattatgagaccatatgatttgtaaatttttcatataaaaccgtaggacacttctatttctaagttggaatgtataaaattggaccataacaaactaaggtccaaccactaaatttaagtttttttgccacaagtttagtgtttgaagaactccaccaaatctctagataatattgtgaaagaaaaaacttgatattttcgtttgttttatttttgttgtgaaatgtgaatcataattccatttttgttatactttttttcggtgcaaacatcaattccattttaaacccacaattattggcatttgtcatagtcacaacaaattgaactcgataaatttcccaagtaatactttgtctttgttaatgaagaagaggtagattctaaagttatatatatttacgagttctatggcccaacaattatttcaaccattcttggccattggaaaacataattttagtttatgattcaatgtttggtaagcagtggacactaatagagtcgtaagaaattagaagggactattggtggtgggtcattatgttcatcccttttttgtgaggaaatgattcgtaaaacatttataatccaaatattcataagaaaactcttatgagacaatggacctcatctttaatcatttttcttctctaacttttatcttagatataattaaaatgatttgagctacggtatagcccataatcagctatcaacttttgaaaacattttctcttcttttacgtttaacaaaaacataagaggtctttttttgctggaattcctcaaaccaatcctttttgtaatattagataccttagaaaataaatttgaagtagtaggataaatgtatagacagcattttaacttagttaatatgcaattattggttagcaattagagtgagttcggctgtttcatcatgtaatgattacaacaaattggttcttctttaatatatagacttacatactttttaaa

SEQ ID NO: 55398 - DNA, 3363 bp, Arabidopsis thaliana landsberg
cttttgtatcgataatagatcaccgtcagtggattgccgaatggaagcagtgtaagagctgagtttcacctgaagaactgcactcgcgcatggattcttcattggggttgtatttaccaaggaaataagtgagtaatggatgatctattagatatcatttatacttcaaaaacatctgtttgttttgacttatgttttctacagccattggtatatcccatctgaacattcctcgaagcaaggtgcattgcagactacctttgtgaaggtctacataactctttcatttcttgtttatctacaaggtttttctagaagtccatattttttctgcaaagtgtttcttcccaactgcagagtggggatgcatatgtagtaatccttgagttgcgggatccaagggtacgcgcaattgaatttgttttgaaagatggtagccataacagatggtgcgtatttccttcttttctataacagagtcatgcttgtgacttgtgagggatgaacgggaatgcacctttgtgcctaatggaaattttaagttgagacagcataatggaaacttccgtgttgagattccctggaatgatctgcatgctcatcatgggataccgaagactctgatagaaagaagagcacataagatatgggaccggaagggacgaccacaaagctctgcacgtgaacaacaggtaaattgctttagattagctcatctatgtgtttatgatttgtaatggctgtctctcttttcttgcatgtgtcatttcagatagactatgacaatgcagtaagagagctccacgccgagctcgctagaggaatatctttagacgaacttcaggctaactctacagtaccagtggagaaagaagtaaccagtgagccacatcacacaatgatccaatcatatcgccggaagcatgatgttcagaaatggttacagaaatatacggaaccaatcaacagaagtggaagtgtgcaaagttcagcccttgcagaactctccaagagatctgtgggccaagaaaatctagtttcacagaaaagctttcatgtcagaaactacgagatcacggttcgttttattatattttttgttcaacaagattttgtaaatattgttactctccaacaagattttataatacaactacttcgtacagtcattttcattattggtagttttttaacaacttctagataatatctaggtcctccaaagggatgttaagggagattgtcgcttatggattgccacgaacatggcaggtccaacagttctccattggggagtcgcaaagtcatctgcaggagagtggttggtaagatgttcttgcttctgtagatattccttaatagaatcttctcaatcagagaatgatttttataactctaaatagataccaccacctgacgtgttacctgagaaatcaaaatttgttcacggagcatgtcaaacacaatttaccgatatgtcgagcagagaacactcttatcaggtgaagcaatatttttacaaagattaccatattttgttgtaaagtacttttatcctaatttatctgaatttactaacgcatcaaatctttttcacattggaaaagtttattgatataaatttaaaacgaggtggttttgttggtatccaatttgtaatatggtcgggaggctactgggtgaacaataacggagccaacttcgttgtaaacctgaagtcagcagacagtaccagtggtaaggtgagtaaagtcatcacaccatcagtggaatggtaatgttggaatgctctaatcactaggggagttcgcttctaaacatgcttattctcctcagcttgacgtggatgaaaagtatgttctcaaatggttacttgatgaaatatctgagcgagagaaagaggctgagagatcattgatgcacaggtaagtcaaagtatctagatcgttatgaatctgtatatactagttttcctttttaataatgtcagtgaagtttcttataagcatagcttggcaggttcaacattgcaacagagttgaccgagcgttgtaaggatgaaggagaaggtggatgtattggcataatggtgtggatgagattcatggccaccagacatctcacctggaataagaactataacgtgaaacctcggtagagctattgttccattggctacttttgatagttgatcctttttgttctttcttttaatcagaccttttctgcagggaaattagtgaagcactagaaagattcaccaatttgatggagaaaatatatttgcagcaaccaaataagagagaaattgtgagactaactatggcacttgtgggtcgtggaggtcaaggtgatgttgggcagagaatccgtgacgaaatccttgttattcaggtatatagttcaaaatctctgcaactaaaacttttccttgtcttgttagagtagtttgtctttgtactttctttcttttttgttttaacattttcttgtctttattatcttttgttagagaaataaccactgcaaatccggcatgatggaagagtggcaccaaaagttgcacaacaacagtagcgcagatgatgtgataatttgtgaggtaaagatgcttccatttgaagtaagatactcacatttagtgattggtaaataagaggaagaataacatctcagataaagttgaaactccattctaaaactcgctacttcttaaaaagcagctaactagctagttcagaagtttagtttcctgttgtaaatatctgatgagtttatttcttctgccataggctctcttgaactatgtgagatctgacttcaggatcgatgcatactggcaaacactacagaccaatggtctcacaaaagaaaggcttgcaagttatgaccgccccatagtatcagagcctcgtttcagaagtgattctaaagaaggactcatccgtgaccttacaatgtacttgaaaacattaaaggtataccacttgcagcctagtttcgtttcctgatccattgaagaattcttaggagcaaactgtaatggttagttagcttagtaatgatgagaatatttatacctctggcctctattagataataattgctttgcaatttcgacctacattacagaacaatattttgctccattttctactttcagtatcttgaatttctaaacaaactgtttgtacctgcctctgtaggcagttcattcaggtgcagaccttgagtctgctattgatacgttcctttctccatctaaggtaattagttcatgattcaaaccgtcactttgattttcttgggacacatatcatcatcaagaacggtatttatgttaagagtaatacctcatccttt

SEQ ID NO: 55399 - DNA, 748 bp, Arabidopsis thaliana landsberg
ttacaaaagggtcttacttttaactctccatatccaacatgttttacaagttataaatgaaaagactcttttttgtaccaattcacaagacatctcggttttatttacgctatgttttcagttgatcgcggagtttcttggaacctactttttggtattcaccggttgtgcatcggtggttgtaaacatgcaaaacgacaatgtcgtgactcttccagggatcgctatcgtttggggactcaccattatggtcctcatttactctcttggtcacatctctggtgctcatatcaatccggccgttaccattgccttcgcctcttgtggccgtttccctctcaaacaggtccttaacacatacacaattacatatagcctttatataatgatcgatcaagttttgtattttatgtgtgtttttgagtttcatgaacaaaccaattaaagaacattagtgtattttgtttccattgatctagtttagctatcggttgcttgtattgcacacgagactttgggttattcaaatacgtagcgtttttaatgcaacgtttactatagatgagtgaagatacgtaaggataaatctacttttgctagtttccaaattaaattaaaatgttatgtaacttttgtatgtatatagtttttccacacgtccatattttgttatataaacgtcaaaatatcttccaagattgggtcccttccctagttaatgtgaactggtgaatttaaatttaacttt

SEQ ID NO: 55400 - DNA, 979 bp, Arabidopsis thaliana landsberg
aatcaactatacataatataaacatcttattctcatacaaagcatatttcattttcgttttattcataacctatatccaatttgatttgagacgaactactcaattttttaaagagaatcaaacattggtaatagaaacagaagtatctaacaagagctcttcatggcaatagcagctaaaagtaaaaggcattacatatgtgtttgaagatcgttaccatcaaaacatatttgattaaacaacatggctcctactttcgtttgccctttatctccgggtccctatacacaaaagaatagagaatagctcccacaaattcagcaattattcgtatatttgatcaatggagtatcagagaagttgaattcaaacctctggatatgatctagtatcataagtcttggccctggtgggatgttcgcatctttcagcgcgctggattaataaagtcattaactttagttgctaacataaacaaaggctagcagaaactttacatggagttcagataattacctatcagtgagcaatggcaatgtgggatcagttaaaagtcctttcttgaagttcttctcgtatttctccaaacctagcttcactagcattgtccttcctcttgtgaaaaatggatcttcagtactcggtttagagaatctttctcccaactaaggaatcaaaccagaaaaaatgcttatatacagtttccatgagtagagagagttttcaatatgatcactcactttaaaaaacactccttgaaaaacagcaaaaccagcagcagtagtgattgcattcataggttgtccttgcaatccttggctcaccaatgagtatgcaaatccagatcctaacgctgccaccactctgcaaacttaaaaccattactttcattctcaatggtaaccaaatcacagagaatgaaacttacgcagattcaatatcccttttgcctttaaatccgttcataacagaagcaat

SEQ ID NO: 55401 - DNA, 521 bp, Arabidopsis thaliana landsberg
tcaagaggtgaacactatattacaaagtaaccaatgaaaataacaaagagtcgagtccaaaccaaaaccttagtccaaattggtttctacgacccagtggatataacaatttcataaaattcatagccaccggttaaacctggacccaataccgaactcacacacataactgaaactccagttcacctcctatagccggttcccttctctcacactctcagaaatttccaagcaatttctcaccgtttcgttatctacaaatccactataaatacttcactcttcagctttgtattattctcttaacattccattactcttatccttttaccctcatcatcctccactatttacagttttgccactctgactttatgctagcttcttccggtgactggcgataacacgagagagccttcgccttctccaagcttcatactcttccgacgataaagattagaagacatgaagaacggtaaccggaaaacaacgccggaaacagagaagctcaccggagaaag

SEQ ID NO: 55402 - DNA, 659 bp, Arabidopsis thaliana landsberg
tggcttacgaaacaaagaaaatcttataacacgtcctcaagaaatgaagtgtgattaacagtctatagtaaacatatgtacattaagtaaataactggaatatcatttttcttagaagcatgtacattgatttatagatgtttcgtatgaacttcttcttatattttggaactggatttggcagatatcatcattgaatttgctaagagtgatatcagagcaagaaggatgttcaatagaagagttgaatgctggcaaaatatgtgattggttccttaaggacaagctgaagagagagcataacattgaatctgctgttcttcaatgggatgatcccgattttcctttttaaatatccttattttttacattcaagccacacaaaagtatgattatccattgcatatctgaaaataatgtgaatctaattgaagatattagcttcgcttcattaacaaggtgaatatgtatcgtaagtcttaattagtctattgtggtctgactaggaaaatataaaccttttgttaagtcctacaataaaacgtattcaacaattccaaatattatccatgactgaaatacataaagaaaaggtttaaaatttatctagaaaccaggaataaagacaaccgttaacaaacaattataaaagaaaagac

SEQ ID NO: 55403 - DNA, 935 bp, Arabidopsis thaliana landsberg
agtgactcaacattgaggattttcctgtgcaatcaatcaagtggttctctatttcaaatctaatcatacagttttttttttactctggcttagatttgtttatattttggattagacacttcagaagttcagatcatttccagttacttttgacgtaagatgagtatgaattatgcaatcaacaacattgagctaaaaaaagtgctaatattatacataattgtgaacagtacacaacaacattgaccgcatgattcactgcttatctctccgagaagtaacatagcaaaaaaataaaaagacgatattccacgcttctatgaagattatggtacagactgattcattaaagcatcaactgcaaaacaagaaaaacagttccgtaattgaaagtctccacgataaagaaaatggaagactccttctgagattagacaagtctccaggttcttgaggacgtaaaggctcttggtcaacttcactacatcatatctctgacacgtttcgtgacacgagcaaactcgttaaacaacgtataatcaaattcacaggcttcactatttgagatttctttagagagatcaagtggtgttgatgggttctggcaaatgacaaagtcaaatcctccaaatctctgcatcagagtctccagcctctttgccgttaagcttttgatttcttcaatttgcactagctcaccggtttgtcccgaagtctgccaccatcttttcagtatgttacggctcaatccacaggactctacagagactacgccttttagatggattccaagacggtccaatgcaatttccgcaccaccaatcccgctaaagagtgataaaactgttaaaccttggggaaacatagacttgagtacagagagatggtaacccaatgtgtctgtttggaagcaagtatcaaacactttcatcttt

SEQ ID NO: 55404 - DNA, 1446 bp, Arabidopsis thaliana landsberg
ataaacatcaatcattacagccaagagtggcaaacagtgggtgtgggaattggcattaaaggcactggtctgtatcggctcatttattgatcggtatcatgagagtgacaaggctatgagctacatgagtatagttgtcgacaatttggtctcattggcctgttctagtcattgtggtcttccatatcagatgatattagaagcaacttcagaagtttgctccactggaccaaagtatgtgaagaaaatggttcaaggattggaagaagctttttgttccagtttgtctgatttctatgtatgtgttacccccgtgactctagaccataaagttttcacttatatttgatctaacagtttctatctccaacaagcaacagatcgagagcttccttgtatctaacttctatttggaaaccacttgtcaggtcaatggaaacttcgagtcaattgacaattgctctcagctcctgaagtgtttgaccaacaaattgcttccacggtacccaaacttttcttgaatttattttatctcatagataaactagctttgccagtgtgagtatctagacttttagttgttcgtaaacagccaactattctggatgatacaacttgttaactgccatactttggtagcgtatttaggttctctctgttcaggttcattgtgttattccccttagtcaaccccttgtaactcggtagaatccgtcaagattttataatagacatagaaaacaactatagatggcacattcacctaacagagagttataataagcacatggaaaccaacaagcaatgcaatagcacgagtgtcttttctattattcctttacaaaatagagacctctttgtgtctttttccttcatttacaaattttatcgttccaaagatgaaaacttaaaaacatttgtggtgcatccatgtgtatggctccactgttttttatctgattggagattctttttctctatgccttctctctgccaagaacaatattcttcgttcctcttttgcatgtccttttgactcgtggaattttgttctgatctcaattagtgtggctgagatagatggtctcgagcaactcttggtgcatttcgctatcagtatgtggaaacaaattgaattttgtggagttttcagttgtgattttaatggtagggtaagtgctcagatgaactttatactctttgtttctcttcgaactcaatttggtttatttatttttgatgtcatgaatttatttgctcttctataacaagagtttgttgaggcagcgatgacaacgatgaggcaagttgtaggaattgctttggtagattcacagaacagtataatccaaaaagcttatagtgtggtatcatcttgtacgctttcagctatggagtctatttctttgacctttgttgcattagaaggtctacagcgggacttgt

SEQ ID NO: 55405 - DNA, 932 bp, Arabidopsis thaliana landsberg
gagatattctttgcaggtaacccgtatatgacaagtagcagaagcttgttggcagacgaagatggctttctttgatctcaaatcctccattttcctgcatactgtccacctcaaatgtcaaattctatacctgttaaagaagcatgtgaagcagaaacacaagcgtgaagcctaaaaacacaatacgttgaaaaatgtttgtctgaagctgctcccatgatgaacttcctgactttgttctcagaaatcatctgcacaattcctttctcgatcgagttcatctcaacgcacagcttctctgcttggacctacaataccaatctccttaggaatggcctaaacttcatatcccttatgtatatgtataaaaatatacatacccctttccgcaagcaaattctaaggtactcatcaagaatcttgtctgttttcgccttttgtttctctctgtatgctctcactaattcttcatctaccgttgcagcatcgaacttggtacccactgtgaaagtaagagaaagatcattgaaagtcaaactctttaagagctctgtttcgtgtataaagccgttcgaaagatgacgatataggagttgttgggggaacttacagacaggaatcatttgaggaggtcggtgaacaagaacgatacagatcttgttcccttgacagttatctaatacccatgccagatttgacttgttattggctatttctctccctagtgcaacatatattctctcatccatcactcctgcttcttctttttcttccatgttgctctttctcgcttcctcaaacttgagattttctcgggaaaaagttgtttgtaaaaatctttagaatggctggttcgtttcaaacaaaaagctttggttttgtcttcttctccggaaaatgtttttaataatatggaattgagaaagaaaaga

SEQ ID NO: 55406 - DNA, 260 bp, Arabidopsis thaliana landsberg
ggggctatgttctgtgtcgcacaagagggaaacactacactggcccaccagagagggaggttggtaaagtactaatacccaatgatacacacgacatgacgctatattgagcgacgaaacactaaccatgcgtgcatctggtgtgcatatgcatgagggaacatccaaagatcatttgagtcgttgaacctgcatctcataaccaggaagcactacagaggctcataggattgggtcgcgactaaagttcttatacgcaa

SEQ ID NO: 55407 - DNA, 535 bp, Arabidopsis thaliana landsberg
cattctctaaccctaatctcctcttcgctgcttgcttgtggactttggtaggtcgtcgaccgactacgtggtcgtgctagtgccaccagtgccatcgaggtacgatgcctagatagaagtgggttatggatgacaacgacgacaacggtcggtaccctagaaccatcaacgaggagctcgtcgagttagggcagcttcccgatgacgtcgacgacatgggagatgtcgctgctgccttgttcggtgttgatagcactcataatcccgggccagtaagtgatgctgctggctctaatgaacttggttcattgacttcttctagcactggtaaacgtcgatctgctgtttgggatgacttcactgaagtcatagaaaaccgtaatggtaagaaggtgcgcattgcatgtatttgcaaattttgcaaagctagcgttgagtgctaattctaatgttggcactggacatttgcttaggcccagaaatcatgtacaaagaagtctgatcatgctgctatggtcaaactagactgaatatg

SEQ ID NO: 55408 - DNA, 328 bp, Arabidopsis thaliana landsberg
ctcagagctacagccgcatggacggcgggttggtttcttgattctacaagggctctgatgcaagaatggctcggcaaaggggtacgggctgaccccagccgttcgatcaaaagccaagggtcacgattacattttacttttaacgaactggtatgtcttcctagccacttgatccaagaccaatggctgagaacttgccacgccacgatctaatatagcgcgcccgtctgcaaacctatgcaccagatttaaaatcccgaaccggtatgagatgatttaatctcacccgccccttactaaataaacggctcggatgaggcctccaaac

SEQ ID NO: 55409 - DNA, 771 bp, Arabidopsis thaliana landsberg
agttggacgaacaggactattctttcataatggttgattgtcctatttttattttattttttttggtaatctgattgtcttatttggttttggaagtgattgatgtgtacacttaagacttatctatcattatcaaaggggaaattagaaaggtaggtaaaagtaaataagtcgtacgtatacaagttatagagatacaattatgactaaaatactcttctgacatgagtgagagtgtctaaatgatcatgtactctaagataggcttcagttcactcatataacatgccatattgccatctgcatttgtatttcaaatgtgcccctttaaatctataattatgctaatttagtagttattaacgctatatttcttgtaatagtataataattataatgcaagttgcatcagtggtcaaggtacatcagtcagacagataaattcgtagattcaacatatagatgtgttttgtttctaaactcagcttttgtatctagatacagtttcgtttatgattttgtaaaactgatctaaatgcagtttatacttaaatgattaaactatattcaacaaaaatgatcatggcacaacagcccaaccgtctgaatcagtgggagtttcactttgtacataggagatatacatatagtacaaaagagaaaattaagtaataaatgaacttacacttccgatgcataatcatcattataaaaatacacctataaagccaaactacataactcgatttctagtttattaaagaaaacatg

SEQ ID NO: 55410 - DNA, 723 bp, Arabidopsis thaliana landsberg
gatgagtaattaagtaataataagacaaagacatagtaggagcgaaacaacaatcatttgctctttagtaattttgacatatatatcctcgttttcattcttcttgttgcatatcttcgaacattttttcatgcatgagtcatacttttccacatcgcctgttgtcatcgctaatacccaaaacaagaagtaaaaaaaaaaacgttttagtaagatccaaaaaattatagtttcttacagttttttatttcaaatagtcatataaataatattcagttttcgtgtttgaaaatatggtttgcttgttccttcaccttttactaaaatatatatatatatatagatagatatagatatagttgataaaatatatatatagtttgctagattcacaacaacaacttgtaatatcaatggtttaggacaaaaacattcgtatgatccaattaacatttaaactgttcaactaataataaaaaaaatcattttgcaaagtattaagctaatctatatgactatatacgtagataaatccttagttaataatactaagaagatccaaacttacttgagctttttccatggtgaaagcacttctccaaagaacagccaatcatgcaatatgttgatgatttttcttttgattttggtgaaagaagaggagattttgaaccactatcatcaaaatcagatgaaagagaaggggaaagagaatgatgatga

SEQ ID NO: 55411 - DNA, 857 bp, Arabidopsis thaliana landsberg
tttccggtcaaattgttttacacagtcaaatctttctctgtccattcctcttttgtgtcgtttctttgaattacaccacatgttcgaccatttgtcccaaccacgagattcttcataaccatttggtttcttaattctttttttcattttgattgtcactgtgatttcagatgttttctatcatcttctcgaaccctgtcaagccttttaactccgtaattatccatcaaattcgattcttttcccgtgacccattccccaacaaagtccagcactacctttacagagcaaacctcatcgactctatccgtcttagcctccgctccccaacaacctcagacaggacactagcttctcttctaaaccaccgtcttctcgattcctttgtcgtcaaaaacgctttacgctcatctccttctgtgtcttctgcttggtctatcttcaaaactcttagtcacaaaagccctcgcttttcttttgaaactgagacacttcacgcctttgccactgttcttgcaaagtttcagcgatcttcagagcttaactctctaattggagttgtcaatgcttggaaatttaggaatgttcatttcagctttatgaatctcttgaacttgtatgcaactgctggtgatttcgactcggttcttaagacgtgggacgagtatagatgctcaggagaggagaagaaaggctgcactgagtcttataacattgtgatgcaagtttacatgactttaggtaaagactctgaggctgtacagactcttgatcagataatcaacgaaggagggattcctaattcaagaacattcactattatgattgagcatcttgtgaacatggggaatcttgat

SEQ ID NO: 55412 - DNA, 260 bp, Arabidopsis thaliana landsberg
cgactctaccccaaatttgtgcgtctctgaactgtgtgtttcaatttgtggtctgttccagtgagtcgtagcactgtttgtggggttgagaagggtgagtctaatccagcgggtgtcgtaatgtcagtcaatgtctcgtcaggtcaggtcgtccatgttgcttcggtcgtcagtcaagttgcttctatgcatttgtctctttacttcccttgcgtggttgtggattgtattaataatgcaaaaattgtttatttactttg

SEQ ID NO: 55413 - DNA, 941 bp, Arabidopsis thaliana landsberg
aacaagaatagaaaatgtacaaggataaataatttgatagctacatgatccaaaacaacgtagagtgaggaacataaagacatattaacagaatgaccggaaatcggcttttcagatccaaaacttgagtttaagcatcatcatctctacaacttaaagacacaaaatctgagaatctacagttcttaaatccctagaaatcgaaatacgaagcaagaattcgaaacaatgaggtcaagtcctagtcaaaatctttccctaaagagaaaaatggaggcaaaactagctgagaatcgaatctctgagggcacaaggataagttagaagatagctacagtatccataacaacgcaaagaacaataacagagtaacataaacgaatatcaacagaataatcagaaactagattttcagatccaaatcacgagtttaaaaatcaccatatctacaacacaaagacacaaaatctgagaatctacagctcttaaatccctagatatcgaactaccaggcaagaattcgtaacaaggaggtcaattcctagtcaaatccttccctaaaaaaccaaaaaatagctgagaatcacatctccgatgaacttacttgtatctaaccatctccgggaaaatcaacacatctccatcagattcaccaccaccaccacacaccgtaagcttcgtctacaacaacaacaaaaaaacactcaaaacaatcagaaagctaaacaagattcttcttcacacctaaaaaaacatttgtgtgtttgttacctcaacagcgaaatcagctttacgatccttaaacaacttcgcgaaacgctgaggaagtcctttagtttcaacacgaggaagccaagtctcatgactcttgtaacaaaggaaaacatgacgaccgtacggaccaaacggaccggcgagagtaccactgtacatctccgatc

SEQ ID NO: 55414 - DNA, 1061 bp, Arabidopsis thaliana landsberg
atacacatttatagatctccaatgttatgaattagtaaaccaaaaaaaaaaagagagactattttaacataaaggaaatacaaattactatggattagtgctgcatcggatcgtgagagcagaaaattaaattactacatcccgagatgtatttatcaattaatttacttgaaaatcttttcctcttgtccttttgtattgttaggaatatatagtagttttaaccatgcatatattataagaagggaattgcatgagacaaatattagtactaatctaaatcatcaaattgaagaagctaacaaaatagcttacaaaataccgttcaatctcttgacttattgtcaactaaacaaaattagatgattgtcaatttagaaacaatcacaatagttgcaaagcagaaactttaaaagaactatgctacaaaagagtagagggaccttgatcattgaggtgacacattaccaacactgagacactctcccaccaatatctcatcattatgaatttttaccttatgtttgcatatatatattaactatgatactacactctaaagtgaaataattcagttattccttataatcacaataattaggattttaatatacaagcttatcccttattgtggtaaagtataagcctgataaaataataataaacattttgtagatctttttttttttttggccaaacattttgtagatctaacattagctaattaatgtatgataaagtgatcaacagaaaagtaaaaactaaaaaaattcatttcatgtcatgaggaatgcaacaaaagctttctagcaaattccaaaacataagattaaaaggaagaaataagtaaattgtcatcatcaaaatttagattagcaaaatttgatctaagaagataatccctaattaaattattggaaaaataaaaagggatcaaatcaaatcagctgtctgaaatctgggccaacgttgtggtggatcaagtaatcatcaccgtccgatgaaacgtcgaaaatcatggcagtgtccgtaccgtgatggtgatgtatgaactcatgatg

SEQ ID NO: 55415 - DNA, 261 bp, Arabidopsis thaliana landsberg
gcgccggaccgtccgctcattttgcgtgtccaacaacaccaaaaaaaaaggtcggccagacgggcatatatgctccctgagtggctgtcagtcatagataaccattaaaattcagaaaatgctttcatttgccacaacttgccatggtcttctttccatagatgtacttatagacaatggtgcactaagctctactccaaccctatcctatattcctatccatctaacactatcggaatccgactctttatcgagtgcatt

SEQ ID NO: 55416 - DNA, 670 bp, Arabidopsis thaliana landsberg
cggctgcaacttctgccatctcgtgatttttgtagattcgacatgaagctccaagagaaccccaaatggaagctgtaggatcgaaaggaatagactttatcaactcgtacgcttcagacaatagaccagcacgaccaagaatatcaaccatacatgagtaatgaaccacattacgcgacagaccgtaagtggttctcatgagtttgaaaaatctccttccttcctcgaccaaacccgtgtgaccacaaaccgataacaaggaactaaaagtaacctcatttgggtgcattccatcttgttgcattttctcaaacaagatcatcacttccttaggaagagcatgctttgcaaaccccgagatgatcgtgttccaaagctcaagattcttctcttgcacttccgagaaaataatataagactctctcaagcttccacatttagcatacatatctactgcagaggatgccacaaagacattagaaccaaacccggacttacatataacagcatgcatctgtttcccttctattaaagctgccagatttgaacaagcgcaaattactgaagataatgtgaactgattctgctctaaactcattctctgagctagacggtaaagaaggagtgcctcttcataattcttgttctgagcatgacctgccaacataga

SEQ ID NO: 55417 - DNA, 462 bp, Arabidopsis thaliana landsberg
cgcgtccagcgcgaggatttcgacgcggtcgccgagaccgggctgttgactttcggaagcgcggccgccggcgccgccgataccttcaccggcctttgacgcgacgagggcgggcggctttccgggctggaactggagcactatcccggcatgggctaggccgagatcggccgcatatgctccacggcggtggagcgctattagatactcgggatggccgacatacaccgggtcggcacgatcgcaccgggcgggaacatcctctctggagcggctccctcgtcccgaaccgccacgccgccttggaaggcgcgtgcttcgttatggactacctcaagaccttcgaccccttctggaagaaggagcacttcgtcgacggtccccactgcggctgggtctacaccaaggacagcgactaccgggcgcgggagaagaggtcttaggccgtctatcgcgtgtgcc

SEQ ID NO: 55418 - DNA, 710 bp, Arabidopsis thaliana landsberg
agaatcgaattcgaacccaacacgacgctcacttagatctcctttcctcactccaatccattgttcccgatatagtcccatctctcgatctctcactcaaactcatctcttctttcacgaatcgacctttcgtagctacaccaccattaccagaacccaaagttgagaagaagcatcatccgattgttaaattaggaacccaactgcaacaattacatgggcatgattcaaaatcgatgcttgttgattcgaatcagagagatgctgaagctgatgggtctagtgggagtcctatggcgcttgttagagctatggttgctgagtgtttgcttcaacgtgtaccgttttctcctacggattcttctactgtgcttaggaagcttgagaatgaccagaatgctagaccggcggagaaggcggcgttacgagatttaggcggtgaatgtggaccgattcttgcggtggagaccgcacttaaatcgatggcggaagagaatggttctgtggaattggaagagtttgaggttagtgggaagcctaggatcatggttttagctatagatagaactagattgcttaaagagttaccagagagtttccaagggaataacgaatcgaatcgggttgtcgaaacgcctaattcaattgagaatgctactgtttctggtggcgggttggtgtttccgggtcggtaatttcccagacctgag

SEQ ID NO: 55419 - DNA, 519 bp, Arabidopsis thaliana landsberg
aaggcaccgggccaccccagataaccatgggtggtccttccttttgattgtcctctccatttcctgttaatcgtgttcctgctggttccagctggtcgacctcttttctgggagcccggttcatctgattcagaattgattgcctcttgtaactggagcttgaagctcaaagagccctaccattgaaccagaacggttacggcatctgcgggactctactactactcttattaatgaaacatacccgatacttctggcacaatcactggatctaccaaacctacccttctacgaattcctcctaacggaaactatctagctccatctgtcaactccgcagctctttccgtcgcagcttccaactttcccttttacacaaaaggaagcccaacccatcgctccctccgccgctactttagttcaaccccggcaactgcgccggaaaaataaaagaagagactctaccatgtgcaccggcaacgtgaacccaccacctctgtctaccggatagccagtcgt

SEQ ID NO: 55420 - DNA, 530 bp, Arabidopsis thaliana landsberg
  unsure (1)..(530): unsure at all n locations
gcatgcctgcaggagaggatccctcactctttttctcattgaagttgcatagtacacaaagtccaaacccccaagggaaaaagtgggaacatggggaagaggaagaagaatggttcaaagcaacaagcaaatcaaaacataacaaaaaaaactatctgcacattgggctgtgaggttggtgagatggtgtcctcgggcaatccgaagatgagcgataactcatcacttcctcacttgtggcattgaatctgcactctnnnnnnnnnnnnnnnnnnnnnntcttgttgtcctccattatcttcaaaatgctctcgaacacagcaacttcacaaggaatcctcaagataccagcttgttcaaacccaaactcttcttctgcttcacgcaacagcacatggaaagcttggtggctaaggtactctgttggtatcttgtatcttttctcctccttccccaccgagacagctaagtagcttttgggaatagctgttgtgtctgtgaaggatagtgttctcttcaggaaacttgat

SEQ ID NO: 55421 - DNA, 534 bp, Arabidopsis thaliana landsberg
  unsure (1)..(534): unsure at all n locations
atttgttttaaccattcgtgatatccactttcatcctccttatatctaattcgattttaacctctagtatcttcatccaaacgcactcagagtagatagatgcggttcagttcagttgactgcacgaagtctgctcatcctgtcgccaagtcaatgcctcctgcttcccaaggtattgcccagatcaacaagtattgcccagatcacatatcacaggcaactgacagcgtatccatcgttgcaaatttccagaaatttctgcacatccaattgaacttctccactcctacaaatattcttcaaagcacacacaagtacacaacactacaatagctatcaatctcttggaaaaagagaagcaagaagaggaacaaatctcatgtcttgaagaacaatcagttaatacacatgaaggaagaaagatataatgagacgagcagatgtgacgtccgcgtggagttccttaatacacacgcacctaactggatgcagcggccgtgggatttgcacgggganggaaggggacagaaggag

SEQ ID NO: 55422 - DNA, 528 bp, Arabidopsis thaliana landsberg
  unsure (1)..(528): unsure at all n locations
ttgtcttggtagtcaaacaaaaaaagttttagacacatgaattttcaatacctatggtagtatttaagtccgtttcacaaacaaaaaaaacagagaactaaggactcaataacttaccacggctgtttttctcctgaccatgtctcttgtcagagagcatctttgtggaccgtaggcgacggcgaaacccaaagaattgaagaataccccaccggcacccgtgcaattccttgccgtagaatgcagaatcctgatggtgcaacagctgggccatttggtgttctccgccagcaaagaagagggggggtggtccttatgagcactaccttgcaaaataagggacacgctttcagcttcgctcaacaattcccacctgcgatgaacagcaacagactgtccactgattaacaaacctaatgcctatgcactccatttagatcaatgcatcgagacgatactcngaaaagtgtatgtgcattgcgttcaaaacaaagtgtctgccctaacaaacttaatacaggaatagat

SEQ ID NO: 55423 - DNA, 495 bp, Arabidopsis thaliana landsberg
acgggatataccaattgtgttttatttttggatataattatctccttcgaaaggtcaaaatcaaatgttcttcaaggcttatgctgtaacatgttctcacatattctatacaaagtttcattagatgtttcaagttaaatcctaagccgttcattaaaccaaaatccgaaaactattaccgtccttggtgactatatcacataaatcgtacaccatatatgaatttattcctctgctaagatataaacatatcaattcaaataactcctaaaaaaacgtttatgtaaaactatttggtatctaaataatcgaagtattgtaaaccaatcatatgcccatatagggatcacagagaataatcccgaggacttgattaaaattggagtacagatcaatttagcaaacgaagaaattgcaccaaaacatggaattaacggtcttgggacagagtgcgtttgcccataacaaccattacaaaaaataaattttaaaaga

SEQ ID NO: 55424 - DNA, 1210 bp, Arabidopsis thaliana landsberg
ataatacagttatttttttcgtagttgtgggactttctaactatttcgtcttcttttttagtgggtttttgttttttccttttgtaattttagttgtcctctccattttaagcttgaaagttttagctctttgatgactcagcagttgatgatatgttaaatgatgtcaactatatatacacttaaatcaaatgcatatagatatttatatgaagaagaagtatatacaaaaatagaaatcaagcacttaagacaaacgaagtaataaaattattaagagtagttggtgcttcaatgttaacagcgtgtcctgtttcctttattatctctaatcttgaactctgtaaatgcctgcaaaagtatataatttttattagtttcgacatattggattcacgatcaataatcacatgcgttcacgttcgatgtttcatctcttttgacctagtagaaatattaaatattttatacggatgtagttattatgacaacacttgttatgggacttattaccataaaatatcaatgtagtatttacctttgcagccgataagcatgctccaagggaaacaccttgtccttgtctccccaaacgattaacgttttctgcatcatatatatcaaattaatcagagtcatattttattcgtagattcgaataaagcatctcaatccatagcatccctctagaaataatataaaagtgaaagcaaacaaacgagaatagtgtttccactatccaaaagatgaatacttaaaacccataaaaacaatccaaaacatcaattagttttctatcagcgacacattaatcatcacgccaacttattaatatatatcttgatgcttagagttaaaccattagtgatcaggaattaaaaaaaggttaactcaacgaaattttatactacctgggatattacaggcaattctggttcctcctctcgttccaacaaattcttagctagctcaagaagctcctgccgatttttctcatacattacctataaagaagaggatcaattttgcaaattccaaacctttaggatcatgactaacgaacaaacaatttacgggaccagattcggaaataaacagataaaacagaaacagaacaaacttacagagatgaattgagaaaggacaaagtctggaaaacaaaagacgaacgttaaaccagtattcatagatatcttaatcagcaacggta

SEQ ID NO: 55425 - DNA, 362 bp, Arabidopsis thaliana landsberg
cacatcttgtggtttcaatttagatgataggggaatcattgaacaatctagagtttgagaatgtctcccacaatgatgtgtgataatctttttttatgttgtgtcttagtcagtcattgttgcctaagctctaatgtgactggtgaagaagaagagtcttggatttgcaatggtttagagattagtatcttgtatttgaatagtttagagattagtcttgtctttagaatagtttaaaggttagtcttgtatttagaatagtttatagatgaagtaacagtattacttataattattttaagattagtcttgtatctaaaataagcttaggatagactcatctatttagaatagttttgata

SEQ ID NO: 55426 - DNA, 449 bp, Arabidopsis thaliana landsberg
aagttggtccttcgtcattacagacagaccaagctcaagcttcaggtatcccatgttgtccatcatttctcggcaaacattaatctccttgctgtctggtagacagtaaaggaagtcatctttgtcgctccctccataaaccaaggatccttgggggtattttaggtccctagcataatgttgcacttctgcaacttgttcttcagatagttgcttccccaaaggatgacgaacaatatattctaaataaacttgagaaggtacatcgggagcaggcaatgttggcttttcatgaagaccttccttcgctagttttgtcggcttagctcccaaagttttagcttcaatgtaagtgggagaagcgcttgctgtggatacttcctcagatcttcaactttgtccttgggagtttcagtagaagcaggagttggcgtctttgtagattttaa

SEQ ID NO: 55427 - DNA, 1034 bp, Arabidopsis thaliana landsberg
cgaagaaggaacaaagcttgttacttgggtataaagttatctatctattttccttgtataagttattaatcttgtttggtttcaagcgacgtcgttgtggtgtgtaattgtatacaggttaaaggagtggtaagagaccaaagagaagaggtggtgatagataaccgattaagaggatcatcggttcaagagaatgaagagatgaacgatgtgtttggtatagcgatgatgtgtcttgaacccgaaccagcaattagaccagccatgaccgaggttgtcaaattgctcgaatacatcaaactttccacacgttcctctttttgatgtttctcttgtcaagaaaaataatcaaattcagttccaaaataaagttttgctgaagaaaaagatttcgagatctgcttctttgaaaagctaaattgtaatttaatactccatattagtatagtaaagattatttataattgatttgttttagtatggaataaaggattattacacacaataaagccttatatcaactactattcttttttaagattctcgtacaaagtgggcattggatctttaatttttccctaatttacagctcagctcacgttttgatgtcttgttatttgatcccaaatgttctcactactacattaaaccttttgaagcaattagcaaccttttttttttgttacttagcaaaaccaaaccaaacattacgtttatataacgacacttttgctaaaacggttacttttcctagaagcaatttgctggattattcacctcaaaatcctaaaaacattaattagcattagatatctaaaaaaagtgaaatacaaatctttgtttctttttaaattgttttattttataaaattgattcacttgctcatcatttatatacaccaaagagtgtagaagagttctctcactcaaacaaaaatcaaacaatggctaaagcatggatctgcctttccttcctcatcttactctaccttgtctcaggtattataaattaccaggttaaccacttaatcagc

SEQ ID NO: 55428 - DNA, 807 bp, Arabidopsis thaliana landsberg
gcatatccattattgttaggtatactgtatacatagaatattgatcatcataagaaaggtacaaatttaatttcttggaaattgtggaaatttccccatcacacataccatattaattaccatgtatttattttttaaaactatacgtattctggataattacttttatatatgtattcaggttgttaattcaagtaaatcaaataacatgtgatgcgtataccttagacgtcgtatatttctgtatagttactttataccaaaagcctatataatttatgaacctaaagcctaaagaatgtttgcaataatctggctaatactcaccatacttaaatatttagatcgtatttcgttcttctgtactctatacacattttgttggaaggaagaatttttattattactaagatcgaaccaaatatttatattttagcatctgatatataatataatcatgaaaatatttgatctaatcatattataaaatattcaattaactgcaatctatgcaattataatgattacttcccacgaacaataatgattgaattaaagaagatgattttaacaataaatttctaacaaaacatatagcgtcattaactatttggtttcactactcacctaagtgggtcaaatgagatactaattttctaactaaaataaaaaatatgtggtgaatgatgtaagaaatacttgggttatatataggtgggtgagcttaggtgcttataggcttttgacagaaatcttctaatttggtatatactttctactttcaaaatatttaaggtctcatctctc

SEQ ID NO: 55429 - DNA, 220 bp, Arabidopsis thaliana landsberg
atgctaacaatattctctctaatgctgtttttgtttctctatttaatcaaagaatggtattgtttctttaggcttttcggcgggaaactgttagggcgtatttttctttttatcttcaatagctattgatatttctttcttctaaataaccagcatttcgttcaaatatttcgcattaaaagttccatcattcgcttaatcaatccataacacaactgac

SEQ ID NO: 55430 - DNA, 664 bp, Arabidopsis thaliana landsberg
gtaattaacctaataactagtatatatcctatttgcactaattttttaaccaaataagcttattacataatgagatagaaggatacaagagttttgttcctttccaacgaggaagtttgtcccacgcacatgagagttcctatcaattttgacattttattgtaacaaagcaaaacacaaatggcacgacacaaatttagtgacattgagtgacacgtgttcgtcagctccatagcctctttattttgttttcctttttttctcccaacatttgtcagaaagagaagacgagatcaaatgagcaatcgctgttgtaacaaaaaaaacaaaaaaaaacaagaggctacacgtcttgtttcctcaacaacataattttctctccaagcaactacaaaaggggtattctccaaattaaatttagtgactgagttttttcttaaaatccaaacattattgaacatacaatctttttttttttttggcaaaggaacatacaatcttatacacatattttatgaccaatatcaggaagaccggtccagagcagtctgctgtttgattagtattattaattgcattgagttgatttcaaaacaaaattacatgtgttctggaatgatatatgagtgcttcacaaattggagataaggttttcaaagataaa

SEQ ID NO: 55431 - DNA, 799 bp, Arabidopsis thaliana landsberg
acagaagcagaggcaaacgattaatttcatgttagtttaagggaacatccaactttttaaacactaatttgacgctttgtaggctaaagttgatgttcacttgtggcgttgtgatttcgcagggacaaagttaactttgcgatgctaaatgtggacaacacgaaatgggagcaagagttggatgagtttggtgttgagggtattcctcatttcgccttcctcgatagagaagggaacgaataacgtaatgtggtcgggaggctcccaagacagtatttagttgaaaatgtgaatgcgcttgcagccgggaaacaatcaattccttatgcccgagccgtgggacagtactcaagctcagagtctcgtaaggtgcatcaggttactgatcccttaagccatggataaagagagtggcatcactatcatgcttctggcagatgatagaagttgtttctaactctatagtgcacaaaaaaagtagacaggaaaggaaagtcggaaagtggcaatgtttcaaattgatcaaaagaatcccattggaactataaatgttgatatcggtttgttcttgtttgacaatgcttctctcctatgcctccaatatcaactctctcaagccacttacacaaagaagataagtcaatcaacaacgggtttgaccataaagtttcaaaccaaaccagaaaaaatctttaaagatgatacaacatattcgttttaagacataactaatctgactccgaagattcgaaaaactgaggattcagctcagataccatttttgacagattctccctta

SEQ ID NO: 55432 - DNA, 385 bp, Arabidopsis thaliana landsberg
  unsure (1)..(385): unsure at all n locations
cgaaatcggctatgcccagcgcccatccgatgaaaatatgcggccatgaaaagcgcatggttttagtaaatacctgttaaaacaggccaattagcgctacagcgaaggccagggaataaacaataaacagtgatgtaccggttgaaatttgcttaaccagggcaacctgcttaaacagcacatcgataacccccatgccggtaaacaccaccaggaggtaaatccacgaactgttgccggcctttntattgcgctctttcttttgccagggaattaggcaaacaaccgcggtaataccgatggccagtccttgaagccggaccggatccgggcgactaatggaaaagcaaaaaagccggggctatcggaatgaataatgataatc

SEQ ID NO: 55433 - DNA, 552 bp, Arabidopsis thaliana landsberg
attaatttctagccacagatctgaccgattattccgagatcaaatcatttctatcgtttttacttaatctggagaaacactatagaagctaaaatcaaaattctcaagctatacgatgataaagacaaaaaagacaaagatcaacctgatcagaacttcacaaataccaacgaaattcgaaaatacatttccgcgtataggcaacaaagtctagatcgcgacacacatttctcgaacgaacaaatagtgttccggtacaatcgaagcatactcagcgataagaaaaatggagttaaaagagatgaaaaattgaggaatccggcgattacctcgccgacgcaagcagagaatgcactgcatgcgaaagttttgggcagggaaaggtcggatttaccagccgacaccatcttcgatccagaaaacgcgaattaaagagaggaggttagggtttcgaaatcgaataacagagaagagatcatttctggaagagggacgacgacgattacggctaaagcaacttggcctgagttgtgtttagttatagaaaagatc

SEQ ID NO: 55434 - DNA, 2293 bp, Arabidopsis thaliana landsberg
  unsure (1)..(2293): unsure at all n locations
tatgtggaccctttaattactatataatcatttgctttacagtaaaaaaaaatataatacacgtaaaccatagcaaaaaaatcatctagtgtagtcatggcaagaaaaaagttaaatctaacttacattttcaatgatagaatgaggaaaagatcgttcaagcagaggagagaaggatttctgaagaaactcaatgatctcaaggttttatgcgatgttaatgcatgtgcggtcgtctacaatccattcaactcaaatccagatgtgtggccatcaaaatcggaggtgaataatatcatcaagaaatttgagatgttaccggagacccaaaagaaagttaaatcggtgaaccacgaagaatttctcaatctatacatctcaaaagtcgaaaagcaaagtaagaaattaattgtagaaaataaggagacttgcttaaaggaggtcatgttcaagtgtcttggtgggaacatgggagattttgttatgaatgataatgatcgtcttgacttatgtaagtttattgatcactatcttagaaatctttatcatcataaaaatgtaaccctcaacaatccaaattntgaaatcggagaatcttcttcattaatggatatggcaccaaccgctacaactggaaacatggcaacaactgtagtagatgaaggcatgacaccacttcttattgctgaagggagttcctcctcatttttgaattctccactcttcaactctcctcagctaaccaacgagttgcagcttatagtctctcaaaaccatagattagagaattctctggcaagtaatctctttttcagtgaagggcaagacatttgcattccagatatgaatcaggtttgtatgttgtaatcattttatatattttacatcaaaatctatttgagttttctaatagtatacttttctcaactaaccaaataattgcagtccataatcccatcaaaccaaggagcagaacatgtggattttcttgaaagtaattttctacctaataacaatcaagaagtttatatcccagttatggatcaggtttgtatttttttatcatcatctataattttaaatcagaaatgatatctattctagtcttcaactcttctaaactaactaaacaattgtattatctctttaaaaaagggatcagagacagttttttttttgcaaacaattcctttctaaacacaaccaagaaatatacatacactcaagttgtaatttgactaatattcatgtagtttaactcattgttaacagaaacatcaatattgttatttgattgtgtttcaggatgaagtttacaatccaaatcaaaatcattatgagaaccaacaaggattcattgacgagatgatgaaatatgctgagaaaacaagttttccttggatggtagagaaccactgttataatcacaaccagtaataacgcatatccatcaacgccgatgtcaatgccaaaatgttatctttgttttctttgtcgtttttaataaattttcttaatgacaatcgttgaatctgatatgtcttatcttttagttcatcaagttttggttttctagttaatatgttttctataattattattttgaagaaattgattaatatatttttattaataaatttaaagccagattctgtattttatttgagattttatttttatttctgtttgacttagtaaaattaatcttcaactgaaaatcaagagtgttttgcaaattcatgaaaaatgttaatctaagagtttaaaaagaaaaaatatataaacaaagatgaccaagagacttcgttccatcaaagatgatttgctagaatcttgttgtagagaacctactctactaaacctaagaatgggagaaccctatatggaacaacacaagatagaaaaataagcaaaatatatattagagaaggcatgttatcaaagctaaaagtttgttatttacttaaaaatatgtatcctctccaaatgatatattccgcctatagtctccgtcgagccgaggcctcctaaatcttcatcatcaagagtttaaagcttaagattttgtttttgaattggtgggcttggccgttttcttactaggcttgctactttatttattgcaggctcatttaattttaataaatatgaatagagttagtggaaaactgaagttaatttgataaatagaatttgacttagtttgaatcacatagaatgaatagtatactacttattcaggttttcacgttttaaaaatattattccgctattttttaccatttacaatatt

SEQ ID NO: 55435 - DNA, 625 bp, Arabidopsis thaliana landsberg
ggttttgttttaccaaaaatctttagaggcattttgtttcatttccaaaaaataagaatgaaaggttttgtttaccaaaaattatattactctaccctttactttagatattcaaattcatgacattgaagatttttgtttggcaattaattagtcactaactaaactacctacatcgtctttaactctttatgaaaacaaaacaaaaactatcaacatcgcacataataattgatttttttttaaaactcttttgttaattaattactactctaattaagttatctacgtcgcactaaacttgggttagttaaaaaaaaaattacaagttaaaaggttcctaaatcaacaatcttaaaatgttagttttctctaatcccatttctcaaatgttagttttgcagcaacaatctttatgtagatattttgtttcacaatttttttctttttcctctatctaaaaactagaaagtaaaaccaaaaaataagttaagaaaataataaacaaaaaaggaaaaaagaaaagcagaaaaagaaaagtacaacatacgagagaatctaaaaaacaaacactcataattgaaacaaaacaaacaatcatcaaaaacctacggtcaagatctaa

SEQ ID NO: 55436 - DNA, 495 bp, Arabidopsis thaliana landsberg
gagaacccatatgcggaaatgttgaaatcagatgaagaattggctcgaatgttgcaggttttatattacttatggtcttcacgggaatttatcaactgattttgatgatgatgatgttttgattttatgtttcttggttttcaggcagaagaagatgctattatgtttcaacagtttgtcgctgcacgagataacggcgaattcgaagggagaattaggccttatgttagtcaagttctcatggtaaaagacttgattatttgaatctttgatggttgattgcaatttttgaatattggtttatgtgctgatgcatgattactattttgtgtgtgttcagtatgaagatccagtccgccaagatgctgctcgaaagactgttcctaaagacgagcttgaggagaaagcattggtttctctggccaaggcttgtgtttatgttcatcgattaactgaactataagttctgacttctgatattgaaaatgcttgatg

SEQ ID NO: 55437 - DNA, 1211 bp, Arabidopsis thaliana landsberg
tgagtttttagtttgtgggttcagtaacattataagctaatatttttttattagttgattacatattattcaaggattacatatgttgatgaatcctttaatttactcgtgttaacaataatccgtaattttttaagacgtgagggatacataggagagatttccatcgagatgcatggttgtttttgattccctcactcctgataagataaactagaatacgtttcgacgtcaaaatatttaaagatttgcttaactgaaaaataaagagaattttgtggaataggtcagaactatatttttaaattagctaaaaggtatttttaatataattttgttaatggtcaaaaagacctaaaaaaaatttaaaacaaaaaaataaagagaatttagtaaaataggatagttttatgtttttcaataagtaaaatggactatttatgttttaaattatctaaacggtaatttatatagtttgaaagtagtataaaaaatgttctgattcgttgctaatcgttctaaagtgctcaacaactacaacgaacgaccaagtccctttttccccgtttaggaaatgatgatgttaacttgtaaatatttttaaaatggttgaacaaatactgtataacctacttggattcaatgtgtcaattgttttactgcagaattcaaaaatgagtcaggattcgaacaaatgtaaatgataaaatatatggttgatattaaaatgttgcaatagcggcgaagccatgccacattgccacatatgctttgcttcaaagtcaagacacaagaaatgtgcatcgttgactcaccaaacaatattatgccggagagttgtagttcttttcaacattcaaagatcgaatagacaaattaaggcttccaatatatatatatatatatatatatatatatatatatatatatatatatataaataaagacaaatatctcaaataaaggactcataattcttataaaaactatattataaacgtaagaaaaagaagaaggagaatgtgaaaagctctatttcgattagtattttgtaaactttataaacaaaatgatatgtttctctaacaaatactttaagaatgaactttgatagtttggctatgactttaagatatatatacctttcacatgactgaacgtatatagtagctttgaaaacaactaagaacaaacttttttcacaatgtaat

SEQ ID NO: 55438 - DNA, 931 bp, Arabidopsis thaliana landsberg
gtgcccacatcaaccaatgtgcccggcggtcttgggtttcctattcacaaaacacctcaaataagtctccaaaaatcaatttaaaacctctgtctcaccgtcggtttgaggatggtaagcggtgctcttattcaacaatgttcctggagccttaaaaagttcatacaagaagtgacttacaaagatcttatcacaccatactttcgggaacctcgtgcaacctaacaatttctttgttgaatgcttaagctactatcttggctgtaaaaaaatgtttaagtggtacaaaatgtccatatttgctcaatctatccaccactactaggatcacatcatatcacttagaaataggcaatccttctataaaatctaggctgacattagactagatcttggaaggaatggatagtggaattgttgcaattttgatttttggttgtacaaaatgcacacggacaacgtcaagcataaggctcctcatcaaaactcgatcataatttttttttgtggaaaaaaatatcataagttagataatagaaaggtaaataaaatatattatcaaagaagtattatatctttaatttaaaattgatgattacgatattattttttatgtattcacatatttaattttgagcaggtacgcaatacatataattagtgacagacacaaaaatatttttacctggatcaaaattatattataaacataatggatcttatattggtttatacaatataccacatttgaacaaaatttccaaataacagttttaaattggttttgagacaattttaaatattattttaaaatatattggtttcatttatagacataattaaatgaaatgggcataaagaaataataaaaagaaaaaacgaattgatgaaaatagaaaaatataaattatgtgggatatatttaaaaaac

SEQ ID NO: 55439 - DNA, 160 bp, Arabidopsis thaliana landsberg
ggaaacaagtatgtgtatgtgagcctggatgaacagggccgggcccatcgagcatggaaacaaccctatggagatggctagctggtcggtggattgcatgaatttggaaccgacctttacttcgactggtccagtgggaactactttaagtaccaggctt

SEQ ID NO: 55440 - DNA, 851 bp, Arabidopsis thaliana landsberg
caaaacaaaacaaaattaaacaacattcatatacattataatgaataatgtactaaatgacaaaatgcaacaaacattagttttttttgcctttttctgtttaaacatccagtagtagtactatgtatatactaaaagcattgaactatttttttgtaatgatccaactgtagttcgatctgaaaacattgaaaattctaaggtgcagtgtataaaagcatttagcatatgtgcaacatgttcgacgatgctaaactttcttaaaaagaaataaaatcagagacataaatataaaatataattagaatgtatctctttaacccaaaacgttgggggtgggaacttagctttattcctggggctaacctgtctttaagcaaagaatgcttcgaacagagggacaacaaaactccaaataaagttccaagacatatatgaaaataagaaatttcatactatttacgaaaataaaatgaaaagcagttattgtaagaagtgttcaccactagatataactaattattattacaaataaacaattgtgatttaaaccttaataattttgtagaaattcatccaaacctaaatttatagtatattgaaaatgttctaaaaatataatatgtgtatgaaaaggtgtataaaagatataaacaaatattttgaaaataatataattttatggtggaatacaaatgaatgtgcaagagttaacttttattatagtttttgtttttgtaacatgagttttattatagttgagatttaattaatgtgcaaaaaaagtatagtcaatgtctccaaaacgcttcccatcttgtcttacattatactttgtcttttggatttgt

SEQ ID NO: 55441 - DNA, 624 bp, Arabidopsis thaliana landsberg
  unsure (1)..(624): unsure at all n locations
nnnnnnnnnnnnnnnnnnnnnnnnnnnnnnnnnnnnnnnnnnnnnnnnnnnnnnnnnnnnnnnnnnnnnnnnnnnnnnnnnnnnnnnnnnnnnnnnnnnnnnnnnnnnnnnnnnnnnnnnnnnnnnnnnnnnnnnnnnnnnnnnnnnnnnnnnnnnnnnnnnnnnnnnnnnnnnnnnnnnnnnnnnnnnnnnnnnnnnnnnnnnnnnnnnnnnnnnnnnnnnnnnnnnnnnnnnnnnnnnnnnnnnnnnnnnnnnnnnnnnnnnnnnnnnnnnnnnnnnnnnnnnnnnnnnnnnnnnnnnnnnnnnnnnnnnnnnnnnnnnnnnnnnnnnnnnnnnnnnnnnnnnnnnnnnnnnnnnnnnnnnnnnnnnnnnnnngccaccgcgtgtgactgagaaaacgctgccgtcgagggagagccaccagagaactgcagccccgagaacttggattggttgacaatgcctgacctattacatgaggtagcattcccggaggtaaggttcgcatttggtgttgttgttgttgcggccgctgcnnnnnnnnnnnnnnnnnnnnnnnnnnnnnnnnnnnnnnnnnnnattggactattaaggagcggaggtgagtgggtgaggctaatgtgc

SEQ ID NO: 55442 - DNA, 1079 bp, Arabidopsis thaliana landsberg
gcaataaaccaatctgccaaaccaaaaaacctgataaatcaacctcctaactaaccacttacacatctagctgcgccagaactgagtttttttgttcaccatctattgaactttatcgatttttttcgagtaaacaatattttaaaaatcttattatatataatgcatgtgtttttaacagtttgtttataacacaaaaacataagttaatttaaccacaataatttatttcccatacatttttaacattttgtatataacacaaaaacataagtcatactatatttattttatctttttgccaaaccataaaaatatgtgatgtgaagttgtaattagtaaaaaaactttgtaatcacttttaaattattatcatcatgagaaaataaaagagagaaaggagagaatcatagtacatatcaaaaggaaaggtgaccacatcaaaataaagagtgaagttacacattagacaaaggagatctttctcactgtctagtcctaaagacaatagcctacacatgcatgcatgcaattacagaaaccaagacacccattttaacaactcataataactcccaaaccccatcaaagatcttataaaaagaaaagaacttttaacaaaattaatttaaagaaaagtacccattagttctactgcggagatagagacatatgaaagaagagagagagagatttgtagttattcaacgaattatatccaacggctattactttaccctcaagtacacgtgttttcttcttagcctttgacacatcatacagtgatacatgaatgaaacacctgcagaatctcttttgtatttgttgtcttttctttaaagtttggtactgtcttgtttggagttgatagatgagattgggaaaagttccagggttttcaatggtatctttggactgctcatcatcatgttacaacatgaaatgggtgatgatgatgatgagggatatgatggtcgtgggcccatatccatcatcatcatccaatctcgaccgtacgatgagtttggacccgtgattgatttttgcatcaatatctcttcagctccacttttggtgca

SEQ ID NO: 55443 - DNA, 587 bp, Arabidopsis thaliana landsberg
acccgcatcggccttgcctgaaataccgcatcttccacttcatgaaataccatgaactgtttgttggaggcgtgctgaaatgcgagtgagaatagcatatgtgccgtggtgttcctgccgggtatggcaatgcgtagtgtatctatatctgttattgccaggttttcattctttgtgatcagcagggggccaacgccctttccgagggcgccgccgctttgcagtacaccatattgcgccgccaccaggggcagcacgccatagctgatcttggaaaaatccagtttgcccgctatggcccattcattgagtgtttgcacatcttcgaggactacatcaaaagaaatatcaccggtgttgatcttcccgttcaccagtgcatcaaagatgaatgtatcgtttgggcagggagaaaaaccgagcgtataagtggtttgtgacatggtcattggattttatacagcctgtctgtatatttcagcaacgcttcattcagtgcagcaatggcttcaccgagcttccatttgcttttgtcgcgctcgccgatatagttggaaacagccctgatctgcaggaaggcaacacct

SEQ ID NO: 55444 - DNA, 963 bp, Arabidopsis thaliana landsberg
agggtgttacaaaaggtaaaataaattgatgtggatatcgaattagaagattcctcatgtgatgcacaagatgtgttggatggacccacatccaactagaagattcctcacccgatacaccagaggtgttggatggatctgtgattcgaccatgcaatcgaaaaccctaaaacaagttcagtgcaaatctagagaccctatttaactccatggaattttagctggagcaccaactttccgtaatgagctgtttttcagccgaagacccatgaaaaatatctacatcaatcaactcgacaacgaaacgttagaggatatattcaagaataccttaccggcaacatcagttagcaatctacgacaaatgacatggcgatccgagaccaatggactaaggcttcaaaaatcatcgaaaattcatgcattgtaaagggaatagtctaaccgaaatcatgcattatcaaactcgttttggagatgaacaacatgagcattatgacaaccttacatgtagccgataacatgtcttttattgagttcaagtgcgtttcaagattttctttaatcctttacaggttttagattgatatggaggaaaaaacattttgggatgcaaacacgcatttggagatgtgagatcatgtataagggtttggagtttcgcgtcatgtggaagattttccaccgttatatcttcctcatattgtgatacaagctaggtgatgatctttgcttttatttccaagtgatttgaagaaaatctaacagtgaaataagacgttatggccaatctacttaagacatgtcaatcagatgaaactggtgtggaaactgatccagacaatcagagaccgataggtccatatatacttgggaccgatcagtccaccttcatttttgagtcgaccctagtaggtcaaaggaagatataataataaggtccctatgcagccaatgaattga

SEQ ID NO: 55445 - DNA, 1042 bp, Arabidopsis thaliana landsberg
  unsure (1)..(1042): unsure at all n locations
acataaagtgacatacttacttgtgtaaaacccggacgtccgcaaccattacattcttatggtttctcaatcaaacaagtctatgaaaaaaaaatcaattcggtacacacaaaaagtctaacatcttaattattatcagctagtctgtctttgacaattcatgagttttttttacttttgaattttctttagctttttgtccatgtgttagccatggatcagataacaacagattataaaccattggatttgatactaagaactagaagaatagaggaaaaagatcgagtggaaatttaatcaaatgatagacattttaattacaaaataaaaaataatggtccgatttgaacgcctatccttaaaacaaacatcttgtatatgcacacggtcgatctctaattattgatatccgatgaacagattccgcaaagatcctacaaaaccaaaacaacaagttaagtatcaatatataagaaagagagtatagtagtcattactcaataagtcatttttcttgaaatatagagaagtaaacttacttccatgtaacatcccctcgaagtagccagtcaccctctttcccttggaaggtgaatgtataatttgtatcttctctgtcgcaatcttcatctgataacccaaaattagattcaatagtagtaagaagttacgttctattttcaattgtttataggtttcttactctagattttgataaacgtaattagtacttacattcggtaaacatagtgatcaaggagttagtgagggactcgtaagagttaaaaagcttgatatccacttttcttgctattgccacaccatccatcttaaccttaacatacattgatgatcttgatgatattgacgaagaagatgatgatcccacagtagccgttgttggattagatatgttgttgntcatcgccgtgatcctcctaccacgatgatgatacgggcaatgatggtgattacgaatatgacgatgatgataactaccatactttatcatacatgtttttactggtggccattcaac

SEQ ID NO: 55446 - DNA, 472 bp, Arabidopsis thaliana landsberg
tctctattctttatacgcttatttatacatgagagccaactgtgtactcactcatctcatactaacagagtcaacttctcacatttcaaagaactctgaattggcatgccaaaaagggtttcctgtcgtgatgatgatcatcactgcttggctgttctatgcagcacctaatatccatggatggggaaaagatggtcatgcaatcatgtgtaaaagcgctcaggtcttgatcgtttcatctactttacatttcagactataaactaagtatggaataacttactatattaaaggagacaattagtctccgtgggctgaaacagatataaaggccgagaaagagctgttacctgactctgctgaaagagacctctcaagcttgtgtctttgggcctgatcgtgtcaagttcagataccactgggcgtgcactgtttattacagctacacttctgaggcatgctcataccaata

SEQ ID NO: 55447 - DNA, 1225 bp, Arabidopsis thaliana landsberg
  unsure (1)..(1225): unsure at all n locations
ataaaaaaaaaaatgataatagtggaaaagatattaaattagatgataatgaactatatcgcgaaggttgtaaagtgaagataatgcgaaagagaaagacaaaaaagagaagacagatcttttgttgccttttttagcaagaagggcccatctaaggcccaaataacacgtggacgcgtcaacattacacttcaacacgtgtcgtctacgagcttttagtctcttttcactcattgccacgtgtatgttaacgaaccagcttatttaacaaccaacgtcctaccgttgtaataccattaacacttctcacatctaattaaggaaaaaaaaaaatctttttcatttcaaaaatatatataccataacttaaaatttaattcttggctgcttacaaatactataatacttaaaaactatcttatgtaaaaaaaaacaaaaaatgcttttgccataacaaagttcggaaaaataaatgtggtgtatttaataaatggattctcgagaacttacgtggtccaaattgagaaagaaatagtagtaatttgattacgtgttttaacttcaaaggcacacaggttttatacagtttatgttcaaacataggttacatcaagattccacgccataccaataactcacttgaaagaaataattaagaaaatacaaatatctatgtttgttctagagtttaaagcaagataaataattgcaaacgtatctttgtcacagaatgcaaaacgtttgtgaatttatatattctggcataacgaataacttaattaatctcatctcttataaaatatttcttgtatacaacaaaaagatctttataataaaaatctttgaccgaccttactaaaagtgaaataaacaaaccgccataatttgtaatcgaaccaaaaatcgttttcgaaatctctgaaaatcgcgtatgactaaatgacaaactcataacgtgttattgattggtcgatcattttaaaatgatggtaaattttggtaaataaacccaacatggatggttcttctaaaccacgtctctgtctctaatttatctcaaagtctctaaaagaaagagagagtctataaatacgaaaaaccctccgcaattntcttctcccctttcttctcttcctcctacattctcgactctctctttttattagggttttcaattttaatcaaaaaaaaacctcaaatctcatttttggatttggtttcttct

SEQ ID NO: 55448 - DNA, 520 bp, Arabidopsis thaliana landsberg
actgacttgtttccactaatccaaaagtcttgcttctcttttttcttcttctataaaagagaaaattagctggggtggggttactttaactctctctatctctatagtacctttgatttttcaatatatgattatgatttatggactcgaactcacgaccaatcatgtaattagcaaggaaaagctcaaagccaacacaaatgatgaataggcccatgccttgtcccatttgtttccttctctctattactttcaaaaacactcttcttcacaaaaagttaaaagactcttatcaatatataaaggaagcacgagataaaacttagaaaaaacgagagcctaacatttaccaccaaaaaatcaaaacaaacaaacaaaaagtttgagatgagagggcatgagccacgatcaagctcatcttgtgcagcctgcaagctcttgaagagacgatgcacacccacttgcattttcgctccttatttccgctcaagtgacttgataactttcgccaaagtccata

SEQ ID NO: 55449 - DNA, 361 bp, Arabidopsis thaliana landsberg
ttaccaaatcgaagcgatgggtcgtgtgttaggaggatttacttgcatacttatgaccagatgcaagcttgggttggttgtaatgagatgtcttggggccttgcgacggtgtggagatagtcttgaggatccatgctgttggccgagactcataccgtagtgagagcgcttgacatgcaccgacctgtgcttgttggattttggtcggtttgcatttgttgcatatagttgtcaataatggtcatcagacatatatgtttgaagtataggcgtggattactagacggggactatttgggacacgcgctatgggttgaactaccgggttatctctggagcaccgcaaaacgcttcttgacat

SEQ ID NO: 55450 - DNA, 842 bp, Arabidopsis thaliana landsberg
attttaagtatgagttaagtcaattgtaaaaattcaaaagtagcaatgttttttttccctatccatatggtatttattttattaaaaatataataaaacaaaataatatcctaatgtgtatctctaaaacatccttatttgaccatttgtatataaactaactcaaacaattatataaaatgatagagaagatagagtcaacctttgttactttcacgaacgaaatgtcaaaggtattcaagtgtccctagttgataattttatatgcgccattgttttggtctacaaaatttagctgtggggtttgcgatgcaagactaatttgggggtcaaaatagtaatgaaatattgtagtggttataaaatagtataaaacaaaatttcaagggctaataaagtaataaaattggaaataatttacgaaggagaaacaaacagtatcgtgttttggagagagaaagtgagacgacttgagcgagaaacaaggcgcggagagagacgacgccgtcaacaacaccagaacagaaaaaaaaaacaaagaaagaaggaagaaaaaagagagagaaggagatttgatttaatttaaattttctttaaggaaaaaaaaaacaaaaacaaaatcgcgtttttccgctaagctctttttcttccctttttgtcaaaatttgggtttttgctcattctcgtggaaggaaaaaaggggattttttcaagtgtttaggggttcacaaattgaaaattttggatcttagatctttcttcttgctacgaaaccctaattcgtcacattgtatcagctcaatttgatcttaaaaaaaaaagactatttttttcctttttgg

SEQ ID NO: 55451 - DNA, 546 bp, Arabidopsis thaliana landsberg
gtctgcagttatttactcagaactcggggaagtaatcaaccgtgccattctagctggatacaagccagaggactcaaacagaactgctcctactctctctgatcggtgtttaggatctgcagatacatctcatagtgaaaaattggctattgcatatggattaatgcgaactactgcaggaacaactctccgaatcacaaagaatctgagagtttgcagagattgtcattcgtttacaaaatatgtatcaaaagcattcaatcgggaaattactgtaagggatagagttcgatttcatcactttgcagatggtatttgttcttgcaacgactactggtgaaaaaaactgttcttggtcagcttaaaaggtttgacttttgcttgttttactgttttggtgtaagattcgtgtgccttaggcgaaatgatagttattcacgtgttatagtctcttggtgttttgttaagtacgttagctgataaaacaaggtaaacccaatttttctatttgttctatttttctgattctttgtggatatgtggtcc

SEQ ID NO: 55452 - DNA, 909 bp, Arabidopsis thaliana landsberg
ttcttattagttttctcatactagcaaaagcttgcgcatcattcgctgcagaatatatcgaagtcataagcacatagtcccctgcattgaaagcctcaagctgcaccaatttcttcatggctacttctcctaattccaaattcctgtggattttgcaagagccaagcagggttctccacaagacgggatcctcatggcaggaagacgcatatatcatctcaagggcgttttctagctgacctgctcgtccatagagatccaccatgcatccatagtgtttgacgttcggagtcaaatggaactgtgaactcatgatttcaaaatgctctagtctttcttttaactagaccttgatgactacaacctaacaactatccaaggaatgtgatggcattgggtctaactccggaagccaccatctttctgaagaacgagatggcctctacgccatgcccgtgaactccatacccaataatcattgagttccaggtcaacacatctctttttcgcatcccgttaaacacaccaatagcattttcaaggctaccacattttgcatacatatcaataagagcattactcacaaagacacaactctcacatcgaatatcacaggctatcctgtgtagcataactcccatattcaaagcactaacgtgagcacaagaagataacaaagcaacgagcgtgtaagagtcaccacacacaccttcatttcccattcgcttgtacatactcaacgcttgattatgtaaaccagcatgagaaaagccagagatcattacgttccaagaaaccaagtctttaacaggcatttcgtcgaacacttcagaagcatttccacacttccattcgcagagtaacaacgaacgagactagtggcaacaatagcgtcagaaagaaacccag

SEQ ID NO: 55453 - DNA, 717 bp, Arabidopsis thaliana landsberg
atgccaggatcctggttggaaaagatcgaagttagccaggcaaggtctttttcctattgatcttattgatcagaggggtacgctgctgcaaaagagtctcaaactgttacgaacgaggtaatagccattggattacaatcttctttaatattcttcacaatcttctcaaatcgatatcgtattttttgaacaggctaaagacataatgtatcatttatacaaagctacaaagagcagtcttagaagcatcacaccgaaagagatcaaacttttaaagtacttactcaacataacagaccccgaagaacgattctctgccctagctacagcattctctcctggtgatgaccacgaagctaaggaccctaaagcattatacacgtaagtaacataaagatgcacactttagtgtttcatctttaaccacaaccatttattctaaccaagctgatgacacaggacgccaaaggagctgcataagtggataaagataatgcttgatgcttaccatctcaacaaagaagaaacagacattaaagaagctaaacagatgagccaacctatcgttattcagcggcttttcattctcaaggacactatcgaagacgagtatttagacaagaaaacaatcgtggctgatgaaactccaaagaagaagaagaagatacgactattgaagattttttgactgaaaatgtgaaatccatgaaccactct

SEQ ID NO: 55454 - DNA, 568 bp, Arabidopsis thaliana landsberg
  unsure (1)..(568): unsure at all n locations
cgaagctttctatggtaaatggttgagggatatcagggatgaacattttaatgatggaagatngcctaattatgcgccttatgtgacgggaagcttgcgttattatgatgccccgggttggaccgatgccggagtcatcattccatggaaggcttatttaaactatggagataagaaaatactgagtgataatttggaggcgatgtgcaaattcattgatgaggtgtacgcccgtaacccttcgctgatccgtactcatgaggtgggtcagaattatggagactggcttaacggcaataccataaaagctgccggttatccggccgaaggcggaagtattcccaaggatgtctttaatacgggctattttgcttattcaaccaggctactggccaaagtatgcaaagttcttggaagggcacagcagtttagtcattatgactcgctggcccaagctatccgcagcgtgttcatcccaatttttttaaaataacagggcatagtaaaagggaaatcacaagccggaaagcacttgctttggaaattaatttagtccctcaggacttaa

SEQ ID NO: 55455 - DNA, 378 bp, Arabidopsis thaliana landsberg
tcagtagggtacacatacgaagctaaagatgcgtacttttacctcagtctatctcagtggactcataagctacgtgtcacgtcagcaactcacaggagagcggccctatctatgctagtggtaggaaaagtgtcgctatggactcatatccttcactgctagattgatcttgaacaacactcttgtccatgtgctcgggcactaatccttggtccttgatcgtagaactcattgagcgacatatatacaaatacagaagcaataattaaatacatattggcacatattaacgtaagctacaatcaaattcatcttaacaaatagtatagttgaatacatcctcgcggggacttaacccttaacccctaacctaaccca

SEQ ID NO: 55456 - DNA, 1292 bp, Arabidopsis thaliana landsberg
cctatgtttggtaagaaactacaaacacggaaacaccaatcattcagtattgttttggtctccgtcgaccaaaagagagaaacatgagttttaaatatgaaactaaaacgccaatattgaaggaacacaatgacattcacagatggtattttcttatattctgaattccatacatgtatgatattttaataaacaattctttaaactgactattatttcggctttagactaagttataaagtaaagatattgtgggacaaaccaaaccaaacaaagataggtttatgctcaatagagcatgagcttattaaaatagataaaaatgagactgaattgaaatagcttattaaagctttatagtttgggcttgttgaaatggcttgtgttaagaatcctctaatagatataacttgttggctgattttatttaatgttttccatcattttagagtaatgatttagtaaagaagtactacagtttataaaacataatccataagcataggcttagggattttagtatatatatatatatatatagaagtaataaattctataacataagatgaagtgtcactcccagttacatctcaatctattagtatgtctaaatacacatttaaccaacaaaactccatctgctcttctcagcccaaaactctccaccaacacataacacccaaatctcctccaatttctatcattgttaccattcatattcctaccatctcttctacaaaccctgattggttcatctctctccaccctcaccactttccttcctcctcccacccaccctgcttactccattacccttctcatcctttctaccaccacaaaactcagtcccaccggagaccttaaacccgtcttgctcctcctctcccccggaccccgcggaccttgaacctgcctataccaataaaaccctccatgccctcatttgtctcccttagccgcctccatacccttcacataggtggcctatctaacgacgttagcctctactctcacaacttgttcttcgttttcatcattggcctcatcatgatcattggtgacagaatggtaaattcgcccccagcatagggatagcgcgatcctatggaacattgactagctcatttgttgacttacactacaattctgctgcacaaacattacagggggataccattctccaactatcacacttactgaccgacttgtagaaacgggcaatccacatgctgggagacgagctcttagctcctcgtctaggccaagagctactctaggtctgctacgatgca

SEQ ID NO: 55457 - DNA, 730 bp, Arabidopsis thaliana landsberg
caatcggaggttggacaaataggaaaattgtgtaagtagtaaactgtaatagactatttcaatttatgtgtaatatcttcgaaaacaaaaatacaatttagaagtcttgtgttgtgtatgatccctttcttgtgcaagtttaagtggggttattaaatatcgtctcacatcatcgaggttttggttatgctgcagagggctaatatctatgaagcctttccctagctgggataaacaatgcagcacttttcatagaatttactgatttgacattaaacttttcttcacgtgcagcgattattttggcctctatgcagatgcttgttttgccaattttggtgatagagtgaaacactggatcacattaaatgaaccacttcagacctcggtgaatggacactgtattggtatatttgcacctggaagaaatgagaagcccttgatcgaaccatatttggtctcacatcatcaggttctggcccatgcaactgctgtttccatatatagaagcaagtacaaggtatgatagctttttattgtggttctgcaacctaattttgttttatattacttggacctttggctatcggaagatgtctcaaaggttctgttgtttacatctggtacctttatcaatgcatctcaattgcttgttatttaccagtgtgcgtttgggtttacatatattaatctaggaaagtcaaggtggacaaatcggtttgtcagttga

SEQ ID NO: 55458 - DNA, 597 bp, Arabidopsis thaliana landsberg
ctgggtctcggttatatccaccattttctggatcaacttatcaaaatgtgtcattgcctaaaacatcacacgagatcaaggatatctgtaccaagacatcatttagtaccttgatagttcccatatctgccttgtttatagccatatccaccaccatatccactttgattatcatagccactatatccaccttgattatcatagccattataaccaccttgattgtcataatacccaccaccctgatgatagccaccttggttgtttccatatccaccatagccaccgtagccacctctaccccagccccttccacgcccacgccctcttcctcgaccccgtgcataagaatctaacagagcaacaattaagatgctagataatcaacaaaaataccacaatcagtgtgaataatcaccgccataccttcgtactctagctgctggaattgtgctggtggtctgcgtggttggcgctgtggtggtggcacctgctgttgccttggttgttcacatacactggagcttggtcctatataaagatattaatgttcaaccatttatatagtgccaagtcttttgtatacttataaagaaa

SEQ ID NO: 55459 - DNA, 941 bp, Arabidopsis thaliana landsberg
  unsure (1)..(941): unsure at all n locations
acatgtacctaaacaacttcatcaagagagttacatgtacttgtacttgtgcacaaggaccagtccgattattggccacttctcgtcagtgatgttccaatctcatatttctgtattattttttttcatttagtctgttttccatttctagatcagtaacaatgagaaccttgttttggttaaaatcacaattttctagtccagtttctattagatgagacgtttttcctgaagtttttttgatcgaatcaccttcctatgtttttctcacactaaaccacctgttacatctacttacatacatctgcatttgcatcaccaaaactctattcatcaatcattattgtggggaatattggtatttggtagctatttatagagactttacatatagtttactgtttttttttataaaactttaaattcgtctaacagaaatatattttgtatccatataaaaatcaaggcaaagttatcatttgtcatttaataacttaagaaattaagcccaacacaaaatggaatgataatattcgaaataatctcatcggaaaagaaaagaaaatatccaataaaaagaggccacgtacgtaaatagctccagtagcattcccgcctaaatgataaataagatattagaaagatttaaacattgaaaatcgactttttattttctccataaatcgaaaaccctaaatcctctctccccgtaccgtacgtcttcctcaaaccagcagcaacgttgctatggataacgatgacctcgcctccggctcctcttcaggttctaatctcttctcctctttttcatttcagcgtctccgctattatacacatgtactgacttctcgatgttgattacggatttgacaacgcctaatttctagnggtgttcagttctgatgtcttgattgactttactttctgaaatcatgaatcta

SEQ ID NO: 55460 - DNA, 576 bp, Arabidopsis thaliana landsberg
  unsure (1)..(576): unsure at all n locations
attttgaattatattatatattatttgtatttgttttgagcnnnnnnnnnnnnnnnnnnnnnnnnnnnnnnnnnnnnnnnnnnnnnnnnnnnnnnnnnnnnnnnnnnnnnnnnnnnnnnnnnnnnnnnnnnnnnnnnnnnnnnnnnnnnnnnnnnnnnnnnnnnnnnnnnnnnnnnnnnnnnnnnnnnnnnnnnnnnnnnnnnnnnnnnnnnnnnnnnnnnnnnnnnnnnnnnnnnnnnnnnnnnnnnnnnnnnnnnnnnnnnnnnnnnnnnnnnnnnnnnnnnnnnnnnnnnnnnnnnnnnnnnnnnnnnnnnnnnnnnnnnnnnnnnnnnnnnnnnnnnnnnnnnnnnnnnnnnnnnnnnnnnnnnnnnnnnnnnnnnnnnnnnnnnnnnnnnnnnnnnnnnnnnnnnnnnnnnnnnnnnnnnnnnnnnnnnnnnnnnnnnnnnnnnnnnnnnnnnnnnnnnnnnnnnnnnnnnnnnnnnnnnnnnnnnnnnnnnnnnnnnnnnnnnnnnnnnnnnnnnnngggggttcgttttttaaaccaatatcctttttcctaccttataaacatattaa

SEQ ID NO: 55461 - DNA, 583 bp, Arabidopsis thaliana landsberg
ttgagaaaaacagattaaagaaaagggaaaaaagatgaaattgaaaaattcgtttttctcaaatttcaataaaaagaaagatacatttctctcttcacacttcactcttctctttcccgcctctccgccatggctgctaaacctcttcttcttcctcttctcctccttcttcatctctcaatcaccttagctcaaaacgacacaaatgctctcacactcttccgtctccaaaccgacacacacggcaacctcgccggaaactggaccggctccgacgcttgtacctcctcatggcaaggcgtttcttgctcaccatcttcacaccgcgtcactgaactatctctcccttccctctccttacgaggaccattaacctctctctcctccttagaccaacttcgtcttcttgacctccacgataacagactcaacggcaccgtttcagcactcacaaactgtaacaacctcagactcgtttatctcgccggtaacgatctctccggtgagattctaaagagatatcttgctacacggatgatagtcttgatctcctgatacaataccgtggagtatacacgagaga

SEQ ID NO: 55462 - DNA, 387 bp, Arabidopsis thaliana landsberg
gttacaacataggctctacgccttccttggtctgtgcactctagcccaattccggggtcacactcatgggcaccacctgctgttgtctctgatggccccccgacgcacccagatctgtcactctcccaatgagtctgtgaacgaaatggagattgtcgaactgtgcatagagtcccgtccactgaacgggcggaggtaatcattgtctccttgatgacctccttgagtcaccagctggcacgcctaccccctatgcgggttagcacaactgccttcgctatttgggttaagcactgagcggaccctctgtgtatcaagcatctagcagcgcggatcctgcagaggagaccaggccgctgctgccgcatactctagtataacgaaccc

SEQ ID NO: 55463 - DNA, 486 bp, Arabidopsis thaliana landsberg
atgttttaaactatgacccgaattcatctcaagttcatgttttttctaaacccggttttacaaatccgttgacgtatgtataagtctacattaattattaacaaatttgctaaaagtaattagtaaagtagtttggttgttcaatagttatcacggattggtgtttgaattctcttactatagtttagattttttttcactgcgattcctttgtggccgaaaacataaaaatgtttggttattcatgttgctccaaaaaaaaaaaaaaaaagtttggttattcgtagctttttgaaatcaagtatgggttttgattcgagattgctcagttatcagttttctgaaaaatgttggatccgattagtaatacaaaatgatacaaaaagaattagcgggtaaagaaaacgttaattgatactaaaatattcaaaacggtccaaaataattggaatagaaagcaatgcgaaaaaaactgggaataacgtt

SEQ ID NO: 55464 - DNA, 1042 bp, Arabidopsis thaliana landsberg
aacacgactagtaggaatacttgaaacattgtaactaaaacgagtcattatctcatcaggaacatctctcactattttcacataaccttcaaggcttgatatgaagtgatcttcgtcatagatatcaccaaagttgctgccacaaatatgcattttcttagtccaatatcttaacaagacttgaaaaggtaatgaaaattttaatggcttcttaccttgaatccttccaaatagcgtgaaactcaaaccgcggtatgactaaaactgcgttaagaagcccggctacagccacagcattgcaaatctgaagcaatacaaaaaaactttaggatatgttttgacttatattgctttaagcaaagaaatcaataagggaacaagatgatgataccgcagaacgctgctgattaagaccgccatttgcttccacgattaagtaaccactactaggagcaagagcagatgattctgaaaatatttcatcaaacacattaatacctaaaatcatatgaacaatccaagaaactgggaagccatagaattcaaatagttcagtatcagacacaatcttacctctgttcagaccaaaatgtgatgaaactgttgaattaggacaaggttttggcatctttggtcttcttttgaatttccagacagaagacaactgaaaccaaacatcaagaagcttaaacaattgacataacaatagaaactttactacaaaactgaggaagaagagaaggcaacgaacctcaagggcggttgaattgtcggagaaaatgtcatctttaagtttccggtaaatctcggggctccgataaacagaaccgggaacataaacccatccgacaagaccagagaaaggaccaacacacatgagaagcccagaagcgtaaatcataggaaggagaagcaagtaacgaagatttctccggagagagaaagaagaagctctgagtaaagtttgccgccgttgacgacggaggacacggcggtttggagataaaggggggctttggggactcactttcgggcagccatt

SEQ ID NO: 55465 - DNA, 1047 bp, Arabidopsis thaliana landsberg
caggatattagataaaagacaaactgacctccatgatcaggaaacttttttaatatggcatcagctgccttgagtcccttcttgtactgcttagtctcatatgatttctgcattataagattactcagaataactatatatgaagtacttacttgcgaaaattacataaagaaaaaggtcaactattcaaagcaggttgaacaatataatggttaaacccaaaatctatgctgaaaccatatatatattgataaagcttggttttcaagttcttcaaagcaaactacgaatccctgagcgactaaaaaagcccagaagcaatcgaggtctaataatagccgatagtcaaaagtaactgaagctaagaacttggtacatcaaattaacacattaaggaaccacaactccgcacagtttacttcatatgtcaacgaatttttctattgacccaacacattgacgattaacttaatttagggtttaatagagcagataaaactcatcgtattccaatttatgctgaccaggaacatcacatcgcatgtttaagacaaagtaaaaactgagaaagaaagagagggaatcggaacatacgacgatgagcttgaagaggttggcctccttaggaggaagcgaagcccccattttattgcgctactgagagagctcgcgaacacgaagacggagaagaagaagaagaagatgttcttcgcgagttcgatagggtgagagagagatagaggtggcgtactatccgcttcaaccctactgcgaaacaaagaaaggcacaactctcacaagacaaaacccaataagggtataaataaattagggtcttgtcttcaatcaatcttcttcgatcctaaccatatcggtacatgtttccggtttcaattcgtttgtctgatattacaaaacggttattaaattggatagaaccaaaccggttcaaaactggagacatctgaacctaattgaccaaatcaaatttgtattaaccgatcaaattcatcgtcaatcgacactaaaaagtatcaaatcaaaccg

SEQ ID NO: 55466 - DNA, 529 bp, Arabidopsis thaliana landsberg
ctgttagagatagcaagctgattccaccttggtccactatcagttgttgactcacttctgttaccccgtaaaaaaactaaacacatgagcatgtacctccccaccaagtgaccaaaagccatataattagtctgtttctgcttccattgtctgtctaaccactaaatactagttagtagcaatgagagtttaccgttcattgcgagattggcgatcgcaccagcggcaactcttcgcacagtttcatcttcgtagcttctgagaagcattagcaacgatgtcaggcctccagcttcaacgatcttttcttgatttgcctctgtgtatcaaccccaaaaagaaaaagggaatacagttagaacccagagtgaaaaaaactatggttgaacctttgagatgatgcatatatgatagttaccttcagctgcaagattggccacaactttcacagcatgaattctgatgtttgcatgatctgactcaagcaattgcaagatcttttgcagtcccactgtttcaaagaggatat

SEQ ID NO: 55467 - DNA, 593 bp, Arabidopsis thaliana landsberg
gtttttttatcacatatccaaaaagacattgtagttttgaagctgaatttgaatcttccaacatgtaatatgcatattaaaaaaaaaaaaaaaaacagcttcagccagaaaaaaggtcacattttttcatttttggaggtggtctctccttttagcctccgaacgtatacctcactcgctacagttgcgcgtagacgaataataaatagaaaccatatccactgaaaaataaagaacaaacagtgacgtaaaagctagaattcaatgtaatgcaccgcacgaaacctctcacttatccaccgttagatcttagtcaaaagtcaacaaaacacaaatccaacgattctgtttttgtatccgtgtaagttaatcacacggtagtttttgatgaaaagacaacaatcggagaacaatctggtctgctgctaaaatttaataaattgttttgtctaattgtctccactcataaaaaagcgcgaattcaattcaccgactaaagacattctccggtggagccccgatgcaatccctcatataagcggcggaagtagcggtggtggtggtggaggaggaggagaggtgagtcgaagtgg

SEQ ID NO: 55468 - DNA, 136 bp, Arabidopsis thaliana landsberg
gcagatcctgatctgagaggtgtgtcggcagtgcataggactgacacactcggcaggtgcgaagaactctattggtgttgggatcagtgggcgtccactggaaagcttgtcgataggtgtttccaactagggctcg

SEQ ID NO: 55469 - DNA, 407 bp, Arabidopsis thaliana landsberg
  unsure (1)..(407): unsure at all n locations
acaggctgataaggagcaggctgagaaggaacaagctgagaaggagcaggctgagaaagagcaggctgagaaggagcaggctgagaaggagcatgctaagaagaaggagcatgctgagaaggagaaggctgagaaggagctggctgagaagttggctgactgagaagaattatctcgctgatctggaactcatcgagcaggagctcactgagtaggcgctgtctgctgcgtccgaacatgccgtcgacgagcaggctgcgnnnnnnnnnnnnnnnnnnnnnnnnnnnnnnnnnnnnnnnnnngctcatgaacgtgctgcatgtgagcccggcgatagcactcgtattacgtacctgagcaaaacgtgtaagagatgtgtagaagctcccggtgaagaagttgcaggc

SEQ ID NO: 55470 - DNA, 687 bp, Arabidopsis thaliana landsberg
acttgttccaagccgtatcctatcaaaacactgcaagtctctctctctttcaagccttgtcggtggttgaatcgaaagctatgtctcaggtatttttcatcagtgttgattctgttctttgaattctcaatttctcgatctggggtcattataaagattgttctggatctaggtcttatcttattgaattccttcttcttctctattccatcgatctaaatatgatatatcaattgatctgtggttcaaaagcattttcagaaacacagatcttgaatctaaaaagggtttggtgtcttgtgtttggttttcagatgatctttagttagtgtttcaaatggttttggtagatcacttttgttaagttgaatctgattcttagctatatgattgtcttgttcgtttgatctataagttgcacagaagttaagcttatgggttacttatgtttatatatcgtttagaccgttgttctcagagtggccatgacatgtgagggatgtgttggagctgtgaaaagagttcttgggaaaatggaaggttagtttttttttcttcttattttggctattgatgtaatgatctgtctcaaaatgctttgaacccatttgtcttacggtaaacatatagattcatcggaaaagattgtcgattctcgcggaatctgcaatggtttctatcttttct

SEQ ID NO: 55471 - DNA, 876 bp, Arabidopsis thaliana landsberg
  unsure (1)..(876): unsure at all n locations
aatctgcaatgttttctatcttttctaaagcatggacatcactctcctcactcggtttttggtttcaggcgtggagtcatttgacgttgatataaaggagcagaaagtgacggtgaaaggcaacgtgnnnnnnnnnnnnnnnnnacagaccgtgacgaaaaccggaaagaaaacggctttttgggaaactgagggtgaaactgctaaggcttaaggagaagcagagcattttatgtgattctctgttttaataaagatctatgtggaatcgttttatctgtttcttgtgacttgtggctgagtgtattggaactatacatgatacaacacacttttgagtgaataaatatgcactcgggcttaatcgggtctgataaagcacgagcctataactaaaaaggatgcagtttttatgtcatggtttcaaaatcaagccatcttctggactatggggattatgcacctattgtctaatgtagctgcaagaggtttcacttggtatgtcagaaacaggcttagaagaattttaccgtataaacgagcagccagcttagttcctttacaaaagcattttatatgataaatccaattaggcttatggcaaccttttctttgggcttgctaaattgtgttttcactagctagaggcttagaggatgagatgaccaaagaccaaagtcaaaacaattcatgttctttggaagagttccaagaagaaattgatccaatcattattttaattagctaaagaatcttcctattcactacaaagttccaacataagacaaatccttggatgcagttggatctttctcaaaagaaccagcctttgaaacgtttggatgttttaagagaaagcaaagcttttatttttat

SEQ ID NO: 55472 - DNA, 1173 bp, Arabidopsis thaliana landsberg
catctacgaggttctagaaatcacgtttttgctttttgtaaaacctctttcgactcttcttttatggttaggagaatatctacttgtcgttcctatattcttgcaactgatatttttttaaaaatcttcagcttccggaaccattcagtttcattttcacatggttcgctgcggtgcctgcaattgtatatctggcgctatcactcaccaaactgatcctcaaagacttcctgatcttgaaggtaaaacattaatcatctttcaagatcagttcatgaagtggaaaaataaaaagttatagaactaaatcttgttttctcagtatgaaaaatgcttaaacaagagattacacttgagataataatctattgtgcgcttagtatagggccaaatcctacaagttgtatgcgattattatgaaaagcttttaattttcgtggaacctatctttcacaggggccttgcccaaactgtggaacagagaatgtatccttctttggaacgatattatccatccccaatgatagtaacaccaacaatgtcaagtgttcagggtgagcttgtcagctgtagactcgagtcgatcacaaaaattgtctacaacatttcttgaagtcttatgattcttctggtttttagctgtggaacggagatggtctatgactcaggttctcgtttgatcacattaccagaaggagggaaagcttaaatctaagagccaaggtttaattcttatcttaactttgatttctgatgaaatctttctagattcaatggaaaattcaagattctaggtttttctttttctcagggaaatgtggaagtgtatgtaaaattaatactaacaaatgaagaaggtggagaaattgaagaagaagaaggagaaaaagcaaaagagtgagtttgtgtgctgttttgtataatcttcatatcttttcatgtagctctcatagtcattggcttgtgttgtgtttgtaagtaagtgtgaggcacattgaaagaaaaacagcatatgattacttccttgagaaactttgctctcattaggaaagtaaaataattcaagaaataagcacatttttgttataattcttgaatgtgttccataattttgcatagaaaatatagtttgtttatccatgtgaaaatcaaatatgatgttctaatcattta

SEQ ID NO: 55473 - DNA, 1278 bp, Arabidopsis thaliana landsberg
cgccgaaccacatgattggagttatagaaagaatagtgacctgccaacaaaaacagtacgattaactcggcatttttaattcatcgacatggtcaacattgtcacgcttcacttcattatcacagtatggaatacagcgccagtaatcataataatatttttttaaaacaatgtgctcagtttgataactactctgacgaagcatcaaacgaacagacaaaaaacattggaacccccgaaactatgatccaaattccaaaacctaaaacttagagagagcaattgttaaaagagttttgtccctcttatacacttggcaggtcttaaacaagaagttgactcaagtcaagattcactacgagcacgtaactattaaaagtttaagaaatgccaatagggagatagttttagtacaagagttttactatccgaaggtcacatttctacgatcccaacaaaacagcgatgagaagaacaataccgacacaaaacatttgaacactaacttcccacataacataatgagcagccaaaatgtcataacacatcaaaatggacaataagattattaaaacgaagcatagcttctttaacaaaagacaaacagacaagagaaaggtcgacaatttcttcaccatcatcctcataacttattgttgtaccagtacacacctttcttgtcaccttccctgtccggttctacatagatacactcctttgcctccctatacatcgctacataccacggtgttccatcgaactggtaatagtctcccagaattggctttatcgcctttgtagcttccattgcgttataatgcggcattgtcgagaacaggtgatgagccacgtgtgtgtctgtaatgttgtggaacaccttgttcaagattccgtagtctctgtctacggtagccaaagctcccctgagccagtcccactctgatgaatcgtagtgaggcaacgagggatgagtgtgctgcaagtaagtgatcaagacgaggaacgcattcactatcagaagcggtactccgtagaggcagatcatcgaggccatcccttgtgcagcagcgtaacggtaaagaccaaaacagacggctagaatacccgcatcagagaggtatatctggaggcgttctcggtcattgtagatgggagcgttggggaagaaatggcaagcgaacccgtcatacggtctgccagagtcgttaaaggctaagtacaagggccacccgaggacaaactggacggttaacgtcatgccgcgtaaccagaggcttt

SEQ ID NO: 55474 - DNA, 855 bp, Arabidopsis thaliana landsberg
tagaggcgatatgaattctgagaggcacatttcgcatgtcaatgctactctgcgccgtctctcttctcttctcctctgcttttactggagtgcgctagtttaagcttcaaggacgaaggagatgaagaagaagagataaataaatagttaaaaatgtttctgttttttctttttttttttactgcaaaaaaatctacagataaaagtgagagagagaggggagtgtaacatttgtatttatagtagttgaatataattattttaaagtgtgttttaaatatatattttttgataattaaatgtggattatttaagcaaaagttgatacgtgaaagtaaagatgatcaatttatgattgtgaagagcaaatttcattgtcgtcatttgaggctggtgatgattctatttcaagttattttctgttacttatcagtcttacataagattttgtacaatgtgtatttacattcgaattcctattagatgtcacttacataaaaaaacttggttaggtattctgctctaaaaaagataaccatgtttagattactttttatggcgcatgtttaagcagtttaaattttaggatagtgagtatataataacgaaaatggatgataatatagaagaagcttcaccgaaacgtcgacccaacctaaccaaacaccgaccacatttcgtgcccgataaatgatctaacatgataccctatataatagtattaaacatatcttctttttgctgattaaatataatattattacttttggggggtcgaataatgctttctataactaccgttagctaccaaactcgagtgtttgctgattagagagagcaacattttgataaaca

SEQ ID NO: 55475 - DNA, 1106 bp, Arabidopsis thaliana landsberg
tctaagtgtcgaaatttgcagatactgagtgtatgcttattgtatgaaatgagcaaggagaagaagtctttctggtatccatacttggtccatatacctcgtgactatgatctcttggccacatttggggaattcgagaagcaagctttacaagttctgtgtttactactactattacacttttgtgttttattttgattttgaataggttagatctcatgtttttggattgagatcatgttcctttcttttctgttgatttcaagtctaaaagatgggatttttttcatgtccttaggttgaagatgctgtttgggctacagaaaaagccatagccaagtgtcagtctgagtggaaggaagctggttcgttgatgaaggagttagagcttaagcctaagtttcggagtttccaagcatggctatgggcttctgcaacggtaagaacacttcactttatcacacgaaagttgctcgagaaatcgatgatggttgattagaaagctttgtgtaaacttacagctacaaactctacttctgtttgaagatatcttcaaggacactgcatgtaccatgggatagtgctggttgtttgtgtcctgtaggggacttgttcaactacgatgctcctggagattattcgaataccccagaaggtcctgagagtgctaataatgtagaggaagcaggacttgttgttgagacacactctgaaaggctcacagatggtggattcgaggaagatgtcaatgcttactgtctttatgcaagaaggaattatcacctaggagaacaggtacaagtcctcaactagcttttgttacagctgcaaaaactaatgaaatggaggcacaacgtagtaaagatactgaatggtgaggattgtatttgtgggtgtaggttcttctatgttatgggacttacacgaatctagagctgctcgaacactatgggtttatgttagaagagaactcaaatgacaaggtcttcattcctctagaaaacagccttttttctctagcttcttcatggcctaaagattctttatacattcatcaagacggtaatccgtcttttgcacttatatcgacgttgagactgtggcag

SEQ ID NO: 55476 - DNA, 1081 bp, Arabidopsis thaliana landsberg
agccagaattgccgattctaagtatgtaacaacaaataagcaatcaaaaatatcagaaaatcccagtctttgtcttttaatatcctttggtagaatgctaactaagagaaccataattcataatcaggagacagggactagttataactagggtcaaacaaagggctaaagattagggaacgagggctaaagattccaacattttcacgaaagagtataaactaatttcaccattacgaacatgtcacacaattccctagatattctgtaaacatcacaggaacgaattcgaatccgtactggatagaaatccccaatgcgttcactaaaactgtaaattttcgtcattatcacattaagaagcgattttattcactgaccttagattggttagcctctgaaaactcccatggaagatcgggtttgttatcaggagaatccagatgctataagtaatcaaaacaacaacaacaacaaaaatcaaattacaattaatttcggataaaattagacaaaattgaagcatagatcagatagaatatccaacactcacgtagtttaaggccgtcgataagctacgagtcacctgtagatagaaatgaccaaaacggagaatgagatcgggaaacgaccggagagaagctgagaggaagcaaggaattagagaatacctgagaggttggttgacggaaaacttgacggatctcgagaagacgcttcgcagcgagcctagccagcattttcgacaatttagaggacgagagacgcacacgaaggttttttttgatctgagggagaaggagaagcagagaaaccaaggagctagactcggtatctcactatcacctggcgcaggattgactatagcctctatgggcctgctaaaataagcctgactttaattcattattggtctattacttttggtttaggactgatacatacgagtagctttaaaggcccattttattaattaaaggcccatacatgtaatacttgaagcccgttgggaattgctgattcttataatttgcacatctgctcgcaactttttcatcatagggcaatggcatgattcttt

SEQ ID NO: 55477 - DNA, 639 bp, Arabidopsis thaliana landsberg
tcttctaaacattgaccaaattaagctcaataggatcacatagatccagcgagaaggaaatgcaatagcaaagttgagctaacctgtgaagcagcgattctaagaaaagctctacgaacacgagaatcgacagcctccgatactcgcatttggatccgcataagctcaccgacagtagtaggacgtttcgacttaccattagaacccgaagcagaaccagaactcttattagatccaggtgaaagcgaagaagacgaccttaaccccaaagctttcttcattttactagcggcggttgaggtcagagaacgctgaatcgccggcgaagcaggagagccattgggagaatcctgattcaaaacagcgactgaaacagccgatgagagaggtttaccggtggcgctacgacatgcggcgacgaagatctcgtaagcagtgagacggagatcggaatcggaaagttggacagcgagttgtccgagtggtgatggaggtagatcgcaagacattgaagaagaacgtggagtcgccgaatgtgacggcggcggcggcgtagactctctcttggagtggcccagagacagctccctgaagagatgagccattatttgcgtgtgagagcagcgaaagagagagaga

SEQ ID NO: 55478 - DNA, 1468 bp, Arabidopsis thaliana landsberg
agcatatctcgcagatttttctattgagttgtatttttgtttccatgagcttatggcagggtttgctggttacatgtgcctacacaacattcttcctaacacatgttagcttcctcttttaccacgttgcatcgaacattactcttcggaggctacgccattccactgctgatttaccagattctctgaaatggtgttttgaggctgcatggatacttgcgctttcttatttcattgcatacttgtagactattgctatcgcaaatgtacgttgtgatgtttacatttctttgataatttcctataaaaagagctctctacttggtgttttatcatatatcacaaattcctcttatagtctgcttaaagactacgtttatctacttaatcattctagaatcttgtttagaaactagtcacttgacaataaccgctcatatgttctgtttttgttttcaaacttgtgcagtttccttactatgagtttgtggaccgaagtgccatgtacagagttggatgtcttttctatgccatttacttcattgtgagcttcccaatgttcttcaggtaaagaaaagcctcaaaccatagttttctatcatctcatagaagcagtgagtcttctcaccgtcatgactgttgcatatcaaaactgagacaggtgatagttgttagatacaccggattaaatgattgcattttcgtgagagtcttaaaatataggaattaaagacttaaatggagaaccaggtctttctcaagtgtgttgaggagttctttgaacagtctctgtgatatgcttccgtctcaccttcttattgctatttgattacctcgagtgttgtctatctgttttcatatgttttattcattgtttgcaggatggatgagaaatcaactgatgaatgggatttatctcgagtggctgttgatgctttgggtgctgctatgttggtaacaatcattcttgatctatggcgtctcttcttgggacctatagttcccttaccggagggacaaaactgccttcagtctggattaccatggttctccaattgaagattgaaagatcggttacttccaccaattcagggaattgacatgggactgagagagaaacctgcaaaggaatttccattaacactttacggaattgggaagcagttaatgcagggcatgtttctaaggcttttcttctccaactgctgatttgtttgttagttgtttttggttttcagtttctcttgatgaactttcccaatgtaacctttcaagttatcctttatagaacagaatggaacttcgttttttgttgtgggactcgatatattggttcgtcctcttaagttccattaaaaccaagaaagaacctttaccccccttggaaaggaacccaaaaacttggatttttaaaatggtaaaaagtcttaatccacattgaaagtatgcttaaaggggctttaccttt

SEQ ID NO: 55479 - DNA, 308 bp, Arabidopsis thaliana landsberg
ttctaccgcgacacatatgtgcgtaggtagttctgcctataccgtatcacataatatgttttctatctgagtgactataagggtgactactccaaggcccaagactgcacgagtgagaatcggggatgccagatccatcacatttgtagactcaactcatccactgacttgaggcatcccttatgtcgcatcgattacgctctggcgacggtcattgttctcacataatccctggatgagttctattcaatgccacactatgtcagctgggcgctccatcacactcttaattctacttcatcattaac

SEQ ID NO: 55480 - DNA, 1258 bp, Arabidopsis thaliana landsberg
aagagtgttgcttaaaatctaacaaactttttacccctcttagaatcgtctttttggtttccttatgatatgaactttgatttactgtgaaaaaggtaaagtagatcaacgtaactttttttttttgaagaacacaaaaatccaaaaaccataaaaacttgctcttgtattgagattgcctgcattggctgaaattatcctcacgtcataattagatatgatgattataagtacgtaaagatcttttatttattcactatacagaatcttcatgttcaataaccccaagaacaattaagtacaatatgataaatctaccataaaataaataagctgcttagtaaaactaaactaactgatgaaacttaatatctagagacattaattgattcggaagtaaatgagataggtagtgacatcagaagctccaattggttggatgatgagcatctccaggagcgtcaaattcacaaggaaaaggaatcagattggacattgcttcgtgaagccatccgtcatcgtgttccatctgctttaaattgggatgcattggttaattagatttacaaattacaagtaatgatggcatataataatatactagtgtcttggaataattaaataaatacctggattagatagtcgtctgatcctgaaaacatatcttcctctttttcagaatggttgttgtgattcttagacatgtgaggttgttcttcacatgtgtcattgtttctagcaaatcggccgcgaacacgaacacgcctgtcggctagggttttacgacacacatactgcatacacacataatcatttgaaaacattcaaaaatgaatatgtaattaactaaactaaataagaatgagtgtagtatgtatatgtatacgtaccttgatggtcttattgaagttgcgttggttcttcttcttcaagtacctcatgattctgtctttacgttcctccaccgaatagcgtcccacttttgtatttggctcagcttgtatccctccttcactatttccctgcttcacacaaaatatttattttatttcgtttcttgcatgcgtatatattaaatgtctctcatattaactataagattttcaaacgtgaatatatacgtacccaagattgctctcctgtggccggacggaacaagggcttgatctccggtgaacagccgtagtattcttgatgatctccaaaatgaaagtaatgtgtggcattattcacactcattttctggtaatagttgttg

SEQ ID NO: 55481 - DNA, 123 bp, Arabidopsis thaliana landsberg
ggttgttatcacgtcacagattgggctttagacgtaacaccttgcggtttgtttacggcatatttcttttgcgctcgtgggactctgtaatggtgactctgagcgcccgcactatctctaccg

SEQ ID NO: 55482 - DNA, 263 bp, Arabidopsis thaliana landsberg
ttttagtttataggatgtcgaaaaacgtatatcgctattaattataattctcttatatttaaaactcttaacaaaaccttatcttatcttatctttttgcagttgtccgtgcttaaaatcagatatcgccattttgctatgccaaagaaaagttggaaccgggccggtttacgactttgatgggccttctagaattgtatttttcgttttttggggccttatattatgttgcttaatcggcagttaaccgatcataacataga

SEQ ID NO: 55483 - DNA, 605 bp, Arabidopsis thaliana landsberg
gggcattataactttctatcagtgtgttttcagccatgtgttgctatagcaagttgttagagggcaggatggagagcggtttttgttaatatacatttttcccgtttttacttcaaatcgagagaaaattctgctccaagtcgagttgtcagtctgggaaaatgctgaatcttattcagttagtaaaagccatgattcaacattttcaccccactttgaggcacaataattcgtaatctgtgagctttcgaccttgagttgctgcagcactttcttagagctatattttgtgagaaaattttgttaacaaaagccagcatgtattacatggaatcgtgaggatcaaaggggttaaggatggggatttagttgtttagtgctgaattcagtttcggtgactgaaaacttggtttagttttgggagcagagagctctccacgttgtagttatgctccccatgtgtcagtaatttaaagttgtggttagagatgggaagagctggtagttggaagagagttcaccaatccactagctgggtgtggggctgaacatgcttcagtttggaagagtgttcactaaccactaacttgtgtgctcatgtgcat

SEQ ID NO: 55484 - DNA, 540 bp, Arabidopsis thaliana landsberg
ggggtatgcaatcgagaaaatagacgatgaggaacataggaaactcaagtcgtgtaagggtttcagaggagcattgttaaaatcgccgaagacgatgaacattgatcgagaaaatgtaaattaggttttttatactggatttggaaaactgtaaagtcgacggagagatgaaggtaaattggtgagagtcaactgcatttggtttaggaaaaatgggtttggtttgatttacagatcaaaatcggttttaaggtacaatagtaaatttgagaatgcaacgcgtctggtcctttttaaatgctgtaacacgttaaatgttttaaaaaagtgtcttagagggcaatattctttaaatacgaaatacttgagtataaataataggaacaattacgctctaacatactttttaaactttatttacatttttccacactctcaacttttgaaatttcttacccttctgttattacccctatatacccaactaaagaccatacccctctctctttctctctctatctctagaaaccatgtcatatg

SEQ ID NO: 55485 - DNA, 632 bp, Arabidopsis thaliana landsberg
catttaaccttgtttttcctttgtgagccgcctatgtaaatccacgatctttaggcaaatttgaatcaatcatcgctccagttctctaacttagtcggaccatgcaaaatcgggtttgctcaaaccggatgttgatgtgggtgccacgatggagtcacttgggtcctagaactttgtcctctgactttgattagtatgctccaacgtggcatgtcacatcgacatcgtgtttgagcaaacccggttttggacggttttgtataggacgactaagttagaggacacattttgctgattttctgagctataggacccatgtaacacactgtacaaagttcaaggaatgctactgcattttactcaaaatcgagaagcgttttaaggtgctaaattagctcttacggccataaatacatgaccatatatcattgggtaaaatctaaatgttagaaaaaatgtatgtttaagctccgataaaaaaagataaatctctcaatttctaaattataggaggctttagctctcttaattgtttttacaatcttacagagaagatcaaaaacatgtttaaattaaaattagtttcattgaattgtctacatagaggctagtgggtttttttctcggaggag

SEQ ID NO: 55486 - DNA, 1427 bp, Arabidopsis thaliana landsberg
gttcacatttcaattcaatcgactgattaatttttatattataatacgaaagacaaaaaacatgcttttattgcatgtgtctggacgataggtgaacaatgaaaggtcccgttacatgcttcgtatcaaataacattaataaatgtgggtctgtcactctgtattttttatatcaaactcaaaaacacgatacataacataacataagttttaaattaaatgtagtctatagattgatgttctagatatcatcttaccaattactgagttcccaatgttttagttctcgatattgattaatgatgttctagatatttgcctatataaacatatttttcgaaagaaaatcacagtcctaatgttaaaaaaaaaaaaacaaatacatcattaattatctttcacgaaaacaacgtctataaatgttttggaaattctttcaaccccaattttttgcgtttaatattatgtatctagaattttagttttaggggaaaatttaaattttgatgtaattactaaagtccattactaaatccctaaattacaattagcaaccaaacttaaacaataattacatgtaaaaaactaatgaagagaaaaacacaaatagttataaaaaaaaaagaaacgaagaagaaacagtaaagacagagcactaaccaattacctaggaaacgcacgttcactttcacacgcttcctcacacactcacacacacacactcttctctctcttcttcttcctcctctgtactctctctttctcacataaccagagcctctctctctctctctctctttgcttcttttaatctctctgtttctcttcagtctctgtgtatacccctttctctcctcctctgtccctctctctagcggcggactgatgcacatacctttgtattctccgccgtaactaacttacataatggggtgcatggtctctcacctcgtcggcaaattcgccttcttcccaccctctcctgccacttaccacctcaccaaaacccccgacggcaaactctccgccgtatcctccgcttactcctcctcctccacttttccctccgccggagacccatctctcgacgtcaaagtagtaaagacaagacgcggcaacaaagtcacagctttttaccttagaaaccctaacgcaagactcacacttctctactctcatggaaatgctgcagatttgggacaactcttcgatctctttgttcaactcaaagtcaatctccgagtcaatctcatggggtctctctctttctcgctcagatgttcataactcctaatacgtcgccgtttcgtatttagcatttatcttactttataaattgcttattgagatttcttgaaaatgattgttttaatgcttattggatcgttacccagattatcaagactatattaaattagcagatttgt

SEQ ID NO: 55487 - DNA, 319 bp, Arabidopsis thaliana landsberg
aagagacctaactgagcaaactatagagagagagcgaggaccaacaagagggagagaaccagggaaaacagtgcaagagatcagaacgctgacaggccgataaatcacatgaagcaggacgaaaatgatcagcaatcgtcgaaaaatagcaaaaaccatctacaggaggtacagaaaacggccccgatgtgtccagatgagtcaagtgaaacggaccatgacgcacgtgatctggcaatggaaaaggcaaatgttacggttcagcacgaggacagacatgacgatgataagatgcacaattgatgggctgcacagacaa

SEQ ID NO: 55488 - DNA, 571 bp, Arabidopsis thaliana landsberg
tcgatacgtgggcacgtggcgcgaccgcggactcgtctcgatgctgaatgctgtgctcatcgcctcattgtgagtctatggctctgtgcagttctgcggagactaagctcgggatcgcgtctgggtgtggaggaggaggagggtgttttggaaaggcaggtgtctcgatttttggttggttcatgccttggtggtatgctgtgatgctgagctttatctgatccaaacaaatttcgtggtgccacaggtgcagggatttgatgccttgcggtcttgcggagtaccacgacgaaagttcagagcgggaaggcggggagaagtgtgataaaggtatctcatcacaccagctccagggcctatagagcactcttatttcatatgacagttagaccactgcgttcatgatatcgtgttgcttgacattatcatggccattttcaagtgatgcgttggtactgtgcaagtaaaattttgttgtatgcaaatgtgctctgtatttataagctgtattctgacacattttgctcttccgaaatcgaattttgcttctgaacttagtatgcattgtttg

SEQ ID NO: 55489 - DNA, 550 bp, Arabidopsis thaliana landsberg
gttccccggcggacccagcggcatggcgcctccccagacaaggccgtggcatccggcagcggagggccgctcacgctccacactggtggtggggtcgcacatatcctggcagcggagggttcttgcctcgtgctcctcagcacaatggagatggatggtcaatatacacctattagctagaggatccaaacagccctagctaaactttagctggtcatattagttggctaaagttttttttctcgaaatgcgcaggagaactgcacctcattatattaagaagaaaaggtaaccagggtctaaagaaggcccgatacaaaaaaaaaaccttacgagggccagaagcacgcatacagaaaggaatccatctaggaaaacataacccacacactacacactagggaagtccctaggactcagctaagggggctgccagataagaaatgtcttttgccccgctatttcccaccgatgcatctcctcttttgcccagataaaggttagagttatatttaaattccaaccataaaaaacccatctattctggtga

SEQ ID NO: 55490 - DNA, 636 bp, Arabidopsis thaliana landsberg
  unsure (1)..(636): unsure at all n locations
gcaagaatgcagccacggatgttgaggtctccagcaaggttcaacggcattagttctgctccacgtgctagctctaaaaaaggacaatccgaacagtcaaaacaggaaagagatggagcagcacgtaagccccccagtgatttgagacacaaacaacctcttacaaccaacctgtcaagctttgtcaaatgctcaaacaccttttctgatggaagtgtagttaatgccatattatattccaattgtaaagttctcagtgaagtgaggccaccaaggcaaatagctaaagcttcatctgtaatactgcatgaagaaagagaaagttcacagagtcctgacggtagaaccaatggcatctccatggtccttccataaatgaatcttatcctctgctcatggcaaaagagccatggcttgatgatgtnnnnnnnnnnnnnnnnnnnnnnnnnnnnnnnnnnnnnnnnnnnnnnnnnnnnnnnnnnnnnnnnnnnnnnnnnnnnnnnnnnnnnnnnactgctaacactaaatcctgaatccactcccacatcaatgcaagtttagatgccagggcgtctgcgttcattattatattttcgctcaagtcatgctgtcgtagctcattgttggtgataacat

SEQ ID NO: 55491 - DNA, 856 bp, Arabidopsis thaliana landsberg
gaattattcaaaaaccaactcccaaattagaaacatacagtaacactaaaaataaaagttagattgaacatatagcaaaaccaaggggtggattaagtttaatttcctttgttagcaaagaatgatcctcaaaacacctagtaggagattctcaaggtaaaaacgaatatttcttaaagagaaaagtaagaatccaatcctcacgttgcaacaaaaagcaaaaagtaaatgataccaaaatcagaaaaagtaaaaatggaagaagctaatcaatcacaaggcttcaaaaccagggatatgcctagaacaaaagctagaagtcaaacgttaagggaaaaggaaaagaagagagaaactaacgccatggaggaggacttgtaatgcagtaagagatatctggaagctgttctttcggcggatgtggtagtggatcaccacccgatttcggagctgacattcttcaacctctgcaacaaaaaaataaaaatcaaaactttaaaccaaaaacttcacataacgagaaagtgactgaaacccaaatcacagaagaagcaaaactcacgaaatttgagctcaagaagcagaaaacaagaaaaagacctcgttttgagctaacccacagttgcaaaaacaataaaaaccaaaactctacaccaaaaacttcactaacccgaaaagtgactgaaacccaaatcacagaagaatcaaaagctacgaaatttgagctcaataagtagaaaacataaaaacagaggtaaagacctcgttttgagctaaacccacagttgtaactttacaccaaaaaaacttcaataaaccgcaaagttactgaaacccaaatcacgaaagcagcaaa

SEQ ID NO: 55492 - DNA, 545 bp, Arabidopsis thaliana landsberg
ccgtaaaaaaaagatacatgcatgacctttgctttgttgggtttacgtgcgtcatctttcttagtatcttaatgtggttttaggaacacaacaaaagttgctaaagagaactcaccgaaagtgaatgcggggtccatcataaaattcatcatcttttctgatttctttatccttagaaactaatttgcatttccttccaaaaaccgtgtcaaataggaaccagctaagactgtaatatttcttctcattcaaggcaaacgagagtagtaactactccagggagtcgtattctcgcgctcgtgtagatgatgaagtttggcccgcaacactagctaatgttgcttgtacactctttgcaagcaatgaacaatgttagattccagggcactagtatgcacatcacacctatctggttaagaggagatcaatagtatgcggctaagaagtaagctcatgggctgtctatgacagatgtaaaagatgaaacgctacagagggatgatatatcatcagcccagtgatataccacatgatgccacatcagt

SEQ ID NO: 55493 - DNA, 298 bp, Arabidopsis thaliana landsberg
aatctaacaatgaaggagataagccgacaggttatccagccatctactaatacccataatgcagaaccaaagctctgtgttagagaacgtatgatggaaccaaagtggacagactcataaggaagaaaactcacactgcattgtgatagcatgctcaggaaataaaaatgccgagaagacaggcggagctaatgagcaccgaaccatcatagctagctccaaagataagcagaacccgttactgtcgactagtgctgcaagtataacacattagcgatggcagaagagatctacactg

SEQ ID NO: 55494 - DNA, 361 bp, Arabidopsis thaliana landsberg
gggacccgcggtgaaaggcccagcaaggccccacaaaagaaaagatttggaggcattgcgcacacacccggacgcgagcagaccagcacaaaagaaccgggccccaccagaaccccgcgggaggacacgcatgggcgagagacgcacgaggaagggcgaccgaccgggaagcccgagggggcacgccgcatcaatgctgaaccgatcgcagccgggagaaaacgcaatgacaccagaactattagaccgtgaggacaagcaggaccagtgacaccgggtccgaccggccaaggacagacccccgacgaaagaagcacgagaacggaaccatgaaaaagaccgaaaagacgagcccgaacaa

SEQ ID NO: 55495 - DNA, 850 bp, Arabidopsis thaliana landsberg
aagataagatcatgataacttcactgacataaactcgacttcatcgaggaactgatggtgccagaagacgccagactcatacaaaacatgaagctaagctctactgcaactttctcgatcatgtgggatggcactatacaaagcgtggagaatacacggttaagtcgggatattggttaaacacgcattcaccagggcagcagaatgactttgttccgccaccaggattacttgaattcaaagaagcaatctggaagttacaaacagcccccaagcttcgacatttcctttggcgaattatcactaatacacttgccattggttcaaatttgacacggcggaaaatcatcatagatccccaatgtaaacgatgctgtgcggcagaggaaacgttagaccatctattttttggttgtcaatacgctcaggcaatttggagaggttctcaagtctccaacaccagctttttcgatgcaaccctatcattcgacgataaaatcagaatcattctccaatgctgcaacaacaggagctacgacaacttaacaagacaaacaccgttatggatactttggagaatttggaagagccggaatttgttagttcatcaaagacgggatagtctatggtacaaggatgtacaacaggcaatcacagatgcatatgagtggattccagagataaaccatacacaaagtcagagatctctcacatcaacaaagactgcttggcagaaaccgcctccaggatctatcaagtgcaattatgattgcaactatctttgtgatgatatcgagtcaaaagcaggttggattattagagatgctaacggctattacattgaagctac

SEQ ID NO: 55496 - DNA, 881 bp, Arabidopsis thaliana landsberg
aaagatagaggggaaacaaaaaaaaatgaaaactggaagatggcacaaaaaccgaaaaaaaacaaagagttagttagagttagctttggccgggaaaaatggcgttgaaacgttccgctaaccaaacttgtctttctatttccgattattgtggatttcctcttttaatagctcccaactaatcacaattaccaatcgattgtgtgtttattaatgggaaatcaaattaggcacttgtctttttctgccgctcaaacgaatcatctctcttttcttctgttacgtacacatcacgagtgtttgattatcattaaacttgcttacttctttaagcaatccccttaactacctcactaactaactaactaacacttctccaatgttaacaataccttggtaggtcaccttccaatgatttgacttggctaagaagtagttgaattgatgaagtttcaagcagtgattcaatgaaaagtcatttaaccaatttcatttcgaaaacagcataaactcaacctaacattcaaccaaaagattagcttggatcaagcaaaaacagagagcaaatggtaaaacaatttgtctttctctctttaaggaagcaacctcttaacctcctcttgatcctcaccgatgctcttagcttggttgtacacagactcaaaggcttgcatacacacacttgaaaacccaaccattgcctgaaagacatgagggaaacccatctgcaagttatttagagtcatggctctagtcacactcactgacttcttatgcttacttttctcttcttctgcttttccttttagcatctcaacctttactctcttgtctatcaccgggttcttttttctactctcaggtaccgagtatggactata

SEQ ID NO: 55497 - DNA, 708 bp, Arabidopsis thaliana landsberg
ctatctcaactttgggcttccatttcagtttccggtctatacttgcaaccatatctacatatcaacaaagtttcattaccaaaaaccgaaaaaaaaaacatacataagaagttaccaaaaatcaaaatctttgagactcactgatgatgtgagaggtggaggaattgcaaggaggaaatacagaggaagaggaggtgaaggagaaggcggcgaattcgaaggtgccaagagaagtgagagcagctaagaagagtgaagtgagacagattccacatagaaacccaactacacatatttgacatggaaatgaatttccaagttttaatgctctctctgaaaccactctttctaatgacttcatgctcatactaactctagtttttctctatattggtcactaaataaccaaacccaatttcttctccttctattttgtaactgaaattttttcttaagaaaacaaaagattttctcggaaaatgctttcttttgtagccacacttttaccaactatcaaccagaaatcacatgatatttctccaactttttttttcttttctaagacaaaaatatatcttttgtggataaaaagaaagatcaagatggttctatcaaattaagtttgtttcctactttcatcagtggtccattttcttcatttcctgcaacagagaaaataacaaaaggttaataaaaattctcattaaa

SEQ ID NO: 55498 - DNA, 759 bp, Arabidopsis thaliana landsberg
aattctgttcaccacgatacaacaaattaataatattatatttaattgaattataaatatatggtttaacaaccaacgtgggcacgccagtccaagaacaagagagcagctgcatagtgagacaaagcacccaacaaaacgaacacatggaagatctgatgactatgtcccacacgatcaaaccatcccggtttaagcctttctggcactctccctacgtagaatcctgttccaacaagatagaacactgccataagcaactcgtacacgagcgtcacgttcctttgcgggtttccccaattgaccactagcgcgtgggcagctgggacaatcccaaacagccccatggaggcaaagagcaaagcgcggaaagctcggtacttgggagcggaaagtgatggggtgaaaagtgtgatgattgtgaagattcccatggatgtgatgcctgcgaggtagatgaagtaccaccgaggagtgcactggaagatgtagaagattggtgggaagaaggaagtgatgatcatggcggtgataccggcatagtctattcggagaaggaagacattaagctcttttgagtggcaacagaagaggtgacaaatgctgcttgcgagtaggcagaacattgagcctcctaagaaaacgaagaagggccatcttgttacattccctggactctttgcatcctacaatcatcaacattgataccaccattagctttacatttttattgactaatttgagatactaaaaaacata

SEQ ID NO: 55499 - DNA, 1079 bp, Arabidopsis thaliana landsberg
tagtttttaccgacaatcaggcaaataattgtattcagctacaagtaaagagaagcaccaaaacttacaccaacctcaaagctaaaagcgccataggattgccacaacatgatttcaaactagacagagttttagaatgtgataagtataaagctgcatccaatccaggaaggtagagcagtacaacctttggaatgagaggcttgttctacaaaaaccatacccttaaaatgtcacttaaacttggtaataacaaagaaaacgtaaagacacaacacaatcaatcttgttcataccttaataaatacccatgaaggcataaaaccttctgcaagaacccatgtcacaagtccttgaacatcctaatcaaacccataaatgcaaaatcttacatttatcattcataaacttccaaaacagaaaaagttattagaaaaaagtctcatttgcattacaagacctacttgtaagttcaatgttgtttcagggcttttgaaatcgagttctgctttcgcctaccaataataagaagaataagactcaattcacatatcacaatattgagcactaatcaatcaaatcgtaaagaaggtgttttacttcgggtccatatatatcgaagaaactgtttccggtattgctcttatcagtaccgtcgtcacaatcttccgcggcggtttcggcgccgcgcttccgcttcgaagaagacattcttcagacggcggaaagattagtcgaaagagagtgagatggaaaaagcttccgccgccgaatatagccgtcgcgtaacaccgtcggacaaattgagggttttaacttttaagtttatgatttgagaaaaaagtacagacgaccaattcagttttggtctaattcggtataataaaaattaaatcgaggattaaacaatccgaaccggattctaaccggttagaaggagacgacaagggtttaaacccacttcgcatattaacgggcttgtatttttacaacaaaacaaaaacagtggatttcgagacttaccgtggaaacttttgacatcattctattagtagggacattttcattttcatttcaaa

SEQ ID NO: 55500 - DNA, 1165 bp, Arabidopsis thaliana landsberg
taaaaaaaaatactttttgttttcgacattcgcgtcatcaaaaagaaatcccaagaattaaatgcaaaatccagctacagtataaatattttaggcttatatatcggacccttgagaggaatcataggagaagaagcagagagagagagtccaaacttggaatctggacaataaagaaagaaaaaccattttaaaaatctttttatactaaaactccacagatctcccattctgagatgcagagtgataataacaacaattgagaccaaagcaaaatccgaaactgtcaccgttttcctttgtcttcttctctgccaaaatctttcaatctttatcttcttcctttttcttgtttttctaaaactttctccatcttgaaaaccaaaacaacccaagattaataatatacaccaatgggtactggttggcgacgagccttttgcaccaccgcccctagaaacagcgatgccgcggcgccggatctcgacaagcaacgcaccggctataatcttaccccaagtcctagcccaagaagctgcgttaagctagcttttctatccggaggaagtaatccttcaactccccgatcaacttctagtcctagcctacgttgtcggactgcagatgctcaaactcccacggcggaacaaacttcgacgccaagatcggcgactaagagtccaagactgtctttggccgctatctctaacccttcttcgcctcggtcaccgttaaaactctctctgtttcgcaacagcttcaaattcagagtaagaaacatattaagcaacaaagagataaaaataacttataaaggcatgtttttgatggttggttaactttttgcagagtacttgtggaatatgtttgaacagtgtgaaaacagggcaaggaacggcgaagtatacggccgagtgttcacacgcatttcatttcccttgtattgccgactatgttcgtaaacagggcaagcttgtttgtcctgtttgtaattccatctggaaagacgcttctctccttgttcctcataagaatgcaactgaatctcccctggacgactctgtttccgtaatccaggagaagcgcgttgttgtcacgtcttctcccagagcaaaaccaaggccaaagcagagtgattattcgagattttacgacgatgatgagc

SEQ ID NO: 55501 - DNA, 632 bp, Arabidopsis thaliana landsberg
tgcccccctctaccctagtgttgtctttcgggttcctttccggtgtttgtaagtgtccctgtctaataggtttttggccatggtaagccgtgtcctttttcaaaaaaaaattgttgtcatagttgagtttcctgttccactagacaatttaaaatcaggtagcagccgtatgaagtatatgattgtcgttgcgtctttggccagtgtgaactactcctacatgtatgattgccatgttcgtttccgcgcagtcttcaccagcgcaaaaaggtcaaggtgcatgcccccttgtctactgtttgtttactcctgttttttttcagacaatgcctcggggaacgattgaacgaatgaggggtcaccatcatctaaacaaggggaggggaagggagaaagacgagtgccccccctccccctggacctcgattccatatgaaaaagggtcaaacgggttggtgcggtggaaacggcgacgcgaagactattatgccgcccgtgcagcaggtagcgcacgatcttgtgagtcagtaccacgcttgaccccctcgcccctccagctgcgtgcgtttggaaatgggtcgatcaacaagatggtgctcatttccctgttaccgaaattactaagggaaagc

SEQ ID NO: 55502 - DNA, 424 bp, Arabidopsis thaliana landsberg
ggcttgatactaaaaaataaccttttgcgcaactttcggttatccaactaataggacaaaaaagtaactatctcacttcacaactagtctcaaccagaatgcttccccttacaaaaagtgtatgcaatgacaatagtattctgaattccaacacggcaaaattatgtcaatatgatatctataggggtatctgagcaacaagatgcccctactacaagtagctgtgcgcataggtagatgatcatagtatagccgtattgagagggcccagtacaaacagaactcagtccctctagcagtatatctccagccactacctggtaatgactaactaagtaaaatgcgttcatcagccaaagaaaaacttgaacaagacgttatctcgttaataaactgcaggattttatcccctagtgtggccatg

SEQ ID NO: 55503 - DNA, 389 bp, Arabidopsis thaliana landsberg
  unsure (1)..(389): unsure at all n locations
gaaagctagactctatctaaatcctaaataagaatagatcagagtgtcgtaaacttangtgacaaattantaanaataacaattaacaaagctagtttttcacataaagcctacaatattacgtgcgtcgaccgaccacagtcacancattgactttagaccacaggagatgcttttcaaccttctcttgtttcaatttttccagaggtgggttnnantactcaaaatctaacatttacaagtcatcacacaataatatctgaacttttctttacttaagccttagggtattctgcttattagtacccaagaaatatcataaagagtataaattggctatcatcatatcagaataatctcctctctctctaacaaacttccaacttaca

SEQ ID NO: 55504 - DNA, 99 bp, Arabidopsis thaliana landsberg
gcacgcaccacctccccggcaaagggctcgccctgatctcgccaagcgaacccaaacccaagagctgcaaactgccactccgtctacaccaaacgcaac

SEQ ID NO: 55505 - DNA, 288 bp, Arabidopsis thaliana landsberg
cacagagagagatagagatgacacgtgtagcgatatctatggtatgcggacgtttcagggtcacatgtgcactagaatgtagacacagagataaaagcctatatctgtagatatgaatgcagagaagtgtgcgtgctagagtaaatggtgagtagtcctcgggtatctagtcacgctccgcgacatcgtgagatctgtcgtgcgtatcgtcgaatcacgaggcatggcgtcaacttagaactcgcgagaccgtctgcgactaagcagcagagttgcgagtcctcagat

SEQ ID NO: 55506 - DNA, 128 bp, Arabidopsis thaliana landsberg
agtggtagtacgatctaggactcatggtcaaagcaggttcaagggagaaagcggaatccgaacatagaactacactaacatgcaagacgggacatgaagtgaagaagcatggctaagagtaatgaagt

SEQ ID NO: 55507 - DNA, 602 bp, Arabidopsis thaliana landsberg
ggtgccgccattatcgccaccttctacagcctcggtcgagacgttcggcccacggctgaagactactacgttggcgctctcctatctagtcgccgccatcatcatcaccgtagccggtgttgccctgctgcgcgctggcaagcttcaagagaagtggcgtgccaagatcggcgacgccctccagaagcccgacgaggctagcggctgtggaggacgcctccgggcaacggccgagcggggtgccatctgcggcgcgtctttctagaccggatcacgtgagggcatcaagggcatctgcttcagggcgggcgtcacattctccaccccggcgacgacggtgccgctcgcagtcgtcggtggcctgattggcggctgctccgtcggctacgctctgtacaagcaaggggaaaatgcacccagactcacccacctcaccccatagaccctttgaatggatcctcctaacgcaagtaactcttaggggcggatcccaggccaagcttcaggtgttcctcgtcatctcgacctgcctgctctaccttggtgcggcgggcctctttgctcgctcagtctggtacctcgagcagggagcttggaaacag

SEQ ID NO: 55508 - DNA, 534 bp, Arabidopsis thaliana landsberg
ataaggaagcttgcttgactgctacgggcgatccacagcggtccgggcgatgcgcttatttgcaatgtgccggtgataccggtaagatcacgatagtcgatccacaacgtcaccgcgaagctggttccggggatgacaaccttggtcaaaccggttgttgatttcgtgatcacagcattgaaaccggcaacgcttgtgcccgtcgaattgcgatagacgttgataatgtcagcaccgctaacattattctggaaaacaccgatataatatcggtcagccggatcagcaccgtcaacgcggacggctttgatggctttcgccaccgcttcattgttcgttgtccaacccggaccaaccggcaacacgccggtcaacgcgtacggatcaagccaaccggcacgcaaaagcttttcgtcacgatcaacgtcaaccttgcttgcgaccgtagggggcagcaacgggctaatccaaacccaagccgatccggaccagccatagacgccattgccgttcgtcacgtcaccggcaggatcg

SEQ ID NO: 55509 - DNA, 490 bp, Arabidopsis thaliana landsberg
acctgggctgatctggaatctgccccagactttgcaactgtcatggtccatattcgctcgatcatcaagcgcacagatgttattgtcggtcatagtgtgcaccatggtacttcgcacgtgcttgatttcacttttctcatcgcttggtgcagatattcagtggctcggcctgcgtgcaggaaccgattttggccacagcatcgacgtcgcgaaaatatttgcgatcaagaatccgccgggtcacaagtttgagtatcgcacgttcagcctgcgtcacgtcacacagcagctgtgcggcgaagacattcaagtgcgttgcagcatgttgttgtttgtttgtctctttttttgggatgagtttagtgctgcaaacatttcaatcggcgagcagttgtgcgcttggtgccgcaaaatgcgatgcccagagcgctgtgcgattgtaaactgctttgccgcgtgctgcaaaatgccgttgttggtttgatgtgag

SEQ ID NO: 55510 - DNA, 412 bp, Arabidopsis thaliana landsberg
tacaatgggactagtgcactacactctagtatagcgctatacgtgctattagttatctcatactagatatatctaagtcaacggtcaatggtcagagcatcaatatccttagttgctctactaataagtatgtaccaccagttccataagatcttcgacgaaccttacactatctggtatgtcatgtgcacttcggtcaacatagcgcaccgagacaccacattcgatatgtcgacttctacgtttagtgtgaatgccttatacacttttcctgggttacgttagcctacactactgcaagaggtgatcagcattttcgtacctagcttgtatagtctaggcacgagccttgtgcgtcgtagcaaccctcattagtattagtgtataatgtttgggagaatcagaagattct

SEQ ID NO: 55511 - DNA, 1166 bp, Arabidopsis thaliana landsberg
agaagagtggcgggtaagatcgctgcgagtgcaaagatggttagctgaatctcagacttggagccagaggatttcaaaccataacctaatcccataaaactggtgggtcttggtgccatttgagccactggagtagctgataaagtgaaaagtaacactatgtaactgtttccatgttttggttttagcagatactgaaaactttggtaaaaagtggtttaccagcgacacgagagttgttctttgcaccttgagagatttgagaaccagttgagcttgaaggtggtggagcaacagaggaggaatcactaggcgcctctcctatataccgaaaacattctcgtaagttccaagaaaccaatttgatctcacagaggagaggacaaagtagaagtgttgtttacgtaccaggggaggaggaggagcaagtggatgaattggctggaatgttgcaaagcggaggcaattgtagagcaagagtttgattaattggaaaagcaggggacaaagtagaggtgttgttgaggaagagacagagacaggttgcttcttggctatagatctggtttaagctgtcacaacatggctgagccggaagttgggcaaagccttgaacgaatggaccacatggagctaaggaaagcagtctggaagcacatgtagctggtacttgagcgagaaccattcggagaaagaatgctgataggagattaaaagagtgatgagaagagtagaagaagccatttttttcctaggagactaagtttctttcttctttgtttgtgggagagtaaggggattctgagtatttaaggttggaatcaattggtttggtgtgggtgactatggacatgtattgttattgcacacatgatgtgtgtttatttgttgcaattgagttcttcatgctcgtttcttatttggtgtttttgagttcattcgtaaattgtgcttcttgttgaccacaataaaccatgaatgttaccggaatctcgttaacaaatttttagaatttgaaatagttaaccaattgaaataccaaaattagaaaacgttggcagcaaattcactgtagaatagagggtcatattcccgtctgacacgcagctgacccaattctaatcacccccaccgggaaaaatataaatgtctcatacgtgacccaa

SEQ ID NO: 55512 - DNA, 183 bp, Arabidopsis thaliana landsberg
ctgttgtccggcctgactgccatatattcttttaggatccagactcagaccgcggttggtaaaaatggaagggttgacctttttcaggcaatcaatcctatttttcaagttgcccgggaggtgggcgttcaagtcatcggtattatgggttgttcttaccatcatatcagtctcacctccatc

SEQ ID NO: 55513 - DNA, 1000 bp, Arabidopsis thaliana landsberg
ccaacgttctcaattgacagttttggtctcaagagtaaatatataaattgatgttttgatacagtatagattaattaattgagctattaataaatagatagaaactctaaataaatttacggagaccccactaatcaaacacttggaaattagtacgctcctaacgaaaaggaggttttgtcaaaagatcttaaaatcgagaatatataaagttattattcttaaacatatactgttgttcttaaaagcaggacccatttcgattgcttggagttggactagagatataatcccaatgaacaataatttgtgggcggtcaaatacattctaagatcatcatatacattctaagatcaaaaacatcatggatcttgcctcactcataagatccatatataccatataaagacattacaagcttttcaatgtaatgaaacaacaactaaaagatgagggaaaaaaaacaacatattatagataattactgagtaaaccactcgtaagcagacaacgaagagttgaagataccacaaggagattcaaagcttgattttgtcgacagccttttagtatttaagtaattaactctagactaagatacttgacaattagagaagcactagttaaaccaaaaaacatttgcaaccaataatttgttgttttcaaaaaaaaagaatgagtagaactgaaagagatatcaacatgtgatatgcaaattagttggtcccaaagttattgccgtatcatatacgaaggcgaaactcatattttactggaagatatctagatttaaactaatattttcgttaacgagtccttcatatatatactcattgttctgcaagaaagttttgtatgatttccaccgttaaatctgaaagaaagctatgctaatacgttttgtttatatacatacaaatctcagctcatttttttgtcaatcttttatgctctgcaatgttctataaaagtcacgatgtacattaccaatgacttatt

SEQ ID NO: 55514 - DNA, 490 bp, Arabidopsis thaliana landsberg
tttccgaggagaagggggcgttgtcgtcatcggtgcttatgagatcaaaaccatccatcctgttaacaacagaggattttttcaaccggtatattttgtaaacattaccagccaatatcaataagagaccgacaacgatacaggcataaatgatgaatgcccggttagtccagttcgagcctggctctgtggatatgctccgggaatcaattacgtaattcagcaactggcccgcgccttcattgacgggttgctcgactgtgatccagctgaaattcagcaacggtatgatcatactcaatacaaggctgcacagcaggtagaaccggttataattatgcaatctcctgttcctgagtgccacccggtaatacccgtagaagataccggcaatgaggatggcctttaatacatagatgaagaaggactggctattcacgtgacttgggttttaattgtttcagcaataattccaggtcgcggacagaca

SEQ ID NO: 55515 - DNA, 1332 bp, Arabidopsis thaliana landsberg
  unsure (1)..(1332): unsure at all n locations
cctttacttatcagttatttactcactgatagaagtcgaaagcagcgaatccagaaatagctatatcttatgtccttctcgagcctaaaacaacaccaaaaatagaatcattttgttaccttcttgatcagagacatgacatagagtcatagggaattagtgtacctagtgaagaggtgtttaactcttcgaagtcgccaaaatctaagtaatcccaagagattacaagtgatatttaacgtggatgtgccagtgattaagtatccaatagcgtcaaatggtatagttgatgcaacatccatcaagaaccatgttgataggtacctttaatgagatattaaaatagcattaagcaagaactaacacatttatttaaaaagctttcttttcacctaatatatataagtagaatctttctgtttattccaaaaacagaaatctatctaactgattatgaaaataaaagaatcacatggtgtgggctcaacagtcacctaaaccttgtcttcttccacttagctaaagatatcagatcaaataaaaaaggtgaaactaagatcatgaataacaatcactgacctcactgcaatctgtttaggttcacggacaagaagctgtgttctttcgtctatgtaagcaacgaaaaacgtcaagacaatgtcaaccgcgaagaacaagtctacgatgttgtccgcgatacaaaggtttctctttggtgatgaattcagaaatgcaacttcaaaagggtaaacccacgcagagtatgccactaaaagcaccatataaaattcccagcacctgaatcaaccatttaacttctttacgttatcactaattcaagcattcttttatgtcactgagatataaagaatgtatttttcaggtactctgtttcatcaatatggatggtacctgtatcttgagtccataggtgagatgatccatccactagacctgatgtgattctggttatagctagcaacaccaagtggaggaagaataagttttgacagattgttcaagctgagagaagaagcatcatactcttcttctcttccttttcctcgatgctgatgaaaacgcctgagcttcatgtctgaggataagttgcaatgagatgctgaatacttgaggtccattatatttctcctgaacaaagaaaatttagcactaagaacaagaaagagagagggagagagaggttntagtagatgatataataattgtaatgaagaaggagtttgtggtttgtatgatgcaaaccgtacgtggtagtggaggtcctatttgttaagattgaagcgaaattgcgtaagcttttgtggtgaacac

SEQ ID NO: 55516 - DNA, 1237 bp, Arabidopsis thaliana landsberg
  unsure (1)..(1237): unsure at all n locations
tcaagatcaacaaatcatgagatctgtttgatatgttgcagaggaaacagaataccttcccgaaacaacgaaggaaagagaccatcaggagagataacaacaggcccatccggcaatgcttttccgtcctggaatttgctagacaagattaacaaagtacggtagattttcgatttctaatgttcgggaatgcgttgcagctaattacctgcttgagattaactagaaattgtcttgtgactgaggcttgagaaatcgcgcgtgcacttaaaaatatcaactgatatccattttcctgtacaaatgtaagggagaaaatgaatctttgctttttgtcaagttgttttgatgctagtatcattcataacgatacgaattaagaacaagtaaagcacagataacagacctttacagccgaaaacaaatgtgtaacacctgtttgtgaccaatctataccaaccaaaggcataaactgccctaatacatccgatctacgacaaacaataatataaagcaaagtaagtaaggaaaatcagaaacagaaacaggttctggacttggcttaaaatataaaaacataatataaaaccaaatgtgtttttctttaccttgtgatggtaccatctacatctgacacaactatgcgcgaattccatttccataagtaaatccttgcgtctacctgttgcattaaagtttgtgaacactaagtggaaactcttgacagttatatgacaaacatgtcgtagtaaatgaaatgacctgttgtgtacccacaatattggtggagaacgtaaaagtcacggaattcattccatctttcagatctagcgaagccaattgttcagaagttggagttagtgccctgaccgtctttttcattggtcttggcgacgacttctcttgtttcnnnnnnnnnnnnnnnnnntccccagaaggagaagcttcagcttcttttgttgatcttcgcagagagaaaggccaaagcttccagcttccactgccttgagctaatacatcaccaggtttctcattccggtcaacagctatcatgcccttgggttcaaatacttgggcagtcccaaatgaaaccactcctaagataataggagctgctgcatcccatggaaaatagcagccaccaatcttcacgacaagcttatcgttctccaggatcgatgggcccaaagaggcagacttttccaaatccagtttttcggaattgaaagcctgagaa

SEQ ID NO: 55517 - DNA, 879 bp, Arabidopsis thaliana landsberg
actagtttatttagtgttttctcttttatcttaggtggatccattttcttttgttgtgatatctcttcgagtctttttttaatgtccaccatgatcatgacgtattctttttatattggtctcacctaaaacattatgtcctaagattctatatgtaagattccatttccatccatattcttataaaatacaataaaacgaatctttgtcaatgattcgaattgcgtttgagaaagatcgtatacttagctccatttacacctacccatagagttctccctaactggctaaataaatatgctagtgttattggttaagaggttgtaattacatattgtatatgtagatgcaagtcttaagtctagaaatttacatgtcttgctttgctttgaattttagaaaagcttcggtagaggagatttcaaaccaggatatcacacgggcattaatacagtatcaaatatgatatataccttacaatatatagagttgtttcaaaaagatgattttggaaacacgctaaaaccccaaacaatgatcatgattcaaaagaaagatataaggtatatactctgcatcagtttgaaatgtaaataaaattatcataatgttataagaaacaagaaaaataaaagaagagaagatgatctagactactaatttaagtgtatcgaaagagaagagagactggaagtaaggagcaaggacccaagtttggaagtaaggctctggcaaaagtttgatggtcagcgagaagcaaagtcttagtacgaggatcttatttgagtaacctttcttttcaatcccagtgatttgaattatttggcctcttacctttaattttaaatatagatagacgtcttattggttaataagact

SEQ ID NO: 55518 - DNA, 1107 bp, Arabidopsis thaliana landsberg
aaccttcttcgacttccctctaacaccaatcgtctggtctcgtttctaattgtaagtcttcttccttctctaagttttgtttcagtgtcaatgtagatcttcttaggtggaatcaagtaaaagagattgataaaccctaattgttccgttctatcgttaaaactttcctagattagtcggggttaggaaacgaagtctagctatgaaaccgttgcatcgaattttgtcatagatatgataatttccggttcgcacatcagaaccggccctgtatgcaagtagcttgaggttctgttataatttgttgaagggagagaactttgaagctaatggggaagataatggaatgggcagcaagatctgatcatttgggaggaattccaaggaatactgcgataatggctgttagtgcatttgcaaaagcagtatacaaatctttgcaataaaagctcagttcacaatgcagatactcttatgaatcttgtccagtcaagaccacctggtgttcctctcatcactgttagtaatcacatgtcgacgttagttaatattaaaaccttaatagtatgatcctttcttcatgtcatctctttccactcatttgtgtttttgatgttgatttatcttctttgctgtgtaatcagtttggatgatccagtaatgtggggggcatttaagggtctcctttccttagatccagaattggctcggtgggttcttgctgcagaggatatatgtttcaggaaccctatattctcctacattttccgcactggtatgtcactttttttctttgttgcttcttctcttgggaaagactgtaatcagtgatttgttcttgttttgtatggatttggacttgtatcacaactttttttagtagatttggtggattgccttcttaacaaaataggattttctcatgatgcatgttagtgatttcttttgagcaggaaaatgtatacctataactagaggtggtggaatctaccaagaaaacatgaatgaagctctcccgccattaaaagatggatcttgggtatgttatcataacactttaaactaattgtacttagatcttttcagacctctgacctgtgatttacc

SEQ ID NO: 55519 - DNA, 642 bp, Arabidopsis thaliana landsberg
tgattcgtgaagatgaggaatgttccatgctgcaagtatgatctccagtgattcactgcaagcaagatggcgaggttctccttttcataagcagaaagacccatattcttgacacccaaaggcttgcttacgtaagcgagaggatggttgttttgtagcaggactgcccccacacctgctctagaagcatttgtttcaatggcaaattgtttggtaaaatctaggaggcccaacacgggtgctgaagacaaaggctgatttcaacaaggcaaaagcagtagcatgatccgatgttcataaaaaaacacaacatgcttcttcaggagagcagtaaggggcttggcaatgacaccgaagttttgaacgaatttgcggtaataacctgtcaacccaagaaaacctcgcaactccttagagttagttggtgtaggccaggatacaactgcctccactttggccggaccagtggccacgccaactttactaataatatggtccaagtaagctatttcttgttttgcaaatgtgcacttagtaagcttgacttgccagtggtcttgaagcaataactgcaacagcatgtccaaatgttttagatgatgtttcaagtgtcagtgtatacaggatgtcatcaagaatcca

SEQ ID NO: 55520 - DNA, 791 bp, Arabidopsis thaliana landsberg
taaaatagatgtagcttctgctttgtggaggtcaaaattgtactttatttttcttgaatacccctccctcaaccttccattttgaaaacaatcaagaaaaatgtcctgtcacatagttctctctactccctttatctttctttgaaatatcgactattcttctgctaacagcaaaatattttccaagcataacaataaattttttccttgccaaaggaaaacaaggccaaccattggaagagaccccaagactaagttacagctaatatagcaccgaacacctcttttctcagcgtgatctttaagctttggactttgaatgaaagaccaaggggaaattgttttatgttttatatactacactagttatatgtttcatatataactactggtccggatagcatgttatctaagaaaaagaacttctatcacctttaaatacttgaaaataatttccagctgtctctcttcctttgatagtcataaacacagacacacacagacacacacacacacacacacacacacacacacacacagagagagagagagagagagagagagagcgtgagacctagagacagaaagagagagctttaccacaattgattatgggaaaaaatcacacttgattatggaaagaagaaatgcttggagaggctaggccccatttattctcaataggatgaaccagaattggaacctgctttttatcgtcccccaagaaaccttcataataaggttcttggtctcttgccgggttacttaaaaagggaaaggaaacaaaaaat

SEQ ID NO: 55521 - DNA, 919 bp, Arabidopsis thaliana landsberg
ccttatgacagaagaagcaaattcaagaccccgtagtgctaggttttgtttgttctttgtaaatactaaattctaatgatgctatttatgtagaacatttaccagtttaacatttttttggtttattaattttggaaaaaaagttatcgatgcaaatgacgatagacttaattttttttggtaggatgacgatagacttattcttaacacaaaaattctgcagtattcttattctattctatatgaaatttttacatgtacaaaatatacttccattatataaacagaagtttagttttgaatatacctttttcatgatctaaatcctatcaaattcattatttttaatggtcaaattctataataaattgtataattgtatcctaaatttgaaatcaactttgaattaactatgttaacttaaattgaaaccacagtcaaacaaatatgtttttcaacaactcttcttcaataacttcccaaacattgagtcaacataatattgaaactttgtcactaacatattatggtagagagttaaaataattacctaacaatacagtcaaaaacttttaaagaattaatcactattactgtatggtagaagattaaatgaaactataaatactagtcgtttttcatatattgttgtacaagatttgcggcgccgcattttctacttaacttaatcaaaccgggattcgagtgtcaatactatggagtatgcattggtagtttataaggtattaaaaccctaatctaattatataggtaaattatgcatacattcatttgttttgatttatggtggctttaattaattatacttatggatttgtggattgtttttaaatatattttttaaataaattttgttaaatatgaaattctttttgctattataaatggaaaatgggaa

SEQ ID NO: 55522 - DNA, 1215 bp, Arabidopsis thaliana landsberg
ttaggtatcttttaaaatttctagataatatataaatatttcgacccaagatcagtttcctttaatttaaggtccgaaataaaaatattgataaacaaaaaaagtatccaaaagattcctggtatattcatctagttggcatggctagtgcagtacaaaatacaaactctaattccaagaaaacaaaataacgcaataatgctaagtgcaaacggacgagagcaatcgattcatatatggttctcttctcgatgtaatgcaatcacatgactaaaactggctcaaattaggcctttatacaagacacttacctgaaaatagactaatatttttatataaaaccatcaaaaaatattgtaaaaatgttatctcgcggttattatttcaacggtgctaagataaggataaggtttgcgaaactatatactaatgcaacaatgggtaccgtaggtttgtgatacctaatttgatctaaccaacataatctcttcttactagtgtaatcgagtggctgagctgttgatatagagatacgtagtactattattgtgaataaagaacccaaagaatcaaatttgtcgacaacaaaataaggggtgataatccgatgcacgtggatttggtgaatgtattggataatgctagtcacgtagaagaaagtaatcttattttgggccataattttagtaaatgtttttgagtctacgtaaagaagagtaattttcatggcaatcgcaattttcgctgacgattgattattttgatataatgtgaaattggttaggttggtgatagtagctattttgaagcctaacttaggcttgttattgaggtataatacattattaaccataagtattagacaggttttggacaaatatatttattggtcgctttggcagcattgaaaaaccctaaaagccactagaatggatgtcttcgaatgtcagttcatcttttcacagaaaaaagtcagttcatataaatgttcgctagcttaattttattttcttttttaaaagagaggaagcaatgataacataaacatttttgtagtgtttttcttgaaacaaaaagttagttttcttcctcaaattcgataactaaattacaccataaatgagaatatgtttttagttaagtagttaaatccatttgattctgcttttttttatcagagtttgactctactaagtcgtattacttcgcataata

SEQ ID NO: 55523 - DNA, 559 bp, Arabidopsis thaliana landsberg
aaaaggatggagcttttggttgtcaccactttgaattggagattgcaagctctaactccattctccttcattgattatttcgttgacaagatcagtggtcacgtgtcggagaatttgatctatagatcgtcaagattcatcttaaacaccaccaaaggtgcgtcatttattgatcagaagcaagctataacaacattctttctttatttgcaactaacttggctttgtttaatgaggaaggctgatacgtttctgtttataaaattgaatgcagcaattgaattcttagacttcaggccttctgagatagctgcagctgctgcagtgtctgtttccatttcaggagaaacagaatgcattgatgaggaaaaggcactgtctagtctcatatatgtaaaacaggtaattaacattcggtatgatagcgaaagacttaaacctttactgtttcaagaacacacatttcatctgatcattgtcttcctttagcaggagagggtgacgagatgtttgaatctgatgagaagcccactggggaggagaatgtgcggggactagt

SEQ ID NO: 55524 - DNA, 451 bp, Arabidopsis thaliana landsberg
accacaaacttgcgagtcttaactggtatctgaccatgcgccgtgcagtaaagtaggggcactgcttgtgttcgtcgccatatctaatgatatcgtcaaaggaccagacaccgttggggataaggttatgaggctcaaggaggtcgaggttctggatcatgttagtacaacggaagagaatgcaaaaggcaacggaaaccaacatcgtggtagacgcagacatctacattctcacccctgtctttcttctccttgacgaagccagctgtaaggcttcggcagcgagcatcaacaacagagccgctcttctctcgctttactgatgggtgaagacacaagttctttcgacttgtcaagccaagaccacgaaactctatctcgtaaccgagctcctcagccctgtacttcatgagagacttgagttcgaccagagccttttcaatctcggaca

SEQ ID NO: 55525 - DNA, 544 bp, Arabidopsis thaliana landsberg
tattcaaaatttacaagatatgaaatcatttgtaatatgtgtaaaaacgaattataccaactacaaataccacttacatctttacattcctttaagctttcataagtatctatcacaacaagtagagggccgtcgttgacaagttagataaactcttcttctctcacttgtttgtctctcttatataccaaatccttgattttgaatgcaggtatatcctataagaattcgtttataagtatgattagttaaaaataaatgaaatttgtaagaagacaagatttaaaaatgacacttacatagttttcggaacttttgagacagatttgtttgagttttcatgaatatggacaagtttttctagaacaagaacttgttttgtcaaaaactttttgatacttgccataggtacagatttttcatacatgttcctaatattggttatcaaatgttgcggtgatagttcaacaactagacctataagagcaagtcatgcttcgatgtggcaccaacctagagttattaacccctaagcaaaatgaaa

SEQ ID NO: 55526 - DNA, 980 bp, Arabidopsis thaliana landsberg
gtctgatcgttaaagaagcctcatcatcaaactatatgtctgaaacaattacgccatcaacgtcaaaacatatatctgaagtaagtattttcttctaaatgctcaatggtttactattttgataattctagttgatcaattggtgaaataaatcttcatgagttttaaagtgactgttcgttttgctgtactcaatttgggctttaaaaaaagaagtaaaagctatgttgggctttaattaaacgatttagacccaaagaaaagaggtcacgtgtactctcacgtgattgtcttcatcgtttcaacaacatttggaaataaaatgttagggtttgaaattggtcgctggaatcaaataatccgataagccatagctgagttttcccttctactacaaagagcgaggctcagtgtcaatatatttagaaattaacctcattctttttactcatttaccgttatgccaccataccctgaagtagatttcactgcttttgattttcgtatcttcttctctgccatataacctaacactataactcacggcgagacaaaattctagtcgctctccattcaccggaaactagattcagtcactgttgcatattagtgacagtcatggttcgattgttgcagcctaaacacatggtacaagctgtgaacgctttgcattggcgaaactctgtggaatttcataagctgcttaaagataatggagatttctctatttgctttaactctgagcaagtgttaccacaaaaggtgcatttttaaacttgatttgctttttcagttttttgctattcatttgtagtaagtactgatgtttaggtttctttcagattagtgttgagaagatggtgaaaatgttacctcggcacctcattgcggtggttatgactcctaataaagatggaaagtctcgttatatactgtgtgggatcagactgttgcagacgttgtgtgacttaacacctcgt

SEQ ID NO: 55527 - DNA, 786 bp, Arabidopsis thaliana landsberg
aaacccggtaaggtggtagtaagttttttataaatggttaatttgaagtaattttgattaaacttgaatggttctaatcctgatgaaggtagaaaacagtaagttaatatctaaataaaagtggtttatgaaattttagaatgaataacttatttcaggtgcaactacttttcttacttgttatgatggtactgaaaaaatggttaccaaattacctcattttcaataggacaagtcttgtgcagtgacggagctagaattttagtttacagggtcatatataattatatatttttatttaattatttattttaaattaaataaatatgtgtaagaacaactttgaaaataatgtaaagaacaatatatggaatatgtttataaaagtaaatatgtaccacaattttagagatttgtagccatattttagaaaaaaacacaaaacaaaaatgaaaaatgaattaatgcttaatgaaaaataaacatgtgaggggtcaaattaaagaatcgattatcggcatggggtcattatggaaaatttaaaccaaaacatccataaattattatgagatttaacttaaaaacaaaaaatcataaatgttatggggtcaattgacccccttctcccttcactacttccgcccctggtcttgtgagactatacatgacgaagtgtccatttcaagaaggcaatacctatattacaaattaatgctgacaaatagaaacaacataaatgcctacatttatgtggttgcagtatttattttggtaacatgtctcata

SEQ ID NO: 55528 - DNA, 530 bp, Arabidopsis thaliana landsberg
  unsure (1)..(530): unsure at all n locations
acacatgtttttatcatatttcttttatagcctttttaatttaataagtaaactactagacctaaccaagggttcatagtagtggtaataagggaaattattacaaatagtacaaaataagttttgttactaaagttaacacacaatttctaaagtttcaaatttagtaattaaatatttgggatataattcagaaaacctttaaagtgcaagggtaaaaattcaaaaaataattacataaagaacaaattacaaaacaataaagcaaaattaattacatggacttcataaaaacaaattaaaatgaaaaaacagggtcaaagagaattttagggttattgtcgattgagcagagtaatttattccttcttcttcttcttcttcttcaaatcgtgtttctccatttcaaaatccagaaactttgtgattccacggtagttagtttcaatctcaatgtctacggcggcagcggcttcgttcgtggctggaactggcttacgggagaagacngcagcgtcactggtcaattc

SEQ ID NO: 55529 - DNA, 592 bp, Arabidopsis thaliana landsberg
accgatatgggatagattggctcgtcgaggtttggaccagatcgattggctcgtcgaggtttggaccatcccacaaaatgccttctttgtgatcaggaagatgaaaccatgcaacacattctgttacaatgtgtttttgctagggaagtttggtttcataccctgtctcttattgggctgtagcacctcactccaggaactgcagaatatagttttcaagactggtggcataagtcaggaaagacagttcaaaaggcacaaaagaaaggattcaattcagctgtaatcctagtggcctggtggttgtagaaacacagaaactcttgtgtctttgatggggctactccggacatctctaagattactcaagacattagggacgatgccaagatgtggtgtctagcaggggctgcagggctgaaaggtttgtggttgtggcttaactcagggagagttcaggtctggtcgtcttttatatagtcatctgtgtacagccccttagcatactttgtaacacctttatttggtggtcattgccaagtctattttggacctttttattctccttaatataattgttagaaagtgtatg

SEQ ID NO: 55530 - DNA, 974 bp, Arabidopsis thaliana landsberg
tttgctatttttaatgttgtttatgtctatctttatctattcttaaggagtgtaaaatatatataatcatatgcaggttctgttcgttcatgtcgctttgtactttgtaggtaaattgttcatcaattactttaagtattaatgccacaatagtatatagttgtagatatttgtgtggacagtctagtcaagtctagtcaaaagcgatttaatatttagattctattttcgatttatttcaattataagtatatcttgtaccacgacgaaatgtgggtaaatctgacgcagacgtattcaaatttaaatgaacttgtcagtagtaaggtggacatttaaattccaccccaagtatgttggggctagctagccaagtagtacggtgaacaacattaacttcgatcaaaagaaaattttttctttatcagaaaaataaaacatacttcttaaaccgtaatgtatgtacactgtcactaatattcgttaaaaatacatatataattttacaatgaaacaaacgaaaagtaaataaaaaatagatatatcattgcgagaagttgaaattattttttggccaccgacaaggcgacaactacagtaaacttaaaagatgaattcttacttatcatatgtgaatcactcgcttcaattattagttgtccttataaagaaactactatatgtttgtaagatctagattataatatgataaacgaacaaataatagtaggtcaaccgattaacttaaaattgcaaaacattcacaccgagtgtccgagtcactgaccattaaaaaagtcatcttatgttttagaaaattaaggaatgatggatctaaagtttctaaatatgaatgtacaaaaacgaaggtgaaaagtaagtgaagtttgtgtgttggcctcacttggtgaatgagtagcagtgaatttctaaccttccaagcctgtaattgggccaaccgtgcattaatttta

SEQ ID NO: 55531 - DNA, 346 bp, Arabidopsis thaliana landsberg
agggtccaagttgaccgtcttgaacatcggtatagaaatctaaattgaaagctacatgcacattgatcctagttagtgagtccacagtatacatttgaaaattcgatgttatgagaacaaaaccatagatagattattaatacctagcttcccgtagcttccaatcagatcgattttagacaatacattgacatgtgggagttccatgtgaagcattgtggataaggagagaagtagcgaacttacgtagttcccgggatcacaacatagatgggaatcaattagttgcacagcagttaactgcagaacaaagaaattcatcagatatgtagactcctaagtaggg

SEQ ID NO: 55532 - DNA, 576 bp, Arabidopsis thaliana landsberg
tagctcttaccagcattgtagtccaatcagtatggttgttttgagtatgcgcattgcattttgtatgtgaaggttcgctgatacaaaacttctactttagtaatgctttgaagaactaaacaaacaaaaatcagatgttgtatttgtctttaccttctgatcgcagaccaacataggaagacaatgtaagaagccataatcccggaagacaaaagacctctattcttcaccttttaatgcaaagcatcagtattcgaagcagagatcaatctttgtgctacctttaagcaaaacttaggaaatgtacctttgaatgcaaggaaataaccatcataacgattaaaagtataacagtccatgagatgaagaatatattgaggccacaagcagtagaagctccataaaagtagtacatcactgcgatcccgcaaacagaaccgatgtagaaaactattgacatgaccaaaccaaaagaacagctgcagaaaacacagtagtgtgagccaattggtgatatattcacatagagaaaacgcttttgttatgactgatacttgcttacctttgcttactttg

SEQ ID NO: 55533 - DNA, 547 bp, Arabidopsis thaliana landsberg
tctaagagatatttatacacatatcagtccttgtgcttgtgcaagattaattttggattttgcaaaaagaacattagtaagataaggtagagatgacatggtatctagttggttttgacatttagtgactactttgttgggttataatttatacgtaagcaagacaaacttgataaaatacaataaataagtgggttttcctctcggtattgtccaaatacatgggtgacaatggtgtgatgcaatacctttacacatgtgtaacgatagccacatatgtgttgcttggtttggctattttgcactagaaaaaatcatggcacaattcaccaatgtcaattttagtgtggttaacttatgtaataatcggtttaaagaatcactcaatccccaccgatagaaatttaggtacttttagttgcattttaatctagaaagttgatactatttctttgatgtcaatagaaaggtgcacatgtgattctaacataatgaatatgagcacaataaatagtaacatataaggaagacatagttagttgatata

SEQ ID NO: 55534 - DNA, 138 bp, Arabidopsis thaliana landsberg
tttcattgatctcgatatcgaatacatcaatgtcggcgaatattttgaacatcacacccttcccttccatcacgggtttgctggctttttgaccgatatcacccaaaccgagcaccgctgtgccgttgctttctacct

SEQ ID NO: 55535 - DNA, 352 bp, Arabidopsis thaliana landsberg
ctctatactatctacaaaagaaacgtcgatccaaagagtcaggttcacctctcgaggacgttaaaacaagtaacagataaaaaacctcgttccaaaaattaatttggtatcaagaaaaaatctgtatatatacactagaattcaaaatcatgggaacttttttttatatatataagaaataactcaattaactcaaatttaaaacttaggttttctcaaaacattagttcttaaccataacttttttttcaaattttattcatactacaaaaattaataacagaaccatgtatttttaaaatttaatatttaataccattatttcataaattattatacttttataaatttg

SEQ ID NO: 55536 - DNA, 728 bp, Arabidopsis thaliana landsberg
tcaagagtcttctgacatgtttattacctttgcaatattatgacagcccaatatatctaaggacctaacattctaaagtgacgaagataacccacgaatatcaacataaccagctaacacagttttgttcctttccttcactttcgtctgatatataaccctgtgaatacatcaaaagctaagttcaagttttgaatataccagtgatatggataatctatgtaatatatcgccaaagaacaatacaaggtagagagagagacagagttctacctcaagccttcaagccacatttcggttatcagagtttcgccaggaaaaacagtcgtgaggaatcgtccagatatggttttgacagcagttgggtcacccttgcaaacacacttgatgattgccttgattgcaaacccgagtgtgcatagcccatgcaatatcgggcgtgggaatcttcaataaaacaagtgtcagtccagtggcagtgatgtgcaagttttggaagaaaaaaaaaacagagaaacattacattggttatcccaacgattccatgtaatgccttagttatacaatgaataatgagggatttgaaacattttaatcttttagactcagataacaaaacttctttgacacaaaagagctttcacataccatcaaaagaatggtacaacgtagcattgataactcaaaattatgatggaacttgagattcatagcagagtaaggtagcc

SEQ ID NO: 55537 - DNA, 436 bp, Arabidopsis thaliana landsberg
  unsure (1)..(436): unsure at all n locations
aaaaagaaaaaaaaaaaataaaaaaaaaaaaaaaagaaaataaaaaacaagaaaaaaaaaaaaaagacaaaacaacctaactacaaaaaaacaaacagaaagcaaaaaatggcagccaaaaaaaaaaataaaaaaaaaacaaaanaaacaaaaaaaaaaaacgaaacaaaaaaaaaaaaaacatttagaccacaaaaacaaaaaagaaaanaaaaaggaaaaaaaataaaaaaaaaaaaaaaaataaaaaaaaaaaaaaaaaaaaaaaaaaaaaaaaaaaacacaaaacaaaaacaaaaaaaaaaaaaccaaaaagaaaaaaaagaaaaaaaaaaaaaaaaacacaacaaaaaaagaaaacaaaaaaaaagaaaacaacaaaaaaaaaaaaaacaaaacaaaaaaaaaagacaaagcatacaaaaaaaacaaaaaa

SEQ ID NO: 55538 - DNA, 1083 bp, Arabidopsis thaliana landsberg
ctgcactctagaggatcccccaaatttatttactttaggtgaactggtcatcatgcttttaagatgcgcttaattattgagtcgattcgatttgtcggattataccaaaaaaatgaataaaatatatatcaaaattcttcgaaaatcaatagcctaactaaatcgaacttataaacatataaccaaactgatataacaaaatcgaatcaaaccaaatatttgttcgaataactcgggtagaatatttaaaaatcgattaacggaaaaatcagaaccgtttgacccctactaacccaacctcgcacgcttttttaaatcattcttataaaccataaccgtcggttttcgcaaattctaacatccgcatttgatgcgtttagtcaagagccttaacatttttttagactagaataacaattaacgtattttacgaatggagtataaaacaatgcaatcattgagaaatcgcacaagattcaagtgcgcagggtaagctatcctgcgcacccacccagcaactaggcggagcttaaaactaccgactaaaaccgaagctttcaaaatccatccgttaaaaactggtttcccgatcaaatgaacggcctcgatttcttcttctccccctcgccaattgtcgatacatccacaggaaacaacggcggggatgatgattggggagatttcgtcgactcttccgatgctttcgattcagatcgcaacggtgctgattcatcacataatcggatcgagtcggagaagaagagtcaggcgaattgggttacttctcgtggtccagtgccactctctgtgttcggagaagaagaagaagacgatacagaatcaagtgcgtcggttccatcgtttggattctcattcgattcgttttccagtaaacgcaatgatagcaacggatctgtgaatagagtagtggattcgaatacacatcatactgttgaaattagtggcttgatcccaaatctgtatagaaagaacggacatagtgataacaatcatgggaattcaggtggattcaatgtagaactctcacgttgaatcgtaaatcgagaattcgctgtagcttga

SEQ ID NO: 55539 - DNA, 242 bp, Arabidopsis thaliana landsberg
  unsure (1)..(242): unsure at all n locations
tgtgtatgtgtatattaaatggttgagatacagcgtgattatacaatanntcaataatgttttcttggtacaaccctttcacttcaacttctgctagttatatacggctttacttctccctaattctcaagcaaatcgagagtgtgaaacagtaaacaatagggttacttttacttttaaatattaaatagatatacacacctctgagtctaaaagcacatataacttcattacataagatt

SEQ ID NO: 55540 - DNA, 470 bp, Arabidopsis thaliana landsberg
cctcgccgaaggtgccggcacgccgtccggggacgggctgacctggacctacaagatttagccgggcctgaaggactccgacgggtcaccggtcaaggtcgaagacttcgcctacgcgatcaagcgctccttcgccaaggacagtgtcggcgccaacggcaccggctaccaggtggagtacctcaagggtggcgacaagtacaagggcccctacaagcagccggacgcaaacttcgcgggtgtgagcacccagggcgacaacacgctgatcttccacctgaccaagaaggtgccgtcggtcaactacttcaccagctttccggagttcagcccggtgccgaagtccgctgacacgaaggccgcctaccagaagaagccgttgaccaccggcccctacaagatcgacagctacaccatcggccagaagatcatgttgtcgcgcaacaccggctgtgacaccaagaccgacc

SEQ ID NO: 55541 - DNA, 845 bp, Arabidopsis thaliana landsberg
ccacaacaatccactttgcacaacaaaataaacacaattcacaaaccacagtgaaaatatggcaaatctcacctgatgatgcgtcctaagaagtaatttgcaattggaatgaatttcctgaacatgagacaacgcttggaagaaattctcattcaattcatcttccctaagcgctttaatctgccaaaattgcatcaaacaatcaacactcattttcatattccagagatctgatcaccattaaggtaatgattacactcacctcttcattcgaaagctggtaatcacgaagaaaacagttaacgatctcttgcctctgagtagtaacctcaagctcttgctttagcctctcagtagtactaataatatcgctagtggtagccgcggaactacttagcgccgccgcaatcttatcgcaacaatcagctaaagcattcacttcctcctccacgcgatccaatgcgatctgagtcgaatcagccgcgttaaggaactcactgttgatctgaagcgctcgtttctcgatcgtcgatctgagatttcgccgtgcgtgagcactgttctcgtcgtagaatgaggataaagcgttaagcgacgccaccagatccggactatctgtacgacagtccaataccttcttcaatttccgggagagtcccggtgctaatcccaccgtcgaagccattgttactctgcttcgtttggttttcttctacaaacgatcttcgagcattgccttcttcttcttcttcgatctctgatgatcttcttcctcctgcagaacggtcggatctgaaataattctctgggtcaaaaactcagtaagtcagccccagattatattt

SEQ ID NO: 55542 - DNA, 1226 bp, Arabidopsis thaliana landsberg
gtttattgcgccattgccttctttgattacactgacccaaagtctggtatcctaaatctcgcaacaagatttccggaaggatccttgaagccagatcttggacccaagacatacattgcgtacggtttccatgaagagcttaatagaggagattcggtgacaaaacttcattgtgacatttctgacgcggtacgtgcaccaattattttcgtacttttcttaattattcagagacataaaccatggatttttactttctgaggtgttttaaagctgaaactaggctgtccaatctatcccttgtacttcggagattaattgttctatataattgtgggttaggtcaatgtgttgacacacacagctaaagtggaaatccctcccgtcaaataccaaaacataaaagtacatcagaaaaaatatgcagaagccatgttgcagaaacaacaatacagtggtcaagtgaaagaagccagcgaacttgaaaacaagtcaatgaaagaagtggatgaaagtaaaaaggatttaaaagacaaggcagctaacgaagaacaatcaaataacagttcaagaccgtcgggctcaggagaagctgagaaagtaattatttcaaaaggtattgcgagaataagagagctttcccattcttatgtatacaaacatatgttactgaatatggagaatggactaatgatgccaacacttcttgcaactcccccatgcgatacagaggataatcccacacaacctgctgtgagtacaagtgtggaatccatacaagaacagaagctggatgctccaaaagaaactgatggcaataccaatgagaggtcaaaggctgtgcatggtggtgctgtctgggatatctttcgaagagaggatgttccaaaacttattcagtttttgaaaaggcacgagcatgagtttcgtcacttcaataacgaacccctggaatccggaagtgtcgtctcatacatctcttgtaaatgattaatattgaattagtcactaatgtgtgaaaaatcaaaaatttggcgcactgtttaatttcaggttattcacccaattcatgaccagactatgttcttgagtgatagccagaagaaacagctgaaagaagaatctggtaagattctgggttatgcttaaaacatgtgccgcttaaccagactatgttctttattcatctttgctacgaaaacggtgaatatatgtatttcttcaaa

SEQ ID NO: 55543 - DNA, 904 bp, Arabidopsis thaliana landsberg
taacctcactacgtttgcaagattccacaaacatcctacacaaattaaatttcatttatcccaagaaaatttagtttccttcacaacagaataatacagtaattctagttttgatatgaatgtaagtaacaaaatagtacagaaattctagttttgaataaaaaaggaaaagtacgtaaaagcaacacaaagggtaattccgagaactcacatccacggcacatctccgactaacatcaagtcaccgtccttatcctcgtaagtagcaacaaactctcccttcctctccaactccgtcactctacctaccaccatccaaaaccccaagtgtaagtaaatttaccataatatccttcacttcgtcagtccatccaaacacatcaaaatctttattttttcctacttatctcgatcacttacatattgttattatcccctgaaacatgttttctagagcggtgaaaagctgtccatagcaatcgtacatcccaagatcaacctttctgagataggccgcaccatccaacgccactttcacgtatttccgcctcactgttttcctcgctgtcgctaccggcggccagcccaccaactggtcactaaaaccacaataaattaagaagatcaatcaaacatgcatatgacctatatgaacgataaatgaaattaatataatatatatatgccgtacttagtgaccatgcttgagatataattgttctcgtgtgcttccccgagttttaaatcaacggtctcgaggaatctacgtttgttcccgaacttttttggaccttccgatgcatttgtcggagtgccaggcaaagctagggtcagctcagatccttcagatcaccggaatccggccctaccctaacgttttcctccgtgacataatatcttaatc

SEQ ID NO: 55544 - DNA, 428 bp, Arabidopsis thaliana landsberg
  unsure (1)..(428): unsure at all n locations
ggcagaagacaacggaccccccccaagcaggaaaaacccacaacaacaacaaaaagaaagccccacgggccaagcgaacagggccgacccacggcgaaaacgaacaaacaaaacaaaaaccagacgaccaggcgcngcgaagaagnaaacaaaagagcacaaagaagacaagncacccaaccaaccagcaaaaaagaagggaaaaagacgcccaccgacgcgccggaaaacacggacagaagcaccngaaccacgagcgccgcngacaaacgaagcacggaccaaagaaacgcacaacaacaaccccccccgaacagagggcagcacacaaagccacaaaaacaaaggcnnagggagaaacacaagcgcccaccacaagaagaaacagcacaaacccaccaaaccaaacaagacgggaaagaaagccc

SEQ ID NO: 55545 - DNA, 405 bp, Arabidopsis thaliana landsberg
gcatgccaaggataactaaaattggaaaacgttgaacattcacattttgcatcaatatattttgcttagattggagaaactattacgaccaaactgtgactgataaaactctttagcccaagctaaattattgagcgcagaataggccgcgttcaaggcaagagcataaccagccatggccttgtatgcggtctcaaggactttgactaccttaaatattggattcggagtcacaagggtaacagaggcgtcataaatatggatcgcaccctcatttgcggaatgcgcaagattgatcacactataaatctgacctgcgatagaaccactgggtccaattcgaacttgaacagggcattccggctgtttggaattagcgcaaagacatctgtctaaagagaattg

SEQ ID NO: 55546 - DNA, 305 bp, Arabidopsis thaliana landsberg
gggtttcgattttactggaataatctccgagagagcggcaagtttaacatcagatatgttgttgatcacagattcgcttttctgcgaattttagctggatcggtctttctttagttagtttatctttttgtattcccacttttgaagcttgttgataatggatgaagattcgtctatggtgtgctgacaacgatcaggatcgtgagtttcagagccctgatggaggccaatctccttcgcctatggaaagagagacgcctcagcaggtgaacgaccaatcacgtcctcctgacggcggatcggtg

SEQ ID NO: 55547 - DNA, 829 bp, Arabidopsis thaliana landsberg
atccatgatttgcttattttacccttacaggtttaatcgtgttggttataataattaaggagagtcaagttattgggtctacatatttcaaaatcaagacatgtgaattgagaaagaaagaaagaacaaaaggtctggtgaaaaagccctaaaaagagcaagaaaagggaaacatgtggagaaaagagtgtcccacaggcaagtcatgtgttcataaatcatacttacgacatcttcttaatatacaaaaattctttatatattaatatcatatatacatgcaacttgcaatatgtacgtatctatataatatttagtaagttaattataatttataaattcagaacaagaacatgttgggtcggtacctcatatttttttatcatcactgcagaagttgtgtggtagatacaagttccagattttgctatatgaatattgcgctaaacgtatagtactgagttcgaatttataatatgataaacatttaactatcttcacttaactattctaagttaatttgataaatatttaagttttacgttcatgggatggacaatatatatacgtatgacgtatacatggaaattaggccatgtttaatctacatcactgctatatatgtcattactattacaattttttattttttaaaaaccctaaaggtacataacacgtaagaacatgtttgaatcttgattgaactagtctcaagattttgtctaggataacctttgcctgaaagtacgatgaccaattgtaacttaaatctcttaaaaatgtgaaatgttagataatatataattttggggagtatattttcttaaat

SEQ ID NO: 55548 - DNA, 551 bp, Arabidopsis thaliana landsberg
accagaggtcaaagcctagaacgggcggaaactaacatggtcctggtaatcacgttttatgctttattttcatgaccgctatcgagaatttcatccggcgggcaaccgtgggtcgaccgcggtgcacgtccatcgaggcgtgcttctacgcagtccgcgacctgccctacgccttggacggcgcgcacgacgccggcgggctcctcgcgcacggccatggcgactgcctggcgaagaccgacctgcttaggctggatgcccatgaactgggcataccggcccggttcgcgcgctggctgtacctgctgacggacgtcgtacccgaggtcaccgagcttcccgcgcggctggacgtacaccgggcggaccagctaggcggtcgggggacaacacggacggtgggttctggccgacgccactaaccatcccggtctccggaacactccgctgctggtcagcgagtgggacgggcgcaacgacacgatgccctgcttcgctccgggcgggccggtgattgtcgaggaaacggcgcctgacgaggtcgagagcgc

SEQ ID NO: 55549 - DNA, 225 bp, Arabidopsis thaliana landsberg
  unsure (1)..(225): unsure at all n locations
agggcacgcagatccaaaaaacgcaaggtcgctcctccaaaaagaacnccaccagacggagaacgcaccaagctaggacccaaaccggaaggcccgagagcagaccacacgaaagctacaagacgccgggcccaaactggaaaaggaacgcgggagccagagacgccccaggcagaaagccggaaaccaccagggaagcggatgacaaaccagcaaacaacagca

SEQ ID NO: 55550 - DNA, 106 bp, Arabidopsis thaliana landsberg
tcaacctcttggttggtttctcaggtgcttaaaagaaccacagactagcggagttgtgaacaccactccacgcgatgtgacttgcggatacaagaagtggtaatcc

SEQ ID NO: 55551 - DNA, 428 bp, Arabidopsis thaliana landsberg
actatagtcgcgaggataaccacggaaagatccaataaataatgaactatagctttgaagccatctttggcgctgaataaacaatgggaagggctagtgatgcgtatgctggataaaccagagaatatatgtagaagtaggacgacccgagggcgaagaaagaggccgctcagacattattgaatctgcaaagaattgaccatgtgaaaacacatagacaaagggatgatctgatgagtacgaaaaagagcggatcacgtggcgacccaaatgagacgtctatattctagaatagactggatcttgggaagacctctctctgctctgctgctggatggatacgctctgcaagaactccgactcatactcttgcacctcatacttgtgatgataaatgatccgattgccccataagacccgccgaatag

SEQ ID NO: 55552 - DNA, 1066 bp, Arabidopsis thaliana landsberg
tttggtttaatgagaaaatcacgtgaccaaaccatttagtgattttcaagtgtcgtagatcttattaaaacttaatacgtatgatctgtctttgcgtagcatcaaggagtagacagagagcaagtgagagaaagaaagtaggttccattgatcatcatgtgcgtctttgaacccgaagctctttaagtacatgacgagctagcgctccaattcgaacaaacactgaaaaacaaaagacaaaaacagaaaaaatatgttgtctttattctctgttgtttttacttttctagctctttttctcatccctggtctcttcatctctcggcgactaaatgttcctttgtcgttgacaaatatcctcagattcatcaaaatcatagcttctaaatacgatgatgcagaagaaaggaacgagaaacggtagtttggtttttactaatcatagtttctacgtatttatgcatcttttgctattatgaaagtatactaactttgtttgttcttattacttatttgtagtggtacaatgggagagaaacagaaacgagggagaaatataatgccaaagcatgtggcggttatattggacggaaacagacgttgggctgaaaaacgaggactcgggacatcggaaggccacgaggccggagcgagaaggctcatggagaatgctaaggattgtttcgctatggggacaaacactatctcactctttgctttctccaccgaaaattgggaaagaccagaggtgattacacaaaacgttccaagagttttaatctgcttttgagtacccaagaagttatggactaaaaccaaaaaaaaaaaaaaattgtggaccttacgaatataacttgcatgcatgttaattactaattagtattttcttctcaccgcaggttaaaatttgtgaccttgaaaacttttgtgttttatataattcattttgattcagttttttctttttctttgatcaggatgaagttaagtgcttgatggccttgtttgagaaatacttagcgtctgatatgccttacctccgaaggtatctactccaagatgtttt

SEQ ID NO: 55553 - DNA, 496 bp, Arabidopsis thaliana landsberg
  unsure (1)..(496): unsure at all n locations
ccgatagtcgaacagtatggaaagcattcggaagctgtctgggaaggctccaagttctggaaacagtttttcgaggccagcgcaaacgtctcgctctcgggttacgaggcccctgaccaagacgaatcagctgtacatgaggagacggagcaatcacagacatatgatgagacggttgaagacgaggatacggtaacagggacgaccacgacaccaccccgacccttgtctgcacannnnnnnnnnnnnnnnnnnnnnnnnnnnnnctcgccttcgctcggacacagcacaccacgagctccaccttcaatcacaaaaggcaaaaatctcgaagacgaggaagatagtgaatacgaggaagagccccagtttgctggcatgtcttcaccttatgaagcgctgaagtctgagttcaggcccaatatcggcggcaccaagacgccaaagcttgaaccagtcacacccggcaagtcgcaagccctaccagacatgagcg

SEQ ID NO: 55554 - DNA, 602 bp, Arabidopsis thaliana landsberg
gaccgcgcgaggcgggaggacggcgcgcccgatctcaacgcccgcgccgacggtggctatctggaatttatcgcgtttatggacgatccggcccgcgccctcctcgcccgcgcctcggaggccggcgccctgacggcgcgcggctggacccgcaccattcgcctggcccgcaccattgccgatctggagggcgcggacagcgtccggcgcatccacatcgctgaagccctggtctaccgccgcgtcgcgccgggggacggaagaccgaccacacctatgcgggtgctttgacgagcgcagaaatgagcacggtctgggacaagcattccccggggaatgcaaacgggatcaggccgcctcaaccgcctcttcatcaatgttccccctgtcttcaaatggataaaggttcccaatcttcgaagaatcgcagtctttaagccagaaattgtagggtttgaagcggttgatcactctctttggaagcaaacaaggcttattgtaagatttcacttcttttgtaactgtttgcagcccccgcatgtctagcaattcattctctttcccccatacggacaaacttacgtttgttatttttaccatac

SEQ ID NO: 55555 - DNA, 536 bp, Arabidopsis thaliana landsberg
gctatttaaggtcaacaataactcaagagaggttaaatggcttgacgattctatgtgtcgaaaagaaattgttggatgagattgatctcaataatataatcgatgactttgtatcacgaaatgttagaagatatttttaataatatcagataataaataagtggttttgattatattttacatttgtcatcttataaacttcaaaacaacataataatttttatacatcaaatattaaattgtatatatgtgtgtggggatgaggcctcaatattggatttcgcactggacctcaacggccctgcctataagaaaaaaactaagggcgtgattgattggttactgcgctggtgagtgccggactcgtcggcctgttccaccagggaaccgccagacgcgcatgcaggcgaaaggagtgggaaactaggaaagtacctgtaacgtgcagggtgcggccgagcaaatcaaatcacactctaattagtaaatcttcgagactaagctttaatgcatggactccactatatgcatgtgtg

SEQ ID NO: 55556 - DNA, 677 bp, Arabidopsis thaliana landsberg
attcttacatgagctttttcttttttgttagagggttttcttgcatgaactattttttatgtaagagaagaacgttgcctttgttctattttaatatggacatagatacaaagcatataaactcgctaatataaaggcaataaaattttacaaaaataaacagtgaaacataaatctggtctccctaatatgatcaacaatggatttgaaactcaaataatatttctttcaaaaaaaactcaaatatctcatgcattacatgtccaatatactcttggtcgtaattattttaaaaaggaatataatatacagaaggaaggtagcataactaaggaacttttttcaaagaatataattttcaaataaaaagctcaattgattaatcaaaagaaaattctcttacagataagcacaacaccacatcagtttaataacttaataagtctgctaccaatacgagattccataaaatcattaacaatttagctatattattataagcattggaatctaatatgaagattttaactaaaggagaagaaaaaaaaaaaacaatcatcacccgtacaaaatcaaacttaattcatccacactagttggaaacacacattaatatatatacagctatcactgaaaatatataaacaaaatcgtataatatatagtaactttttata

SEQ ID NO: 55557 - DNA, 964 bp, Arabidopsis thaliana landsberg
accgaacttcaataccaaagccaaactttatgaaaaactttgagaatgagattatacaactctctgtatgaaactttcattaagtgtccacatactcacctgaaggatttcacagcgtttttcaactcttggtcttctagaatgtttctagaactgataggaacatctaaagaaggatatcacaagatagtagatcagaacacagagcctaacgccaatagtaaagaaaattcacagaaggcttcttcagtttcaatcaacatttcaacaaaacttactatattgctgcaaaactctgacggctagtgagctaaacccacactgaggagattcagggacacctttcatgtagatcataacaggattatccttcacatcctacacaaccaccaaagctaaaacagcattagcaaacacctaacaaagaaacattcaacttcaaatctagagaagctggagtgtacattctcaacgatatctttaagtgagtccgtagaatcgggagggactttttgtgtaggcttgaaatcatcatgtgtatctgaatcacttggcactgttgaggaaaatctcatcatcccattttggtagactgatgcagacgtctgcaaacaaaaaccacatcattcttctccatgttaaattcaactatcaaatgatcatcaataccatcttctattggaaacaaattcattttcacataattcaaaaccatacgctcacgtaactatctaatccggttcaactaacaaaagaatcagaacctcaaatgttatataaaggagcaatttttaagtgattcaagatgggaaaagagaaaactttattgagcaaacattagatacatcaaaattgagtaaaagggttatgagagaatctaaccaatctgctagaacgaacagctttgagattagcgattccttttataagtctgctcgataaagaagccgccatctctaaatca

SEQ ID NO: 55558 - DNA, 1093 bp, Arabidopsis thaliana landsberg
tacgttttgactaataaatcaatttcagttattttagtttggtcataaggaagttttttttttataaagtctcgttgatgttgtttgggcagttaaccaaaaagggaacaaagctacatggtacagatcattcatcagcttaaagaatctttcttgtcgatctttttttaactagattgtgatcttttgggctttgtgtccaaatatttatttattagtactatcaatctattaataaattggatttttgttaacataacctttcattagtgtaagggacaatttaaattattttccttcttggttcactgaatctctcttgggcttaaaacacatggtgggtgggttcataagaattggagatttgataattttagtaattaacctcgaaacatgagacgtcagttacaaatcagaactcgtttattgttcaattaattggttcgattcaacaaatgttttcgtttaatcaagtgggttttctttatttttgttctttttttttaatgtatgagagttattacgtggagaccagaagaataagatcgaatcggggatgttttaggaggagacatatgaattataagtaacttaaacaattcgagattatgtaatgattttctataattaaagattgcttggctcaggactttagatcgaaagttgtagctcagtaaatgtttttggtagtaaattgaatcgatttgatctacacattcaaaccaagaaaaactgattagtaatataagtggtaggtctttcaacaaccaagtgttgcaatcgatattagtgtttaagtaggcccaacaaataataaatttagcttgggtctacgtaacatttttagaaattctataatcggaaatgtcaaaaaacagccccttatatctaaaaccatcgggccacaactttacagtatttaacgtaaacgtgtatgaacttaacttaaaatgtaaatgaaatgcaatagttgatatattacaaaatcacagagcaaatttacattttgtgctccctaatcaaatccgacttttagattgactaagagataatcggatatttactcatcccgaatcacaattttttggtatga

SEQ ID NO: 55559 - DNA, 547 bp, Arabidopsis thaliana landsberg
actccgccggcgtgatcacgcacgaccctgtaccactccaggacgagtaggacgcgcacgtgtcatcgagccagacctcgaaagcttgcgctccagtgtgctgaaatacggtcgcggcaaggctgttgatgtagtcaagcacgctcatagctggccgcgatgcaaacgcgtcgcttggatcagcaagattcacgacgaggctgggttcgttgtgaacaagtgcaggcgcgacatcctcgagaccgtcgccggggttgaagtaccctgcagcgtcttgcgcagacgacactggctcagccaagcggctcagttcatccacgagaacctgcatcggatcgccccgaccgccgctcggatcaaaataagatccggcatcgccagagcccgagcatggaagccatctgccacgctctccaggtgccggatcttttcgatcgcgcgcacacggcggaatcgtccgaggtccgggtgctcgcgctgcattcgccgcacgctgcgaggcgcgtgtctgctgatctgccgaagcgtacgccacaccaatcgacag

SEQ ID NO: 55560 - DNA, 996 bp, Arabidopsis thaliana landsberg
aaatcccacagaacaaagacaacaacaacaaaaaaaaagattgaaacaatggtggaataataaacaatgacgacgaaaaggaagagcacgaagaagaagaagaaacggagaattcagtttcagcagtgtccacgaaagaaactctacctcggaccacctcccatgacattatcacgtctagatcccatagtcatcataatcttaaactcttcaaaatcaatcgtaccatcaccatctttatcaacaccaccaatcatcttcctacactccgcgatcgaacattcatcaccaagactcctcaaaacctcatgcaactcctcagccgatatcgaaccattcccatcgatatcgtaaaccgaaaacgcatctttcagattctccaaaacatcattttgatccatacctttcgtgttcagctccacaaactcttcaaagtttatgtaaccatctcctttacgatctatctcagtgatcgctttctctagttcttcttctggtacctcatgacctagactcgtcattattgcaccaagttcctttgacgagatcttaccatctccgttcacgtcgaatttcttgaaaactgcttcgagttctctgatctctgttttgcctgaacgtgccttttgaaggtaaggtgaatcagctccgatgccgacattggaagatgaaccaccgttggatccttggtttttgttgaacatattgttattgttccaaaatcacacaaatgagaagagaaaatcggattaagagagatattcgtatttgtgtgtttcccaaaggaagcggatgattctcttgatcgctagctaattttggaaattttgtcaactaaatctggaagatttcctaaaaactctctcagttttatgtaaatccgtaattaaaatatggatatggattaaataaatatttgacatttttgtgtcatgcgtaagtactgctctttcaaatcgagtagcgaccgcttctctctataacctttacatgata

SEQ ID NO: 55561 - DNA, 1079 bp, Arabidopsis thaliana landsberg
tttaggttctattggaatcttaagatagattaccagttagaaatcctgtgcaagtatagaaagttttagagtcttgctttgtaggaaaatatcccccacctgacaggttcttgggatcgcgtcatcgaagctagttgattggttgataggctccatggatggtttcttgtagactcagaacaaatccaacatcttcgaaacttgttctgattgtcagttatgcttcacagatgttttttgttcactttgaaaacgtgattgcaggtatttgatcacgacaagaagaatgtgaccattctggttcaacgagcactgttatacgagagcatggagaaatacaaactcggagctgaagacctaaggatggttctaaagattgatcccgggaatagaatcgctagaagtactgttcaccgcctaaccaaaatggctggttgatccttcatatatacggatactaaaagaaaaaaaaacaaaaaaccctcaaatatctataatccttcacattgctttgctcaataccgtttcctctctcatccatggaccatgcgtgtgtgtattttttttctgagatttattggttcgtctataatgcggcagcttcttgtagtaagtgggtcatgagtgtatttttttggatggtgcatttatatgttgttgattttcttacactaattttttttgagtttatcatgaaatgtttgatcatcgatgttatatgaaatgccaaagatgaccgtaaattcgcatcgtaactcgcaaagatgaaccttactttgagacgctggctgcgtgatggacgtgagacgcataacgcatactattaaattaccagacgctcgtgaacacaacactccaataccgaaaactaaactaatcacattgtgatacgtcttgtattcagagagccaaaaaaggcttataattttgtcgatatgtggattagccttcaatttgttgtaaccgtcatgtatcaaggaacataaaactattagaattattattctaatataaagtaattcatttcactcacactttattaccataaaacatttattttgcgcctataaaggcatttc

SEQ ID NO: 55562 - DNA, 132 bp, Arabidopsis thaliana landsberg
gacgagccgacgcctgcagcgtgtcattaccgacggcgaactgccgccggaccgcagtcgctcgacctggccggcaactgcgccggccggccgggggcaggccttcctgagccactgtaacaacctgttcga

SEQ ID NO: 55563 - DNA, 468 bp, Arabidopsis thaliana landsberg
acgaagtgatttctcaaaccaaataccccttatagaatcattttgacaaaagataatttcctaaagagagattggagaggtgatgaaaattgtttcttaacaataaaaaactatccgacatttgatggttcatgaatcgaaacacgtaactatacgcacacagcgtggcatgatcgagacatgtaagtagagccatcaggcgatcttttgagctacctctacctcggaatattcatgattcatgaatcgagcgaattgtggccgtttccaatccttcatgtcttagcagttacactatcttctgggaaggaaatgccgcggcgagacattcgacaactccatggaagctgctgaacctggtgctcacgatgtccacctcgacgccgaggttcctcgcgcaaccggcggtgaccggcccgtgcgcggccacgaccatgccgggccacgcgccgccagccggcccaggtc

SEQ ID NO: 55564 - DNA, 859 bp, Arabidopsis thaliana landsberg
ttattttaatgttatcatgatgaaatacttgataaaatacttcattaaaccggaagaaaacgagattttttcgaagtttaagtcctaagtaaaaaagtcataagtaatactacaaagcaagaggaaaaaagcaatagtagttgaaatcccaccaaaactataagtcgcatagttcttgaagattatttgaaagaaaagtatcgcggatgcccaccaccaaccaacgatacacaagtcctcctattgagatgaaccacaaccttcagatttcagaatttctaagctttataacctgataaccactgcccaaactttctttcgtatgtggtgatgtcataaatcgacaagaaacaataaacattaagattatgtgccttcattggatcatggactgaaaattaagctcttcgatcaactaaaacaaatttatcatcatcgttttcacactcgctgctaagtttgcaggggagtattagagtccacaactaaaacaaatccaaacccaatgtgaggtctacataagtagaattttagcaagttagaagattcatataaacaattatgtaatgagaactatgattgtaactctgagacaactctcttccttcatcttatgagatatcaaatctagaaacattggcttttggtgacaaaccttaagctcctttacatttttctcttctttacatttcaataaagctcaccagaactattgcatttctatctttatataataagctcaatgaacatcaatctatatttgtcttaaacatgtcaaatagatagaagtttcatgaaaggaccagacctcgatcaagtctgagaagcatagactaggagtgacgattagtctcgatac

SEQ ID NO: 55565 - DNA, 1270 bp, Arabidopsis thaliana landsberg
ccatcgcccatgtgctgaaactcttctcttaacagtctcgatcaatcctatttaaatctgatttatcctttgtcggcacttattcatggctaatatcttgtactataataattgactccacatacataattacataacataaacaaaaaaggtatataaaagaggaagacttgttcattatataaaaaacaacttgcacatgcaagtatgtatgtggtttttgttcttatcttaacctctggtctcttatataaaccacctaaatgtttccatgttctatgtatcccaaagcttgagagaaaacagaaaagaaaaaactccatagaaatcaaaagtagaaagaaatgatgaagtttaagaccaagaggtttgggattagatttggatttggtaaaagaatcaacaacaaaggcacacaacaagatcaacaacaaaagggagttggtaacaacaacaacaatagtagctgcagcaactgtgagatcaaatgggaacttaggccaggaggcatgcttgttcaaaaaagacaagagagtattggtgaagacttgatctccattagagtctctacttttgctcattttcatgatctttccattgaagccacctccacttttggtaagtttcttgtccctcagcatttctcaacctttatgtttcatcttttgggagacttttaaatgactctttatcagattcataacataagattctatttatgggtttacaggagaacttaagatggtattatcattgcttaccggtttagagccaaaacaacaaaggctagtattcaaagggaaagaaagagaggatcatgaatatctacacatggttggtgttggggataaagacaaagtgttgttgttagaagatcctggcttcaaagataaaaagcttcttgatcttaacagcatttccactacttgtccgactataatcgtataaacaaaactaaacaaaattgtcaaattagttgttttgtcaatttctttgtgaaataatatcactcaagaaaattaactatagctatggttgtcatgaattaaaatagacattccataatatcattcgactatttctaagttgtaaacaagctaatatgtttacatgttgtaatatagtatatgtcaaagtttaagagctcatgttttaattagctgtttgctgaagaaacatttaaacaagaaaccctgacgcacccattaacttctcatttttataaacattaatgttcagatgatttggtacaaattagttgacttttcta

SEQ ID NO: 55566 - DNA, 495 bp, Arabidopsis thaliana landsberg
ttcgtttttctcatctcaactagacttgcccaagtaatctctcactgttgtatcatctttgtctatattctctcaaacattctgaatctgtgtggcaagatacagacgactattccagaggtcgatgtgtcttttgtcttatccacgattactcagcaaaaccatgtgtagattagaacaccaaaatgtttaacattcggcttcattggcaaacattattatttcccagaaatgaaaaatcctcaaacaacagatctcttacaagtaaaaaggaaacaacagtttaggttcaaagagcgtaagacactgagtgatagcatcatcatagtctcttcaagcttttctttctagcgtctaccttcttcttatctgcctgaaccttggccaaacctgcttcccttttttgcgtcgtagtgaccacacttgcagaggctgctacaacgacattagctacgtgttgttggtcttgggcactcgttgttatctctttatgtc

SEQ ID NO: 55567 - DNA, 156 bp, Arabidopsis thaliana landsberg
  unsure (1)..(156): unsure at all n locations
cagctatactattatataggttcaatatttaattaaataaaataaaacaaagaaagngataattttcacaaagatcaatacaaaanngcttttgagtatctccgagggngccctttttagagagacgaacactgaacctaaccaaaaaacttaaaa

SEQ ID NO: 55568 - DNA, 841 bp, Arabidopsis thaliana landsberg
ttcctaaatttttatagttagtctacgttattttaatagcacttggtaataaatctaggttagttaaccggtctactataaaccggtattgcaatcttaactctacgggtttacccaaaaaaccagaatttttttttttgttctgttataacaaaacaaaaaacattggatctgtaaaagaaaaatcgaaaaaaaaaactctccgactcggaagaagagggagagagatgaagaagccggtcggagccgagaagaagagggttaaacgatcatcgggatctgcatctacttccgttagagattctggttctgattctcaacctagggtttgctctcctctctcatttctctctaatctcttttataaaaatttgttcttaggttacgtttccttttgtttgatctgttttggtctctgatggagcatttgacctgcgattgcatgattatataggcctttttcatagttaagttttgctaaattgtatgttaatgctcgtaaattttactgttttggttgtgtgacttgtgaattataatctctggaatgttaattgaatcacttgtgtggcgagaatttgaatttttttgttttggccttggtactgttaaatgatgatcctttgcatttagtgattgatatgctcaaatgcttattgttgtctttactttactagaagcaagctgtgaagaaggatagttttcagttgtttgctgagaaagttagagaccacaagggattagaatccagatgggctgttatggagcaagcacgagttgaatactttagagggaaagattttgtgagctttatgaagaataaccctgactttaaagatat

SEQ ID NO: 55569 - DNA, 659 bp, Arabidopsis thaliana landsberg
attgcacttgttttgcgtctttttcagtctcacatgcttccttcctttcttgttccttcattgttcctcatctcataaacacttatgtcttcttcttctttttttttttcttttttcgttatgaaaaacacttatgtcttcttgtgtgtctattctatatatctttgtcacacttcggccaatgtttttcgtttgacatctccttatcatatccagtttcgaataattcccccgtaaatattgtttctagtttggaccatacttttacctaaacataataatacaagacagttaaaaaaacaaacaagatatatagtacaaaacagaaacttacataaacatgacttcttgtttgattgttatgaaagcaaaaatatttttgtgtccttgtttaaaatactatgcctataacaataatatactccaaaattgagtgatactatttgggagtagatatcatttacacatcatacaaacattacactaatttctatttgtatgtttaagagaaatataatctataaagtaaaagcaacaaaaactgtaagataatgttcgctaaagtgaggttgaatagataaaatatttacaaaaaaagggttacaaaatgatataaaatggaaatgaatcttaaaaaatggaaacaactatttgagtta

SEQ ID NO: 55570 - DNA, 414 bp, Arabidopsis thaliana landsberg
gaactaaattacatgtaaattttactccataaattatttaattcctccttccataaaagataccttgtaattctacaagagtagaccaggagcactacgtctcagggtttcatacaccaaaaatcccaacaatcccagcaagcactatactcaatcccccataaaattccaaaacccaaaaccaagccatataaatgatatactccgtatataatacaaaatacatgaaagagcagagagtaaacaaaaagaaattgtgaagcagcttccaagccgcgtgctcagctctgcgcttccacctacgctgccgctataaatacactgtcgcgtttctttcttgttcctctattctcccatcttcccacccagtctcccaagcagaagagtgtcagcagtgcagtaaatgaacaaccg

SEQ ID NO: 55571 - DNA, 498 bp, Arabidopsis thaliana landsberg
  unsure (1)..(498): unsure at all n locations
tgagaacgcgctactttacagcagctgaacttttactgacactcgagccatgtgatcctgagccggtccagccatgaaagcgccactatcaacaataagaacagtcgaacaggctgttgcagatagtgacaccagacttctatgtgaagctgcagagaagatcttaatggaagactagatatttgtgtacttaagagatgtagtatatgggaaatgtaatattcgacacatgaattgaacattgtatatctatgtgtatattaatatagcatatttctatgcgatgcctgcaatgtgcgtacacaccatttgtgcgccttcggcaaacagatttgctcggcattgcagcctagtagtagaaacagtgttctatggctcagctattgtatgatattgttgtcgcgggaatcgttttggcatggaagattataatcggcgacgctgtgctttgtgctgcatcangctttcctagatagcacattgagactgaagcagata

SEQ ID NO: 55572 - DNA, 411 bp, Arabidopsis thaliana landsberg
acaataaaaaacacatatccaaagattgataaattacatattttttttgtgagactgatttgtgtttatgtttgttgtgtatagatgaatctgccaaagcaaggatctggaggattttatcagcttatacagcctccttcaagccaaacatcttctcttgacaatgtcactaaatctctagatgaagaaaaggtaatgttttgagtttattccttttgaaacaaaatcaaaggaatccatctgagtttacattcttaataatctatctcgattattctttgacagatctcgtacgcgaaaaggccatggcattttatggcagatacctgaaaatgtcttgctgacaccgagcacaactatctaacggttggaatacaggcttaagattatcgagctatacacatgtgaaca

SEQ ID NO: 55573 - DNA, 515 bp, Arabidopsis thaliana landsberg
ggttgccatccaaagcaacccctcgcccgtttttaccaaagacgtggtaaagcgcatcattaccggcaatttcgaggataacatgaaagagatcagcggctgcgactggatcattgaagtagtggtagagcggctggatatcaagaaagctgtttatgaaaaagtggagcaataccgcaagccgggcacgctggtatcatccaatacttcgggcattcccattcacctgatggcggaaggcaggagtgatgatttcaaaaaacatttctgcggcacccacttttttaatccgcccagatacctgcggctgctcgagatcatacctaccccttataccgataccgatgtggtggatttcctgatgcattatggtgatgtataccttggtaagaccaccgtactctgcaaagacacgcccgcattcattgccaaccgcattggtgtgttcagcatcatgagcatattccatatcatggataagctcgggactaccatcgatgaagtggaagcactta

SEQ ID NO: 55574 - DNA, 1032 bp, Arabidopsis thaliana landsberg
ctggtgtcctgaaaagaatttaccccaggtaaccgatccttatctgtatcaaagacattctgtagtagaatggctccgttttgaaccatacgtaaacctattttatttgggatcttagtagcctttaggccaggcgcatctttcttgactatgaatctgaaagagggttgctgataagtttctaatgcaggaaatatagtctatataagatgaatgaggagccagacattagtccagtatgcacttgataacggtccttaccaaatttattgttcagaacattcaattgcgtagcaacctatttagcattctttatgaaaatggatttttacagcactaccataagatgaaatcaagagccacctcattaccttcagttttctgggaacgacctctacacctaagatacaaaatctgagagatctaagaaagccaataatctgacttacccgttgatttggttagttgttgtattcctcgcaaagatgatcaacagatctgcaaaggtgctgtttccaatccaacgcttttgtccattaattttccaacctccttcaacctgatacagtaaaccagtcaaaacaatgaaacattactgtacttgcataagtatagaaagatagatacaagtaactgaatactaggagagaaggcagccccacctttgttgcagtcgttcctagaccacttgcatcgcttccattgtcgggctctgtcaaagcctttatagaagtccaatataggtaatggtatcaacaggatgtttgtataacacaataaaacactattcagggggatgcaaatcatctaattccaagatccacgtactcacccaacaagccacagtattcaattgagccaaagaaggcaaatacttctccttctgtgcttctgatccacagagtgctattcttgacaaaatcaaaggaaataaacttatgcaaatcctagaatgatctttactaggacaactaaatattaaacaagcttagaaataaatattaggtgctcttaccaatagtgagcatgccc

SEQ ID NO: 55575 - DNA, 363 bp, Arabidopsis thaliana landsberg
ctctacggacccaccttggcatgtttcttttgacactgaatcccatttctgcaacggctgtatcgattttctccagtaaatcttttgctgagctatttgaagagaatcttattctcctctctgatacattctgagaaagtaaaagaataactcctttttattatacattggctcaagcagagagcggatctttgaaacagagtattagaagattatttacctcttgttcaaagaaaccgggcaggtcaagaaaggaaaactttccgattaacatgacacgcattgatgatagtcggagaatcactgtccttaccttcttctgacccctcgaccatatgaaagagagaccgggaattgcggaca

SEQ ID NO: 55576 - DNA, 605 bp, Arabidopsis thaliana landsberg
  unsure (1)..(605): unsure at all n locations
tgtcactaccacaacctaaaccaacttctactggatccattaaaccgttgataccagctgatgcaattgcgtcgagattaggtatgtttgctgcttgtaatggagttttgtaacctagttttggtattgttacatctcctaaaccatcgattagaacaaaagctactctctttttgacttttacatgatcttgttccattttttttctttgatcaaatgggtaatctagaaaacgaaaaaggaagagactttataatctgatcgggaacaaattgaattgagagtaaagtatttgcatgattcgaaatttgtttgcttacctgagaaacagagaaatgatcttcaattcaaagaatgtaactcttgagcatcaatgacagattgtttttttttttaagaatctttataaaggggagacgaataaaggatttaatagagatttaatccaaaccgaatcagaatataattaaccggtttagattgaaccagccttccgagagtntgcgattgggtttggaacttttggatatacgaatgatgggccattagcccattaccaagcttttttaggccgatagctttttttaggccgatagctctttttt

SEQ ID NO: 55577 - DNA, 786 bp, Arabidopsis thaliana landsberg
ctgtttcacacattatattgtaaagtcaagttttcaaatattatgtaaacataagtcttatagttaaagataattcttcacaatgacacttttcatcttatccataagtaattagttatcaatatcatgaagcttaaacactaggtaaataataagtgagtgaaatatatgtactaatgtattgcttcacatttgttattaaattaccagcaaggtaggaacacaccatgtggactctttcactactatataaatgtggactctttcacaattattatatgacattaaatttgtgcttttattaaattttgtaaacttttaatacaatttaagtttcttattaaaaagaaaagttaatcccttatgaagccatatattaaaaataatgtggtatttcattatccattagaaaatgtgagtgaagaagccattcaaattggtgtaactacattgatgtggtgatttattgttaacgggtctttcaggcgtttttatacgtttgttccttgacatgtcgttacaatgacattgagcaaaccagtttcagtttagtaccgtaaactgatgtagttgatttaacgtcaatatcccaagcataaatttatagagattaagacatcccaagcatcgtattacttttggttacaccatccatctgactaataattatgcaatctttttgaagtttcacccgaatattacatgtttgtacccaccatcaccaccatcaacgttagaatagctaatacaggatatggatatcgtgcaacttgtgctttctcctcc

SEQ ID NO: 55578 - DNA, 140 bp, Arabidopsis thaliana landsberg
actatgcatgtgtctctgtatatggacgcatgctgtgggcgttttatttttcaccagaacaattcttgggagaaactagttgaagaatcacaccgactgacttagtcttgtttaacgtggagttcccgataagagctaat

SEQ ID NO: 55579 - DNA, 289 bp, Arabidopsis thaliana landsberg
atttgattaaatgagcataaaacgttaaaaaacgatgcaggaggtggggtttaaacccatgccctgatgaaagaagagaatgccaagagacactaggtaaaattgtctaaccaatagaacataatgcttagatgtttttaatatttaatatacactagttatatatatatatatatatatgtttgttgtagtatacataatatagtcgtgtcttaccggacgaatactacagagcggagttatagcgatttcggggtacgacattcttggagtaattgctacggagtac

SEQ ID NO: 55580 - DNA, 1058 bp, Arabidopsis thaliana landsberg
ttttttaaaaaatttttttaaaaaatatttaaaaaaaaattttttaaaatgaaaactttttaaaatatttaataaaatattttttaaaaattttttttaaaagcttccaattcttccaaagataactaaaaattaggatcttttaaaactgaatcctataccttcaaaactaaatcctaaattaaaaaaaaaaaaatctaaatactaaaaagtaaaccccaaacccaaaatactaaacctaaacctaaatttttaaatataaattactagaaattatttgtactatttgtggtatttttggactaaatatatttgtagcggtattttttaaaaaacaaaacttagtttaattgtattttatgtcaatgttgaggaatgttgtttacataggtgacaaagatgcggttgagtgatagccttgattagtttcataaatgtttagatgtacacataaaatctcgaacattattcctgatcaacaacagctactaaaatatggtaggaagaattctatgttcaagtgttgattatcaatgactatttgcatggggcattagcatggagtctctagttatttgtacaataagcatacaatgtatgaggatcatgttcttcatttaaattgttataacttggacggatttagttttccagaccgttcaagcgcaatctcaaaaagatcagcatcggattcttcgtcatagtcaagcttacgtctatgactatttcccacggtggccctcccgcttgcaatctcgtcactatttcctcggttaatgaaaaaattacttaaatagtgagaatctattcttccaatggagaagagctctttgctgtcctcgagcccggctacagcaccagcacatgggtttgatgtccgctgcccgtttgccgggccgtaataaaatggagattgccccaagttgacaagaactgtggcctctgtgttggaagcaagagtgggatatagaagtggcccgaactcgtttgctttacagtttataacatgaaccacgtgtgagttaactgtgaagaaaccttcttctttctcggatcgt

SEQ ID NO: 55581 - DNA, 421 bp, Arabidopsis thaliana landsberg
gaagaaaaaaaaaacacaatccgagaaatagtaaagacaaaatagcaccaacgatgaaaacgattttagaattcggacgattctctacctgacccaaaacaccttacatagcaacgtaagagaataccgacaacggcgattcgacaagatcaaatatctagatcttacacggaaaacaaaaaccatggaaacgacccgaatccaaaaaactacacggacccaggcccaaaaaaattttagcataaaaaataaaatatgttattattaataaaaacaacagagacgacaagacggacgaatatgacacgcaagcaaggggaccacaatgcgaagaagagagcacgaagcaatataatatacacacttacatctatgaagctatatacattaaaagaattataactaaaacactccaatggag

SEQ ID NO: 55582 - DNA, 487 bp, Arabidopsis thaliana landsberg
  unsure (1)..(487): unsure at all n locations
ggtcttactttaatgaatagcctataatatttaccactacatatattattaataacaaaaaatactatctattatcgtttacttagagaatcttataagtatatcaattttgttactaatatatttccatttaaaatggttcaggaggtggtgtaaattttttttttagtaagttcgattttctttatgcaattagatacttttcagtacgttcgatttcatttgtctctggagcgaaaaaatttaaaattatttttgatcgttttcaaaaatgtgatgccacgtcgttgtaacatcaccatccgagttagcaacggtttagtaattttcgtaaaaatcaacttcgaattaggcacctttattgaagttcatacaggttatttgaattttttagttgaaactntgttcgtaaatgaaaaagtacaatggaaaaagtttggtctgaataggcctttttccctagttttgtctcaactgttttttgaag

SEQ ID NO: 55583 - DNA, 503 bp, Arabidopsis thaliana landsberg
aaaagaataaaatggacctacatgtatataacacaaagatagaatttatataaaaataaaatatttaattataagaaaaataagaacgataaccttagtcatagtagtattaccaaaaataattagataaaaaacaatgaaaaggcgttatgagttaattatatatatatatgctaaatatttatgaaatttaatagaataagatataaatatcgtaaatgattttaatctacctatattaagccagagaactagaggaatatttatggggagaatcatggttttaaagaaaaaataaaacaaagttttatagatggatatatagaaaggaacatatgcgaagtaatgtatgaaaattatataaggattgtatggtcaaaaatgataacagaaatgtattcttggacaagaaatttttacgatgatggctcgaaaatgaaattatatatactaatattaaaagagtattatatcaaaaataaattaatagattatagaagttt

SEQ ID NO: 55584 - DNA, 589 bp, Arabidopsis thaliana landsberg
ggccagccagggctacatagtaggttcatcttttaaaaagcaagaaaagaaaaacattttttctatttatttagttccctttttatagaatatagttttccccttttaaaacattagcacaatgtctcagtaatatacatctggacttctgtcaacaacacaggggcctgaggccgtcacgggggcccaccttcagagccacgaagcttccattgagttcaggctgtatgtaataaataaggagaaggtggacagtttggaagcacgattgttttagaggttttcctaatttaaaagcagaattgtgccgatggaaagccaattaactgagaatttcattggaggcagtaacttaaggaccatggcaagcttgacaaaaggtgcttataacaaagtagtagtagtaaggctgtgtttgagatgagggggctgtgggtgggcggtgcgtaacataccgtcacacaacggtgcttagacagtctacagtgactcaggatagctctggagccttttcacactagcacgggtactttttttaataacttggagaaagaaacagcacaagtgactggcttagtttctagaaatc

SEQ ID NO: 55585 - DNA, 868 bp, Arabidopsis thaliana landsberg
ttgatcattgctttcctctacaaagccattttcttgtttggtatatatactaccttaatcaagcattcctatcaccagagcgctttatttgaagcgcggctctaaccacgtttcctcttgtgatgataccaaccttttttcaaaaggaaatataaaaatagataagcgatgcgaaacatggtgtatttaaaagttcaatgcgagatgtgtaaatgtaaaatctctcttctcttaccaatttgccatcagaatctaccacagggagccggcgatattttgtctcaagcaatattctagtggaaaatagaataataagctttaagttagagaagaatttagatagagatgagaaaagaaatgacggcactgaaaaaaaggaaagacagtaacttagcagcatcttccaggttggttttttcctcaacaactagtggagctggtgtcattaaatctccaacaagcttcccattggttttgctgagtagcttttgcacagcattgaaagtctgcaaatgtttttattggtcaacatgatatgatacaagaacaacaaaagttaccaaaaaagagaactatagaaccaattcattttgagatggtttacactatcagatttgaatccactttacagaatcatgtctactcaaactagggaactgaatgtaacattaacataactctaccatatgcatatttcatatgaggtacttctttagtgcatacactcataacaatcagaagatcctataacaggttcacaacaattagctgaattattgtgcatggtaattgcgtaaatcaaaacaagttccttggaactttcaatacacactatctactgctgataatgtgaaccaggcgaatgagc

SEQ ID NO: 55586 - DNA, 593 bp, Arabidopsis thaliana landsberg
atatgatacttacaatgaaggtgtcattgaaggatgcaaagatgtgagcgacaccaaagacatactctccttcacggacagtgggtccaagggtgacgttctcctccttgggctccctggtcttcctcctcgactgcaaacacatacaactataagaatgacactgggacaagttagcctggattgctatgttgtcgtgctaacaacctccagaaactattccacagtacaagttagcctgaattgatatgttgtccctgtaagagcctaagagcttcaaaaggatagtaatagtaattgagcacgatacagagagctactaatcatgccaaccacttcaggacctcaaacaagacttgcattgcatgaaaactgatagttgatttgctctaataaaaagctactaaaaattgtactgcatgaaaactgatagatgacgttcagcagcaaaccagctcagtccactaatcaagccaaccatttcaggacttcaaacaagacttgcatcacgatgtatatgaaataattgaaattttgccacttgaaatgttgctccttgttataattcctatgtgctaagaattgtgggggga

SEQ ID NO: 55587 - DNA, 604 bp, Arabidopsis thaliana landsberg
  unsure (1)..(604): unsure at all n locations
ttttttcttaacattgcaataattacaaaaaattttttatgtttttcttaattctcgtaattgtttaaaaaattattaatatacatatacataagtaaattgtcttttctagattttaattaacatttgtcatttgtattctgttattttcnnnnnnnnnnnnnnnnnnnnaataatgtagattttcccgaaaaggaaatacagaaaagggaactataacattatagaaattatcctacgaaataaaaaaaaagattatagaaatttaaaatttagagaatcaatcgacactctcattaacaaaatacgcttgcaaatattaaggaactttgataaagagcagtgaacgagaatttatttaataacttctcaagcaagctatattccctctctctcctcatctgtatatatatatagctagattttcacaagaaaaattggagactaatcagtcatggaaagagacgatattaacttgactttccaaaaacggcggatagattctgcgacaacagaaaatagtccaaccctaaaggcgatgatagtccaaggtcgtaantccgctctcggcacacaatcttcagattgtattcaagggtttggt

SEQ ID NO: 55588 - DNA, 566 bp, Arabidopsis thaliana landsberg
ctgtcgccgtcgacgaccatgacagaagcaattaatgagtaatgtgcgagacgtaaatgggtggcaaggttgaggcgatggtgtaagtggcagagctagaattcgggccattccgaccggatcgaccaccttggctccgatgttcacgatctaatcgaccctgtttggcattcacccttatttgttcaagatgaagacatgatcaccttcgcgggcatgtgcttcgcctcttagcccattctgtgcaagagttgcaatcactatggagactcggttggcatctcaccgcttgcacattcgccagaacttcggtggctttagctcagccgctcgagcgctgtgtattcaccagcttcgccctgtgatccttcaaggcttctcaaagtcctacaaatcttgctgtgcaatctcctactcgcgcttttcctagtgtctgggcgctaggtggcggcgtaaacgctggctgagatctacccaacagacgatccatattgctactccactggaacctgtgctcactccaagagcagtgccggagcagatcgaactctgacagtcctgttcgt

SEQ ID NO: 55589 - DNA, 1020 bp, Arabidopsis thaliana landsberg
tgccaaaacctacaaaatcgtaacatcaccggattctacatcctctaaaaacccacaaaagcattataacatctcctccatgctccaaaatccacctaaaatagcaactcttttaaaaaaaaacaagtcaaagtcagagatttgatagaccaaaattattacaaaaccaaaaatgtgcataaagagaagagttaaacctgatctactattttgttagttgagttggacctagagaccgagactcctctattggagtatttttctttgacttatgcatcttcaggaccatattattgcatttggttacattgtggccatcttctccacatcttccacaatgcataattctcctcctccttgaaactttcttaattggagattcatgtcttccctttttttctttggtttcggtttccttcctttcatgttctggatttcctcaaccatagcaggtggcgccttaatcacatctccagagatcctccaaaaacacagacattttacaagttctattgatttactgtaaatatgtttctgctttgcattcgagtactattcagatgtgtaatcttcatggtttagtctcttgttattaatgattcgtaatgcatgacgacaaggtagcccagtcatctcccatttccgacaagcacaagtcttcattcccatgtgcaagctgacatatttgccacaatcaagaacctcacatctaccattctctaatcctgaaacatacttggtgaacttcaatttttcctgctccaaagctatgaactctgcagctctctttgtgaatcttcctttgtaagtctccgctttcttcatccgcatctcaatacactgcattgttcttctcctcatagtctctagcatctcaaccatcggcaaatattctgtaggatcaattgcattgttgaatgactctaacatgttattgtgcacatctttacaactcgttgtgggtgcacagaaggcaagactgcaattctatggagttctctgcattattgcatcatacaa

SEQ ID NO: 55590 - DNA, 828 bp, Arabidopsis thaliana landsberg
gggatcgttttatttaccttttcgtgtttggattctttgcaatatttcaggtgtattctgtaatcactacttcctgcaaatgcttgcaaatatatcctgtggccagcacgaatcagtttataatacaggtgaaactttgactctgtttggtgaattaaaggaaaaagttaacatctgtaatatagtttcttaaacaatgttcttcttctttgatgtccagatcacattgaggaaagaatggacaaactgtttacaaaggctttatccaccattcttgttaatatagcaattgagccccttcaaagtctagatgaagttgaggtgtgcctctatgcttgcttgacttttctgggatttttgtttccttccgattctgtgaagttgatgcctaaaactgaaactgttacctgtgactacaataataggtatacccttcaaatattccggatctgacgtctgcaagtccattgatgatatatggaagataccgaggaaagttccccgagaatgtgatagccaaaggtctgctaggagatttgagcagcttttcgacagacttgactgtacagagtgcaaaagacatgcctcttgataaagtaagatctacgtcctgctcagtatcattcctatggagcttctttcgataaagacttctgggtttattcataattcatccttttccctaaattttaatgttcaggtatttgcaaagaatgttattgacttgcttactgctgaggcatggttttctgaagataaacagctaaaagagaaggtttgtctacaattcacttcccccactgtctctttcaggattcgcttctacat

SEQ ID NO: 55591 - DNA, 649 bp, Arabidopsis thaliana landsberg
acgctgcaacaaatgaaatgagtattaaaaatttcttctttttacaagaatcaatttttatgttttagtttctcaatatatagtccatatttttggtcacactaacatgaattttttcaattaataaattagagtgtcaaaaaacttcaccgaattcttacacaatttgtttttttagcaaaatgcatgctatcggtaaaaaaaatcggtgaagtttttttttgctatttttgccatttttcaatagtaacttttccatttgacgttaacctgactaaataattttagataagttaattctaaatcaaaggaaccgaatccatcataattgacctagactatgacagacatcgtataactaattaaatagactagaatcccaagctaatgaataatgatatgccacatctcagcaaagtctaagagcaaaagatgaatgcattaacgtaatttagaatccattgactcgccctagtgactagtatttttattttattttattttgggacaaaatccctagtgactagtataagatacgaatacacaccaaaaaaaagtataagatacgaataaacaaagtttatgctattatttttgtcgcaatttgcttggtttactaaaggaaaggctgacaatcctgtctacattt

SEQ ID NO: 55592 - DNA, 1056 bp, Arabidopsis thaliana landsberg
agtgcatttggttttgccatttgttttttttaccgtttatgagtttattatgtagttaatttaggattcgtctatgaattcctagatttcttttctggggtcacaattaatcttctaaaacataaatgaagaggaaagtctgattttaatcacatttttaccttatcaaaatacaggagtcccgacggatattcacttttcgcatgttccttggacggaacggtggcgatgattcactttgacccaaaagaactaggcgtcaggctaaccgatactgaactcgacgaattgaagaaatctcgatatggagatgtcagaggccggcaagcaaacttagttgagagcccagcccagttattacttgaaacagcctcgacaaagcaagccggtagtaagagggcggcatcggatgttcaacaaaatcaggtgactacaaaaccatctgttagtgtggagagtactgcaaagaggcgtaaatcgcaagtcgatgatcggaataaggcagcagagtctactggtcaaacattaaataaagcatcaaccttaaatcgagtatctagtcctgtgaatcaaaaagtgtatagaaggcctgacggaagaaagaggatcattcctgaagctgttggagttccccaacaggagaataatatcatgattaatggggaatcacataattttctgcctgcttccgctgctgctcctgctaagggagatagtggagattttcctgtggagattagcaatagggatttgtccgggaaagaaatagtttgcaggaaccctgatctgaaagagcgttcaaggattacagctcgtgctaccattactgagagccttgttattgagaaggttcctggaacctctggtagagatggagttttaaatgttgagcaatctgtaggtataaaagaatcttctagcactgatctgttgataagggtattcgattggaaagatggggaagctgcacacctgtttgcttagaagcttgtccaagggagcatgctttggacactgttggtgcagtaagtacatcaatggtcaaggaaactgaga

SEQ ID NO: 55593 - DNA, 537 bp, Arabidopsis thaliana landsberg
cgtaccaagctcatacgcgccgctcaatacatttttccaatcctccaatggtgtcctgagtacagcttcagcctactcaaatccgacgtcgtttcaggtcttaccatcgctagtttagctattcctcaggtacgtacgtatcaaaaatccgacgacgacccattttcacgttccgatcaataacgaccaccattttatgcaattcttgattataatcttcgtcttcttggttttcataaaaacaggggattagttacgcgaactagcaaatttgccaccaatcgttggtctatgtaagaatctgaaagtaaaattgaatagaatatacatgaaacattaaagaccgttacataaacacgtgtgttgatgtatgtgtagactcgagcttcgtgccaccgttggtttatgcggtcttgggaagctcaagagatctagcagtgggaccagtctccatagcgtcgttaatcttaggatccatgctaaggcaacaagtatctcccgtagacgatcctgttctctttctacagctagccttct

SEQ ID NO: 55594 - DNA, 994 bp, Arabidopsis thaliana landsberg
tgttttttagagatgaaaagctatcatcattgattacgaaaatgatatctaacttctcttatacgccccacatccacacaaatgccttaatgaaaaggttatggcgtttgcgattagaacaaaccaaaacgttaccttcaatcataatttgcgatcttgttttggttagctaatagagttatagatcaactacgtcctagtccaaaatctgtggttataactgtagtttataatagtaaaaataaaagcttacagtaaccctcttttcatcattgtaagattcataacaatgctcttaatatgaatatacaaatttcattttcaagagatatcgtaaagcgaaaacatattgttcaagaactagacttcgactggagacaatggaggaacatctactagcctttcaatttcttccaactggtcatatggagcaatctgcagaataaccaaacccaagactcataaaatttcacatgttttggtaatatctttgtttatctagttttgattgtgatttctaagttgtatttatttatacctggctaaacccgtcgggccaggttatcgagacagcgtagtttcccattggtcgtatgtcctcaggttcgatatcttccgctacatcgccatatagaactttttgctctccagtccattcatcctgtttaacaaagatccaaacattgacactttgaattcttgttttaagttttaaaagaagctttaagaagaaacagattctcaggttgaatatctttcataccacactttgtgcagatctatcatttcttctgacggttgcagggtgcagtaagaactcttcgtctgagtttggtaccttcactctaattgccttgagatacttgtcgtatgtcacggccgttgatactgtttttaacataaaatgcacagaaaagaaagagtcttttaacttaattcatgcattgatactaaaagagaaaggaaggttttttgacatggttggttgtttacc

SEQ ID NO: 55595 - DNA, 1173 bp, Arabidopsis thaliana landsberg
ttctgttgttaggtgttaaaggacaagcctgatctttcacgtttgtcactcaaatacaatgcttttgggcaagacgattaagtattcttggcttgctcgtaatcttcaggcaagaatccatcattctgttttagatcaatgctcctctgtggtacttagactaattgtgtaaaactgttggctttttgttgggttgtttattgtgcagcctactcctaatcagaaaatccattggagatctcttgaaggtcttcctaataagtaagcaagagatcataaaggttcaatcttactctaatgtattatctgtttgagcctaacatttggtacttaaccaatgcagaggcagcgttcgattctttcctaaaggtccttcatcgtgcatcgtagaggtaaagaacactccattttatcacacatcatttgatcacaatcctactagaatagttctctaatgcttttccttttttcttgcaaatttgtttcatcttttagctaaccgtatcatatgaagtccctgccctattaacccctgtggcatcggtgcgtatctttttaccttaaagtctctatgtcaagctgaatgtcacagactgtttttcttattaccttaactttccccaattcaggtactacggccttttatagaaagcttgcttagaggtggacttgaacgatttgcagccttggccaaaactacttaaaaaagttagcttttttattctaaactccacttaaaccatttcattatctgaaaaatcaacactttgcttttgcaggaatatatgtatgcatctttctcttggtatatacgtgatttgaaaactataccagatctcataattagggagatctctattgtaacttttgtatgattaaagtgacaaatatttctttctatcataacagaagttgtgtggtttaggtcaccaagaaaaagagaaactcaataaaccaaccagaaatcttgtttttgatttgagtgaaaccaaaaaagaacaaaacaaagccaaacaagaaacaaagtcacggcaaagagagcttttctctttccaatgttaacttatttgtctaaacacgacaacacactttgcgtggagtgtacctaacacatacaagagaatgggtgctgaaaagtctctgttcctaacttgtctcttggaaaaacaaggt

SEQ ID NO: 55596 - DNA, 475 bp, Arabidopsis thaliana landsberg
accggagcctgtgtattggcaatgatgtgtgaataaacagctttgagtcttttttcttttttttttttttgcatcatacagctttgattcaacatctaaataatgcagcaaaagaaccttgccggtgattagcagaataattgggccaaggcccattagcagagcaaaatcaactagactaaatgcataccaatctggccgacgttgaataaaaaaccgtttaacgatccaacggttatgaacaaacataaaggaaggtgtacgataaaactccgtaagaccaaccgtagaagattcttccccaattgtcagtcggtgaaattaaagaggcatgttaaccaaagaagtctctcttacgagatttttcttcggctttccactttttcctctgttcgtgtcattcttctggtagatctcgagagagagagccttaaggtaaagagaatcttaaaaaaaatcgatcctttaagttaaa

SEQ ID NO: 55597 - DNA, 1326 bp, Arabidopsis thaliana landsberg
taccaacagaagtttagcaatgctttatcaatgactttggtctaagtgaccaagcaaaagttacagagaatagaaaatttaatctgataccgcctttcatactctctatacgtcgcatttctgcttcgagtttggctttctcctgactttcccaagcttggattctgatttcctcacgcttatacctaaacaattttgagtttcagaaagaaaagaacaacacattttaagtcttttacactatgtttctccactggacatgcaacatatttggtttaggtcataagagcagacagacctcgcattatgtttggatttctctgcttcttcccatgcagtcgctcgtttttcaaactcaatcttctgtgcctcctctgcatctccattgtttttcttgttctcctcttcttctttacttgcccaagcggcgatgttcatcttccctagctgaactccaagagctacaatctctcttcgcgtcttcgctttctcttcctcctcagatagttctcttcttgtgtttttcgacatagaagattcctctggttggccacctctaggagtagaagggagagatgaagtcgggctacgaagaggagttgttgcaccaactggtgtcacagatcttgaaggttcttgactcggtataggtgtcatttcggttcccatatctctcatacataccgaacgaatcgcaggaccaccttcacatatataaacacttatcttgtcaagctccgaaagctctaataattaaaacaatttcacaaaaaaactagtctaattctttacctgttgtatgatcatgtgatgaatccgcaagatcattgctttgtgtggattggtcaatcaacgagtctcctccatactcttgagttagaataggatgtggcgccgagggaacaacattagggaacttctcaaacccatcaacttgtgaggattggcacagatccatcctagatttgttatgctcgtaacctgcattatcaggcacaactctcacaggtattcggttcccttgaccgttcttcctcatcaccatgttctgtctgctcattatccacttctcagcatcattccatttagatggcatttgtcttgaaggatatcctcttgagccatgattctgattcgaacgctcaccacgagcttggtgaaactcgaagcttggaaagctagcgtttctgtcattatcaaggttttcattttcttgaggtctcattttatgaggagaagccatattcaagttccccttttctaaattgctgcagtctaagtttgccatggtcccctggaacaacacctttacaccgaacttttgaa

SEQ ID NO: 55598 - DNA, 605 bp, Arabidopsis thaliana landsberg
tatatattaaagaataaaagattctccaattaactaaaggcgtatgcttaaagaaactttgaacccatattggaatatgataatgatttgaaagttgtaattctcttttaagaatccatgtatatgccccctaaatatctataataggagtccccatagtccatagaaatacccttttagtcgtggaagctcgatccaatgttgcattgttgcagtggttaatcaagaatttataaatgtttctatggtatgaaaatgattgaaaatactcagattgaaaatgatctttgtaatcatatatctcccgcagttctaatgttactaaatgttatatcagtcaagttaatgtagatttttatttttcaaaacaataataaagaaacatgtgccaatcagtaattaacatgtttgatacaaagatatttcaaatcgagattcagtgcagcagtgtggagttttttagacagttctttaaacttaaattcgatattaatatttgagcgcataatacagcatccatgtgaacagcgtcctacgaagattactttagtagaatagttataccttttgatgtgagctagggagcagacgggtcctactcatag

SEQ ID NO: 55599 - DNA, 1330 bp, Arabidopsis thaliana landsberg
cttcatagcttcaactgccattgtttccggtccaattgtcctcggcttccctgttatcaacaaatgactcaaaatcatcaacacaaacaccaatgttgacatgatctaaaaccagagttgttttcctcacctgttgcacatttctccaacactgagtttgaatattgcttctccactagccttgagagtccgacgaagatctccatctgtgaatgtaccgatcaaacgagaatgttcatcaaccacaagcaaacaaccacatcctttgctggttagctccactaattgatccattatcaagtctccttctttacacacaggaagctcttcttgctttttcataacatctttcacctacaaaacacagccaatacattcatattcatccccattgttgtatttatcaatcctactggttcttaagcttatgtatagtttagccataccttgaagattaagctcttgccgattctaccggcgggatgattagctgcatactcttccttggagagatttctagccgccatgagagcaacggcaatggtatcaccaaacaccatctgaatcgccgtagaagtcaccggagcgagattaaacggacacaattctctctgaagaggtaaatgcacattcatatcacaaacaccagcgagtggattcccagaaacagaggtaagagacaccagaaaggctcctttagctctagcgcaagggacaagacggagaagctcctcggtggcgccagatttgctgaagaaaacgagaacatcgcgtggcgaaagagcgccaatgtcaccatgaagcgcatcgagaggggagaggaaagaggaacggaagcttaaggaaacgagcgtctgtgaaaccttgttagctacgaaagcggatttaccgacgccggtgaagaaaacggtaccggtggtggaaaggagaatgcgtgagaaatctagggtttgagagagatcgagatgtttgaagaagtgattgagaagatcttgctgggatttgaagaggttgaggagattatcatgagagatctcttggtggctggatccgccatttttgagggaattgtgatcgattgatgagaaatctagcgatggcggtggaagagatcccatttttggatctctgaaagctttgatttgtgattgctttgtgctgagagagatctcaaaaaaagcagagagtgtgtattaatggagacggaggggcaaatgggtaatttaacgggttatttcgttttcgcggtgattcagcgataggtggtcaaaaattgcatcaatggtattattagcgtgatgcttatgagaactgcttgcaaatgttagat

SEQ ID NO: 55600 - DNA, 429 bp, Arabidopsis thaliana landsberg
attctttggtttggcaaaaagaggggggttaaggaccgaccaattaatgagtgtttctttttggttagggtaaaatagaaaagtattttgttgattagctctctttgattagacttattctgaccaattttatttgtggtactgtcgttggccaaaaccaaaacagaggctcaatagcttggacgtccttgggcctttaaaagtttcaggcgtggctgtttgtaatttatgtaatcgactgtctccagatccaatttgagagggagttgattctgttgaaatctatccatcgtttttgctatttttcctacaaatctattagatgtaagtaagacttcagatgagtgaaatttgaatgaataagagatccagttattgaatttcattgttttacaagatctatatagacacatatcccccccatgtagg

SEQ ID NO: 55601 - DNA, 477 bp, Arabidopsis thaliana landsberg
tctctctctctctctctgttttaatttctaagacggagaaaagcaagcgtcttttttccgggttctctgctctgttcctgcaagaatcttgtaaacccttctctcactctttctctctcagtctcaatcttatctctttctcattcaaaacctcgaaagagctaaaagtgtagatggcctttgatttaccaaacgatttcagatgcccgatctcccttgagatcatgtccgacccagttatcctccaatcgggtcatactttcgatcgggtctctatccaacaatggattgactccggcaatcgaacttgtccaatcaccaagctacccttatcagaaaccccttatctgattcccaatcacgcacttcgtagcttaattttaaacttcgccgatgtgagtcttaaggaatcatcacgtcctcgaactcaacaagaacactctcactctcaatcccaagctttaacgtcactctcgt

SEQ ID NO: 55602 - DNA, 1255 bp, Arabidopsis thaliana landsberg
aaacaaccctaccggatcatgatccaaaggtcctacacatacaccaaatcccattttcccttttattacaaagttacaaatactaaggggtatatggagagagatttataatatataaatatatttagtatatttatgtatctatatcatgttaataatttcactctgtagtcaaaacagagcattttcatatcctacccctaaatttaatatataataatcccgaaatttcccaaaaaaggaagaggaaatagcagtagcagaaagagagcattattgactagcaagaccacatagactctcccaaactggcttcatccacaatgtccatatggctaaacatgcccttgttgtcctgcggactcacttgcttcgaagacggtgacccgctgctactcggactatccgggcatagtccgtgccctgggaaattagtcgactggcgtacacgtagatgcaccacctcagcctgagctagagctagctgagcttgcaacacatctatttgttgctggagggatgaaattgccccaacgcaaccgtaaaccggatcccgcactcttgcattagcctcgtaaaccatgctgctcacagcgtcccctcgctggtggattggtaattcctgttgagtttttaaaacattttgttagccactagaccaactaatctcgcaagactatataaattatataatccatctcaaatgtagattctacattagctagctaagaaatgtaaatcaaatcattaacaatagctaacaaaagttaatattgttaaaattcaacatcagctaataaatgtaacatattcctaaattcttaaaattcaacaattttgtttttaaatccctaaacttataatataaacgggtcggcccatgtggtagttgtcaataaaaagttatggaaatgatagtaatgtctcatctaacataagaaacaagaaaatcatcgtaattaacctaacccaacatatgattaaggacgttttagttattcttaagaagaagaagaagaaagaaacctgaagcatcttgttgacgttgctagcaccgaacactctatgaacattagcaaatttctgaggctcatcggccggaaaatacggcgagaaaacgcaatcttgagcgcaccgccgccgcaaaagcttacacgcagcacacggtgacgcagctccttgcttccggctactttctttcatctttcgccgccacgtgtcctttggatatgtgaatttatctagaagaactgaa

SEQ ID NO: 55603 - DNA, 1385 bp, Arabidopsis thaliana landsberg
tataaaaacgtacgtttcatgaaagagaacgttgtagaacactatcaccgtttgcttgtaagaaaaaggcttatctcacctataaactcgtgagtcatatttgttatatcttttttttttgtattgtactcttaacaataataaataaaataaaactctattttggtaaccacaaataatattctgaggccaaaagcgcgtctgctgaaaagttcacgcgctctgctaaccccaccgtccattctgactcttttagatcttaaccgtgtctttatccacatcatacgtttatacacgtgtcacacgatcacctattctataaaaaacattattttaatcttatcctttttatgcttcccctataaattatcttctcttcctccttctccgatctctcctccgtcacacaaaacttccgatttcaaaaaaccaatttgaaatttgtcaaaaggaatattctgacgatcgattcttgattcgttttctcgcgtatagagagaaaaatggcgcttaatttatcgcatcagctaggagtactcgccggaactccgatcaaatccggtgaaatgacagattcatcgttgttatcaatttcaccaccatcggcgagaatgatgacacctaaagcaatgaatcgaaactacaaggctcacggaacagatccatcaccgccgatgagtccaattttaggtgcgacacgtgcggatctgtcggtggcgtgtaaagctttcgcggtggagaatggaatcgggaccattgaagaacagagaacgtatagagaaggagggattggtggaaagaaagaaggaggaggaggtgttcctgtgtttgtgatgatgccgcttgatagtgttaccatggggaacacggtgaatcgaagaaaggcgatgaaagcgagtttgcaagcgttgaagagtgctggtgttgaagggattatgattgatgtgtggtggggtttggttgagaaggaatctcctggaacttataattggggaggttataatgaattgcttgagctggctaagaagcttggtcttaaggttcaagctgttatgtcgtttcatcagtgtggtggcaacgttggtgactctgtcacgtacgtgattcttctctcttgctcaatcacttattaattcgtgtatcatttttaaggctacttgagattggaaagattagaagtaggatttgagattatgaccaattttggaactgaatgattgaagtttgagtaggcaggattgttcatttttttaattgatcgatggagtaacgcgtacgggaattgatgatacaatattcaacaataaactgataggtttaagagtgtacaacttacatctattgctttgatgcgtgagcgtcttaaatttaatattgagcgactt

SEQ ID NO: 55604 - DNA, 518 bp, Arabidopsis thaliana landsberg
gcgaagggctgtatttgcttacgacaatccactattcatgtgttttacttaattaacgtgaaatcatgtatgtatgtacgcatgcagatatgcaataaacactcaaatatgtatatatatatatatatatatatatatatatatatatattgatatcactgtactggctagtgtctagtgcatgtaatagctaaccttgaggccgatggaataagagtaatgagctactcaatcataaatgatatcaatcctttcaaatttcttacgagtatataattgtatgaaacgaacttacaatatatttatatgatagactatatgccaagttagggttgattatataccaaaggttggatcggttttagatgtgcaattaatgtatatgaatcaaagctttttatttgttgtgacattaaatttattatctaattttggtgactttttctcgatgatatacaatgtatgacattgcattgaaatggatggatgcaccaatgtttcaacatcagtacttatgc

SEQ ID NO: 55605 - DNA, 792 bp, Arabidopsis thaliana landsberg
  unsure (1)..(792): unsure at all n locations
aatcaaaggttttttaataccaacaccctctaaacgtcgtcgtttcggagaaattactattaagtttttttttttattaaatcacaattgattttctattttaaatagtcaaataacgagttgaagaacatagtcttaacaaaaaaaaaaatcatttgaatagaactttcacaacttttttatcaacttttttcaagataaaaaagctctttacatttagatttacatgatgttttgtttcttcaaatcatacaatcaacacgaaaataacatttcttataatcatctttttgaaaaccacgacgtgaaacatgtaattacgttctcaaaacttgaagtcctctcttttatatcgaatatctttgaaggaaccaaaacttgaatctctagtttcacaatgaattaactaacaacttgatttcattggacttaaaaggggttgtggtcggatgtttatcaacttagtcaagcgatatatggatctttataccctgaattttgatcctaggcttcggcctaatgcttaatcggttaatccaatagtagacttgcgagaaatcatgctaaatgggcccttgagaaagaaaaagaagaaaaatcaaaccaaaccgaaatctaaaatnnnnnnnnnnnnnnnnnnnnnnnnnnnccgggaagatcatgtgggagtctcgaggctgcctgtttcagacaagttgctgaattgcttaattcaccgggtagctgcccgctgaccaaacagatttccttcttttcttagaaaatntgcctttttatattattttcaatttc

SEQ ID NO: 55606 - DNA, 916 bp, Arabidopsis thaliana landsberg
taaggatataaccatacataagatcttgcagtaggtgactgacttcattgaagtgaattcatacatattttggtaaaaagatctgtgattgcgtgtacacgttgtgcttcacagttttactacagttaacattattttttctacagtttcacagcaaaaaccggtgaagagaggtaattatatctcacatggaatacgatataattgtcatataaaccctctcaagtctcaatccaagaaaccaaggtgagctactagctttaaccgttagtaataacgatggactctcataatcgaaataatcttgtaaatttctatattatactcgtgagaaccacttggggcgtacacaaaatgttgattttcatttatagttagattcatactaagtatttggcgagtatgtttaacgaggagaagttgttaatacaaaaattagagaggaagcacacaaaatcattcttagacaaccatttcacatcaagcttggaattttgaaccattatttacaccttactacagacaacttcgaattttaagtccccaaacttaatatgagcactaacatacctgcccgaataaccaaaatccggttcacaccgaatatgaaattgaaaattttggaaaagccggttatttgggtcagttataaactagaccgaagtatgaacttgaacagactaccgactggaattagctcttgttaaccgtaaactaaattgacaaacctagttcgggtaagagcggtcttcgatcagtgaaacaaatgcctcggaccatgtatgtttaaccaagctagagacattcgatccgtgtacattcgcagtgaacatgttttcgtcggaaccggtaagaacccacctaaccttttttggagggtttgggtaaataactgcgctctgaaagctgataccat

SEQ ID NO: 55607 - DNA, 730 bp, Arabidopsis thaliana landsberg
caatgtctcttcacaatcagaacttgtgtgcttccaccactggtcaaagtcttcttgcgcatatggcagtttaaaatcatcctgtccgagtagataggcggataaatgtgcaccagcttcaatgggtcgattgagcaagcagagggcctccgctgcatagatatggcctaggaaaacataaatcttcgaacaatctgcaagttgcaagagtgaagtagcagctgacaaggctttgataggattctccaactccaattctacataagccatattggcaaagagagcctgtctcatcaactgcttttctctattacgaatatcctcaaaagcagagagtgagttttgaattatttcttggctcattcctccttttgcctctttcgagtctgagttcgtgttaccttcctcatgatcagaggatgatccttctttggtctcattcatccccacggataatattgatccaagatctgatttagaatcattcgagagagactcattgagcagatatataccatttgagagacagacccgtgctagtggtaatgaaagctttgacaattggttacttccagcaagttcaacatatccattttcttcaatcattagttgtctccgattccctttcccaattacatggactctgatttccgatctatccaaagaactgtttcccccttccaaaagacccttttgtaaggccatcatacagcattcagctaaacggagc

SEQ ID NO: 55608 - DNA, 445 bp, Arabidopsis thaliana landsberg
aactggaatcatgatcttgcaaataaattaatcaatcaagctaaccaaatgacctgacatcaccaataaatatgaacgtattaactacaataactcgacagactgatatatcttggaaaaatgaaagatggatgcagtcgctactctcagctctatggtctaaacattggacgtggtaacacataaggcagatgacgagataggatcgacatgcacttgatgatgactatagatgagctctttgtggatatgcgtgaccaccacaggtgagtgactctgaaaaaccttcttttataaatggcatggatcggtatatcaacacgaggcagctgtatcaacagaacatctagggaggagcttattagcttgctaaaccttgacacgtgtcatcatctctttaaatcacattcaacagctgagctatgtttaacggtctaagggatat

SEQ ID NO: 55609 - DNA, 1088 bp, Arabidopsis thaliana landsberg
tttcaagggtgcacaaatacccatatagaaaaataatagagtattggttttcacttttctcccatttgtatcgttgagttttatgaaacctaggcaaaaaattaacgtagaaacgtagaaaagttgcatacgaaaaatatgtacaaggaaaaagggattggcgttaaaagttggtatacaatggcacttttcatacgtactcgtacgcattatactttcctttttttctcgtacgcattatacattttaattagttcttttgataatatttcacaaaccagttttgggaaaccttcactgcaaaaaacaatcttactatagaaaactaacaataactagaaaacatttgaaaagaaaacaaaaaaaaatctacgagttgagatccgatctttaagacgtggacctctgaagactatatactttacatacaaacttgtttcattcgtgcaaatccgatggcattgctgtaataaactattgagagtagaacgacgaaaatagagaaccaattggatgacgtcatccatggccaatcgaataagacggaagtttaaaagtaggaacaattttaagaagagacaaaaagaagataaatgaatacatcatatcatcgctctatgaataaatcaagattttataaacaataagaattatataaatttaatgatgcaatataaaattatataaattaacgaataatttggttatatatacatgtttgttgaaacatgttcttagccaactatcaaataagaaattaaatagcacaactatttctatttttattttaaatttactgttccattttttttacagttgttttaaaacgtactatagatatgcttctcgactaattttctgttctaaagacgtatatttttgtttatgagtagttatcctgtaaatatgaatatttgttttttttgttttttcgttattctttcttgtggcgtgagacttgttgtggttgatatctaatttgaagaaggaattgagatataaggtaaaaatactattcgttcgtctcatttaaaacaaaaatatatttgaaaggtaaaagttagaaaattcgtgggtttgtatatatt

SEQ ID NO: 55610 - DNA, 341 bp, Arabidopsis thaliana landsberg
accacaaataatgcattttaattgtcccaatccccaactttcttcttcgatttttgagtttttcacatgatataaaagaaagaaaaaaaagtgtactactaatacaaatttagctacaatacgaaaacaatagaatttaataattgatatatataacatagaaacaaagctcatattcattaacccaatcacaagcatatgacacagggtacctatacagttatagagtattcaaattttaaacaattcaccagtcaatattaataagacaataaaactatgttataagatcgtcataaatatagaatataaataaataaataaatgaaaaatctaatttt

SEQ ID NO: 55611 - DNA, 465 bp, Arabidopsis thaliana landsberg
tgaaggttaggacaatcatgaggatcgtggagaatgtgtttgatgggtacaagataacatatggtaaagcttggagggctaagcagtgtgcgtggaagatgatatatggggactgggagtctgggtacgagcagctacctgttcttttaaatgcaatgaaggcgatcaatccagacatgcattatgagtacatccctaaaccaaatgcatggattgatgggagacagatattcttccgtgcgttctggtgctttccccagtgtgtggatgccttccggcattgtcatcctgtcttttcaattgaatatgttgtaaactaatattgttatgaatatgttgtaaagtaatatgtctttggcatgtagcgtttatctaggcgcctacgtggaactgctgctcgctgtggctgcaggactaatgttgcacatgacgtccgatgtaccatcgtgtaccgacacaacaatg

SEQ ID NO: 55612 - DNA, 110 bp, Arabidopsis thaliana landsberg
cggacaaaacgccaaaataaaagactcgagcccttaaaaaaagaaaactttacccatgtttccaccaacaagcacatgccacgccgaggaaccgcagaagaaaaaacagt

SEQ ID NO: 55613 - DNA, 1172 bp, Arabidopsis thaliana landsberg
gggacaagtaatttctttctctactcaattttctccaagatccaatatttgaagactgatctatagttaaaataaatctcaactccattcttgttacctcagtccagtcgcttggcaaataacacttcgcagtgtggaaaacaagaagaaacttggagagagtgaagatgattcagatgatgacttgtgcattcttatctttggttccttacttacctcggataaagtggtaagttttagttctctttcgaatattcactcaacctttaaatggtcttttgtttgataacatcttaacgatgcttcaaaatgtgttaggaagttgagtttataaagaagggaagtttgactactgaagaacttgaggcttttgtttcagctttgggagtagctggaacaaaagctggacaaaataagggaagcggcagtagaggaagcactcgtgattcgtctacagacaaatctatctcccagttggagtctatgggagtcagaatctatggagttaataaacctcttggggatgattctatggatgagatatcatgggacaatattgctggatatgatcagcaaaagcggtaagcttttgttacatctttgccttgtattccattaatatggcatataatagtttctatcatgatgcagagagatagaagatacaatattgatggctcttcatagtcctgaagtgtatgatgatattgtacgtggtacacggtccaaatttgaatccaacagacctcgggctgttctatttgagggtccaccaggttagcacaagaagagtgcatttacaatttcgtcgttctctgtagaaacaaatttgaatctgatgtccataaactctaaccataggaactgggaagacatcttgtgcgcgtgttattgctaatcaggcggtgagtagtcgataacttgcaaaccctttttgacctttcaatttttttgcaatctggagctctaacgttttgcgatatttgtcagggcataccattgttgtatgtgccgcttgaagctgtaatgtctaagtactatggtgaaagcgagcgtcttcttggggctgtgttttctcaagcaaatgagctccctgatggtgcgattatatttcttgatgaggtgaagaaaatattactccttttatattgttgtctgacttttcctttcaa

SEQ ID NO: 55614 - DNA, 519 bp, Arabidopsis thaliana landsberg
  unsure (1)..(519): unsure at all n locations
atcaccgggctgttcnnnnnnnnnnnnnnnnnnnnnnnnnnnnnnnnnnnnnnnnnnnnnnnnnnnnnnnnnnnnnnnnnnnnnnnnnnnnnnnnnnnnnnnnnnnnnnnnnnnnnnnnnnnnnnnnnnnnnnnnnnnnnnnnnnnnnnnnnnnnnnnnnnnnnnnnnnnnnnnnnnnnnnnnnnnnnnnnnnnnnnnnnnnnnnnnnnnnnnnnnnnnnnnnnnnnnnnnnnnnnnnnnnnnnnnnnnnnnnnnnnnnnnnnnnnnnnnnnnnntttgataaatgtcgattaatataattaagttgaattaacgttctaactaatacttgtttagtgtaacgcgataactttccgaccgtagctccgactattgcgtttcttttccttgtgtgaccgtagaagcgagctcaattggggattacatgtntttataatgttttgcgttgtatggtgtaaagttttatacatgtatgtttttgtggggttgttggtgtgactgatagcgcaaatagacgtg

SEQ ID NO: 55615 - DNA, 779 bp, Arabidopsis thaliana landsberg
gccggaggtccgtcgttgttcaagtcaggaaaaggatgtggtgcatgttaccaggttactaatataattacattatttagcggaagagattaagaataaatgaaagattagcttatatactgatttatttacgttcaggtaaaatgcacttcgaaatcggcatgttcgaaaaatcctgttacggtggtcattacagatgaatgtcctggatgcgttaaggagtcggtccatttcgatttgagtggtacagcgtttggtgccatggcaatttctggtcaagatagtcagcttcgcaatgtcggggaattgcagattctttataaaaagtatgtatctaaggatttggcattagtatattactacaaagttattctatactaatttcgtaaggttatatttacttgttatgtaattgtgtttcattggtatgtgtgtgtgtttagggttgagtgcaactatataggcaaaacggtgacatttcaagtggataaaggttcaaacgctaactccttcgcggttttggttgcgtatgtaaacggagacggcgaaattggccgagttgaactcaaacaagctctagattctgacaagtggttgtctatgagccaatcatggggcgccgtgtggaagctcgacgtgtcgtcacctttgcgtgccccgctctctctccgagtgacttcgttggaatccggcaagactgttgtggcttccaatgtcattcccgcaaactggcaacccggtgcgatatacaaatccaacgtcaactttttaagcgtagc

SEQ ID NO: 55616 - DNA, 891 bp, Arabidopsis thaliana landsberg
ctaacgtccatgaattggtctggtttgaaggtcgaatgcattaacgaagcggttgaaccaggagatattggctctctaaccatgaactgtagatcacgagacaacattggcatcacgaacccacctgctgactgcattgctgcagttgaaccagcagctgtgcagattcttagaccgcttgagcggcagttcactgtctttggactgctcgcaccatctttgttcttaatcctgcacacattgtaaagaacattgattcataacagttggatataaaagggatgtccaacagtttaaccgaactgatggtttattccatatccaaacatgcaggtgtaaccatactaatctgaaaagggggaaaaacgaataaaacctgttttttgataaaccattcaaaattctaggtgtagtttctacaaaacggtatccaaaccaaaccaaaccaaacccaatgcttataacaactatccaactgaccaaacgagggattatgtctacacaaaataatcaggtttaaaagaatgcatggtttttaatagtaggagctcttacttgaaagagaaccttgaaaccgcagcagggcatgggtgtgcgatcaaaatgtcattaagtgcatgtgaaagaagagtttctgaatttaacttcaatgatattctcgatacttttgcaggaaccactctgccaaacaaaatgtcatgcagcacctgtgaacaaatagctgaatgttcaaaccaaaattgcgtaattattgcatattctaaggatcaagtaagagcataaatgggttgcctaacgttcttccctttttatttctctacctgttcaaaattctcgacagttgcagcacagagatgaccagtacttctactagtgttaaactgatcgctc

SEQ ID NO: 55617 - DNA, 162 bp, Arabidopsis thaliana landsberg
  unsure (1)..(162): unsure at all n locations
ctgagcnctgcatggatgcggacgcacagcgcgaaggcattaacgcctctgcccgttacccgaaaaacaaggttttcattttcgcagccgagcgggaggttaccatgatcataatcgacaccggtcctgctgttgggttggcctgaccagattaggtcccgt

SEQ ID NO: 55618 - DNA, 536 bp, Arabidopsis thaliana landsberg
acatgagtacaagtccacaacagggtaaattcaaatttgaattttagagaaagagagaagaaagcaaaagaaaataaaaaaataaattggcacttgggccgtctccctcacattcggcccaatccgccccatcgcgccagcagaggaaggaagccccgccgcctgatgacctagtgccgaccccttggccacacaagtcagtgggtgatccccgacgccttcgctggatcgcgggaccgcgatgctagaaactccgtctcgcctggatggctgttggcgccgcggactccatggggttcgttgcacgcaactccccgcaatcactgctggctacccgggccctgaaactccgtgcttcgtggctagaaaagggaggactgccgctccattctccgcgcacaacgattcctcccctcgtttccccgaacatagcagtagcgtcatcatcatcgccgtagtcggcgcgggtggagagaacgtgcagcagaatcgccatatccaccataaacgcactcagttcgagagctacgggtgcg

SEQ ID NO: 55619 - DNA, 1120 bp, Arabidopsis thaliana landsberg
tgtcccaagattttggatccgaaagacaatcaaatagatttagaatctcctcctttagtaaatgtagatagttccacggttcagaattcaaattaacaaaaaaaaaaatgtgatgaaaattcatgatctttgttaattaacttctcatgtacaacactatagcagtgctaataataataaattagcgaaaatcttaattattttggtaaattttagttgcataccattctttttaccgatcatgataaattacttcttcatttcagcaaaaatataaaaactataatcactttggcttattctttcgttagatttagttattatagtattgtttgattcaattcaagtaaaaactatttgagttataggcaaacttagtcacaccaaccgcaaccttcacaatttgtcttaacaagttagatcatatttcgtggaaataatgtctagcttaacatctaatttgtcgaatatatcttaatgtcactgttatgttaattcatcctccatctttatactttgtcaccaaaacgaatcgtcttgtcacatatgacatatgacagtaaaaacaatgtaataatttcctacacatcacgtttttgaaaaaaaacatccttcatcaaccgctggtcaatcttgaaagcatggtaaattcattcaaattacgtcaaatgattcgttctacaaaactctcagccgtcggatcatacgacttttgactaaaccacttaaacgacgacgcttcgacgggattggaaaacatcggcgccacatgatgatgatacgaacaaccgcgttattttatatgtgccgtaggtacaacgctgagttaggcccacccaaaaaaaagtttgacattatttaaaacgaacgaatctgaaagaataaagcagcagagtccactaatcaaacgaaccagaatttacccgcaccctatttattgtggtcgcgaccacacaacattttcaacttcttcttctcttccgtttcaccaccctttcttctcctaaattcgaagaaccaaaaccaaaaaccaaaaacgtgaattcggaggtatgattttggatcttcttcccgtctttatatataattttctgggttatgtttttcttcttcttaattc

SEQ ID NO: 55620 - DNA, 741 bp, Arabidopsis thaliana landsberg
actttataaagattgagctgtctttaactcccattgttttcccatttttgaactttccacaagcaacttggaatactttcatcagtcttatccagtacaggatcaaggtaggtcatccgcagcttgaactcgccattcagtactttctttacccgagcatatttcctaggcataccatctctacaatcagttgtagtagaccacacttgattgacagcaaaatcttctgttttccgttcaactttaaacacactgaactctaaatcaggtatatcaagcggattagaattttcattagctttgtatcctttttcaactctaccaatcttgctcaacaaggctgcatcttctccattaccatcacagccttcactaactttgtttttggctgacaagttgtcttcatttccagaatgcgcatttttcttggcctttcctttataagaatgtgaagaagcagaagaaacaccagaaacagccagtttaggtgacttattatcctcagccgtttgcttcttattaggctcagactcaaattcaaaacctgattttgtctttttatttggagggctgacaaaatcaccatcgcttccctcctttgcgtaagaaacctgtggctttttccttgatgacttcctcttattatgttcatttgtatctgttttagccccagcagtatcagagctatcaacctcaaaactcttagaggattcttcaacaactttcctcttctttttgggt

SEQ ID NO: 55621 - DNA, 567 bp, Arabidopsis thaliana landsberg
cctctgcctcgagatcctacccccaacgacaaagaccatatgctgatagctccttcaatctatctgaagcttcaaggcaatcccataggagaacccggtcaaccgctaaccactccagaggagagtctagaaacttccctccaagacagagattgcaatggagagagaaaacgccccctccaccaaatctccctgagttttctggctcctccagacaaagaagacctcccctcgaaagagtctctgtcactgctgcttcttctcagacgccgcccccaatcccaacaaacgaagaagtaatgggagatcttagagaggtaactctccaatatattagtgttactgatcccactgaaagtgccgcaagaaagagaagagttattcaaggagaagcacaaaatctaatggcagaaacggcatcacagatgatcttagcagccactcaagcaaacaaaactgctagggaagcaattgggagcttacctgggaatttggagacgactcaagactctccaagtctccctcctggtttctctggtttagcagccccacctgcaaaaaagagaa

SEQ ID NO: 55622 - DNA, 961 bp, Arabidopsis thaliana landsberg
acaagtcacatgtaaccttataatatacacaactgttataacttataaacaaaaataaaaatcaacattttgttcatttttctccgctcatcacatttctttccctcttccgattctcctggtacctctctctctctctctttctctttacttctctgtttgttgattgattgcatttttgtgtgaattaaaagtttggttctttgatccacaaatagattcttgatctcgatcagaatcgtgggtttgcttttgttttaagaattaattcaatgatcgatgatgaaactgattgatactgttttattgtcatatgctctgtttctttgctctgttctaaggaaattttgtgacaaacgacaatcatggaaaacgaaatttcaacctattaaaaaaatattatccacaagggtgggccttggaagtttttgtctgttcaagaaaacaagccggtcaaaataatctaccttttaactctggtctaagtcaataactgagtgcttccaccgttgaaatttagtatctcactggaaaattgtacttggaaattgcatggtcggtccatgaaagtattaaggagaagaaacaaaccaaaagtcgtctttttgtatctctctatacctatacattttatgatttgattggttttgtggggatcaatttcactattactcgtaagaaatttctttatggatatgttttggtgaatctctctctgcttctcacaatctccctctttactttttttctttcatcatataaagggttggtgaaatatgaatggaatccaatttcgttgggaggttgttgtatattataagtttttagtgtctaatctttttgaactatttgttgaaattaaggtgtaaaggtttgaccacttacttccccttaatgtgatatgttcagtcctttgacacaacaaatttgaagttcttgtgttgttctttgagtttgtctt

SEQ ID NO: 55623 - DNA, 828 bp, Arabidopsis thaliana landsberg
ggtggaagatttaatggccacggactttgactttgagaatccattgaacagttccttgtggcaaaggaattgtcttggggaatttaagaggcacctcgtactcgccaaaagtttccaaaggcgccgctaaaaccacattgtctggatcaatcttcacacagagctgcctcgccaccttcataaaccgacacaacaaccaatgattataagacctacttacaaaactagtagtcacttaaaaggaaagaacacttgcctcagagactatctcttcctttgtgataggagtttgaacatcaggtttgtcgtcttttgaggagcggtttttgaacttttccttgtcaactaacttcctcaatacctgttaatcaaacaaatagatcccatatttacaccattttaaatattcaacaagaacaagaatgctgaatagtgcgaataaagagggttagctaaacttaccaaattagcattcgccagacgctttgcagccttttcatactcttttgtctggacttcagaagttttatgaaccaccttaacctcctcctttacttcttcatgattatacatctgaatatattcccatcaagaaatcaaacactttaccaagttaactgtgataccataatgattatcagggaaagtcaaaactatctgcagttccctttacatctgaagacattcccatcacgaaatcaaattaaaggagaagccactaacactaaaccaaaatagtttcaataccatatcactatcacattatgtcaaaagtatctgttttacccttaacatcaagaactacacatcatcaagatcacaacctag

SEQ ID NO: 55624 - DNA, 1437 bp, Arabidopsis thaliana landsberg
aaacgatgataaaaacctgcttctgacatgacaatctcactatcaaactataactttttctattcttatcacacacaataggaaattgcaggtaagtgttgatatctccaaaagagataacaaacaaacaaaaggagggtcctctctcctatactctcttctctagtgctccgtacaaatttctatgaactatgatcagaccttacaagacatggcaccaaacccgaatggttcaaaccagagagtgaatgatcaggactcatgttctatgaactatataccagaccttgcaagacatgcaccaaacccgaatggtaaaacccgagagtgatcaggtcaatgagttttcaggtgaggatacaattaaaagtggtgattaccaaaaggacaaaaagaaggtggggaacaagggagatatgtgcttaatcgagagtttctttctaatttcaaaaagagtagagactaatcaacaaatgctggaccctaggaatagacgacgtttcgacatcggatttgtcactcacagctaggacacacaacacagttccccttccattctcttgtttatccactttgaaaagattaccttctttttctttcctgtggcattattgagtggagagagagagagaaatagattgagagtacttaactgatgacactagacatcagggagcagatatgatctccaattgatctttgtttcttgattccccaagaaaaagacataactttatcactaataaccgccaagtatgtctctcactgtttaagatattaggatgtgaccaggccgtttgtgcccataaccgaaatgattttgacaggatcaaaaacaagatttttagttcccaagaacctgtgtaaaatatttgtggggaaaaaacctaggcatattttcatttgcacatatgtatatcatcatcctatgaacaaaacaacagactacttgcaaacacatgtgttcacaaacctggacagtaaaacccatcacagtgaatattgaaacagaatagttctagatttctcccttcaattttctttttctttctagattctaatcaaaatatccaagaaaaatgatattggtgtgtgtgtgtgttatagtggaagtcctacttgaacagcacaaggaatggtctttgaatggccattgggagatcgcctctaccattgaaacttgtcagccaaaggagcctgtcaaatacatagatgacgaagaacaggtacaactcctctgctttattatccacctgcggccctgcagctgaatcttcacttgggctcctccaatgaaatacacacaccaatgaagaatgcacaagagatctttcataattgagttccagagttcaatcacaagcagaataagagactcctgtgctcatcttgaccacgtgtgaggtgatccgtgccatagcacatgacttggattgc

SEQ ID NO: 55625 - DNA, 1542 bp, Arabidopsis thaliana landsberg
ctttgacttaccatatctgtgatattcatcagatcactttctagttcttcatctacagacttcttcttcttcttatgccttttacggtctctttttgctacaggctcttcttcgctttcctcgtcagaaaattcagattcttcatgctccaaatcttcatttgctagctcatcgacatcctcatggtcctgtttttcttctgatctctttttcttacgtttctttcgagaatcaccgagatcagatcccatcgaatcaagtacagatggaagtccttcgaacaaatcattcaatccatcatccaagccccttagttttcctttctttatcttgagcttctttgcgagcctcctctcaagttcagcatcctggtctccagatattacagttggtgtatccatttcaagaaactcttcaaatttcgtcttcttccttggtctattcagatcctttattctctctactttttgcatcttcttctcctttgatttgactctaacctcttctttcttaggtataaaagactttccatggtctttgtttccactaggactacttgattccatatgttcagttacactatcacttatctggtgaaaatcttcagacttgatcacatcaccagacttctgagctgaagcagatgatgatactcgtttctccttttccgacttctgagatccagcaaaaaccaacattacccatcaacaaacaattcaacaagaaaactaaaccttattaataaaacaaagattgcctcctacatgacgctgaagccaagattcatgttttttctggttcttctgcaagcgagcctcctttcgcttttcatgacgagagctccctggcgatcatcaaaaacaaataaaaggagactctttaaaatcctagctccaacatacatagagctaagagcactactaagacaaaatatcagcttacccatgttatctgacccaatagattctctgccaacacctaaagaaggataaaaattagaactttagctttcagcttaataagttacaggtctctataacaatgaccacgaattcaacagaaaataattgaagttgtatagctaaaccctagttttattaaaacttaaaaacttaagcattcacagtaattcaaccaaacaatgaaactacgccgacaatgtaagtttcagaatctataattgcacaaaaataaagacgtgattaaattgaaaacgccacttagaaatcgaaataatcatcagcagacccaatatagaatgaagcaaagcaaaaaatccacagaatccaaatagaaagatggagcaatacttgaaagacgagaattgattcgaaatcttgttcctggttgctctcgctcgatgtgattagaggaagtaggaaacgaaaccggaaggagtgtttttttttaagttcgacaaaaagatttgcagaaaaataggggttttcttttggtggatttcaaaaaatatacgaagatggagagcaagcccgccgggtatgggcctaaaatcaaatgccaaattttggcttacgttttttt

SEQ ID NO: 55626 - DNA, 1511 bp, Arabidopsis thaliana landsberg
gtttctatattgacgtaattcctaaagatcaacttcaatattatagtattcaacaatttgtcaatcactattctaacgttttttcaaaaactttactcgagcttctcattatccggcgtaaaagccattaacgttctaactcttccttatatatgaatcatctgaaaccttcaactcttttcagctttagttatctattgccatgatatatacaatccacttgaatatttttgtgtgttaagaaaaaaacttatttttgtgtgttaagaatctctccgagcttttaacggtatgtcggtgtctctagttaattgtatccccagtaacagtcataaattatgttatggaacatacggagacaaaccaatacgactaaaacgtagattctaatttttttagcccttgttgtattaaaacaaaacgacaagcagtatagtcactgacataagaattaacattttaagagtaatcattatggatggtcggctatataaaataacaaagatacaatgaaatagtttgtcttttgtcgccagtaaaatcactttattcagtggttttgacgacgtcaaagagcattatatattattaaatcctttaaacgaatcttactactaaaagctgaatgaagaaaatcacattcgaaatataaatagcaattgtcctgttaagaaaaaaaacaacagacatcacatttccaaagtaaaaaaaacaatgattctgtgacaaaaaaacaaaataaaaaaaaacaatgattcatgtggaaaatgtccaataggagctagcgatcacaccgcaagaatttgtattagtattcatcagacgcaagaggaacttgttcaaattcggctgcctgttaatgaacatgaacaaattaagaaagtaaactaataatagtaattataaaaatatgtaactattgaataattagttgacaaaagaaaaaacacagagataaaaaaatgataaatctaaaagaatgtcaacgtagcctacaattccaagataacggggtcaacttgtatatttggtaataccaaattacgtgaagaaagcgaattgagatatcgacgatttgaagttatcgatataaccttcctcaaaagacattatctaattaacactagaagaattaatactttgataactatgactgaaagactttttctcaaatgtgaaatgttaaatcaaaacatatcccgtaacaacaaattaaataaaaacctccaacatgattgcatcttcttactataatggttaatgttcaaccaattcatgatatacaaattacaattccaaaatattcagtcaaaactgaaatcttagccacatcagtgaaatgtacaacttcaaaaacctatgaacaacaacaagctaaatattaaaaaaaggtatataaaatattgggaatatttttagtagtttttaccgccaaaattagaaagtttttttttttttccgggagtgttgggacacacactcacgcagtagaaaaaaagcctagagtgcaa

SEQ ID NO: 55627 - DNA, 1088 bp, Arabidopsis thaliana landsberg
  unsure (1)..(1088): unsure at all n locations
aaaaaaaaaaagaaaaagatgttggtagattttatttttatttaaaaatagcagatatacgaaccaaataattttttatcataatttcggtaagatttttgaaaaagcaaaaaaatcgattaaccaaattttaacctaattttaaggtttgcaaaaggaaatactctaaatatcctgcaaagaggcaaaattttacacatacatttggtaaattaacggcgagatttacagtaattttggctccaaaaaacaccccgccaatatttattaccaaacccattcacttcaattcgcgccaaaactagaatcccaaaagaccaattcctatttaaaacccctacgccccgactctcatcctccattttcgcctctctcttccctctcctcctttcttcccaaatggccattgttgatgacgcagagatgcggttaaccgaatccgaagctgtttcgagttccgatgatcgtaagatcgttgcagatactcccgattttatagacgaatcctctctagtcatcagaacaaccactggagtccgaatctcagctctaccggcggagcaaagccttgttgactccgatggatctaagtcggaggtcacgcttccggcgaaagacgaggtaattagtgatggttttacttgtgtgaataaagagattgtagaatctgattcatttagggagcagaatctagagattggagaacctgatttagatgttgagaatcgcgaagaagtgatgattattgattcgctagaaaattctgtggttcaaattgtttcaagtgcttcgggtgatgattgtaatgttaaggtagaggtagtggagcctgaattgcgtgttgagaatctggtggttgttaaagaagaagaaatgattgctgattcgatagcggaatctgtggttgaaactgtttcgagaggtttagattatgagtgtgttgatgtcaaggctgaagaagaacctgatnttaggtacaagttggaagaagattctgttttttcgaatgtgctcgagaagaaggatgaggtaatcaagtcctggaagaccagccaagtgagattaataagaacctagagaagagaatg

SEQ ID NO: 55628 - DNA, 498 bp, Arabidopsis thaliana landsberg
  unsure (1)..(498): unsure at all n locations
cccggccacgtgtcactacctagccccccccccatccattcccctaataccggcatggcttacctccgacccgaagcggnnnnnnnnnnnnnnnnnngtctggttgacttctgactttcaacattctcgttactaacaaaccgaaattctaatcttaagtcagaaccaaatcgacatttttccatttttcaattaacganatattagttaaaagataattatatgattggtagacgaatatggaaaaaaaatttagaaaacaaatttgagaaaacagtaaacgaaaagaaagaagtacanaatgtgtcttatgattaaacaaataaaatatatagaaaatgatgaaacgagaaatataagattcgacattttgtttgattttgtagtatataagtttttcaaatataagtagaaatgtcgatttctaaacaacacgtgatctgaatgatcatattcgtcaagtttagttaatggagtttcaacggataatggtgaagg

SEQ ID NO: 55629 - DNA, 1237 bp, Arabidopsis thaliana landsberg
  unsure (1)..(1237): unsure at all n locations
ttatgtattcattatgatatttgcagcgttataagggtgatatctcagacttggagctttactttgttattttgaataatgaatatggagagaggacagaggaagagctacttccagggggccaagacatgcgagttacaaatgagaatgttataactttcattcatctggtttccaatcatcggttaaattttcaggtactggggaaccacttacctctcatttatcttggcatacctgaggtcaccctgtaaatcaacagctattgatatcatctcatttgcagatacgccagcagagttctcatttcttgagggggtttcagcaactcattccgaaagaatggatcgacatgttcaatgannnnnnnnnnnnnnnnnnnnnnnagtgtataattatacttgctttgttagttgttccctcgaggagcatgaagagagaaattttacctttgtgggctttggttgcaggttctcatatctggttcagttgatagtttggatatagacgacttgcgaaacaacactaattatgctggaggctaccacgcggtgagtggttcttcactgttagccgaaatgccattgtgaattagtgtagggacacttttggagtattgttatatatgattatatcgctatgttgttgacacttgacagggacattatgtgatcgatatgttctgggaagttatgaaaagcttctcaactgaaaaccagaagaagttcttaaagtaagcaaactttgcagttactactacagtctgtgtacgcaatgatttaccggagtctatgaattttctaagggaactaagaggtacctctatttttcaatttcaggtttgtgacaggctgctcacgaagaccactgctgggtttcaaatacttgaaacctgcattctgcatacagaggtaatatacacagactcacaatcgttttgacttttgatgggccctggacaatagaatcataaaatatccatcctcgatggaatgtgtatcagggctgccggtagtgcgagtaatgaatcagttgataaactgccgacatcagccacttgtatgaatcttcttaagcttccgccctatcaaaggtttgtcctctcataacacaaactctttggttttgcttagctaagagacttgttttgttgccaaatagcccctctccgtgttgtaattggaaaaagcaaataaagcataaattgttgttaatgatgcagcaaagagctcttgag

SEQ ID NO: 55630 - DNA, 351 bp, Arabidopsis thaliana landsberg
atatacaagtaaaagataaaagtatttttatttcttgtagactttggttgagaagacaaatgttagttgtgtaaaaatgtctaaagattcctgacgatagctacacaaaatttaagaaataatagtagactttgaatttgctaaattttgaagggatcgagaaagtgagcaaaaaagagtggcacccacatgacagaaaatgagccgtttgcggaccacgatgcctcatgccttggactcacgtagtctctcactgttcataaagggcccattaacctcattgctcttgtctccttccacacgtgtgtgctcgtgcggtcgtgcctgtcctgtcagtgtgaatgacggcta

SEQ ID NO: 55631 - DNA, 170 bp, Arabidopsis thaliana landsberg
  unsure (1)..(170): unsure at all n locations
cccccccgggggcgcccccccccccccccccccccccccccccccccctccccccccccccccccccccctccccccccccaccaccccccccccccccccctccccccccccccccctcccaccccccntccctcccccccccccctgtccccccccccaccccccccc

SEQ ID NO: 55632 - DNA, 391 bp, Arabidopsis thaliana landsberg
tttttatttttatgcttgaatctgagggttttgttatctacggtgtcatgatgttcagaatcatattcagaacttacatcaaaactaatgttatactccaggttcgattcgattatgtgcattgcgcatagggttgagacacaggatgaggtttcgctctcacggatgtgtgcttatgtgtactacgtgaccgtctgatttgctaacttattggcgagactagatacatatgtattccgtttcaagaaaaggtgggccccaagtcatgattgattgggtcgctcgcagttcatataaactaatttgtattgaggccctggtcggattgaatatattgcgcaagaatggagagacttgatccattttgatacacacttgtataatcggggat

SEQ ID NO: 55633 - DNA, 968 bp, Arabidopsis thaliana landsberg
gaccaaaagactctcatgctaagtaattgaaggacatttcagccgccagcttgacccaattaaaaagcccattttagtttttcttccctttgttttctcttattttaattttacctcagtttataatattttattctctgaaatctgaaaaatcatctcttctgaaaattttgttttccgttaattcgtcgagtctctcgatctccgttctcatcagatttcaaactctccgatctcggattccgacgagatattagtctcattgtcgaaagagatctgttccgatacggcgtgagaaatggatagcggcgacattgaagaagccggcgggaatggcgaagaggaattccggtcaggaccacgtctcggcggtagcaaatacagaccggtggtggcgcacgatagagcggttgttgagatgtcctccatcgatcctggatcttcctcttccaccctcaagtaatttcttcttcttttataaaaattcattgggaacttcaatttcgcgagatgttgatgacgattctgtgtactgatcagtagaaatgggatgctcgttgatatgatattaggctgctaggttgtttagatttttcgtttcgtcgttcccttgtgaacggatagttcgactatatgatgttgaaagtgacgttagcttaataagatttgcattacaattttgttatcatttacatttgcttcgatcaccagttgtggctgaagttagtcacataggtagatggattgcataagtctctacaagatcatttatattttggttgctttcttactgcttgtaaagagaatctttaacggtgcatgaatattccaaactctaccttggaattttttttgtaccttttctcatcatgagtgtctcacatttgccgtttttgacaggaacatataagtagttgcaccatgagacgtgggcgctggccgtaggggaccagaagatggtgtcaatg

SEQ ID NO: 55634 - DNA, 127 bp, Arabidopsis thaliana landsberg
cgagccatgcggccagccatttatggtgggtcagccttgggccagacaaggaatccactcgagtggcttcccttcagtttgcccgaccccccctctaactctgccatgctcgaccccaggtttggta

SEQ ID NO: 55635 - DNA, 939 bp, Arabidopsis thaliana landsberg
  unsure (1)..(939): unsure at all n locations
ctacttgatcattaaggagttatctccatcatctgatgaggtctttaaattttactcaatttcaataccaacatcggggcacttattgtacgtatattttctgataagttgttggttttttcgcccataggttatcatcgtgacaagctctctgatgaaggatatgaatagtaaaattgatatgtatcgagcaaatgctatccgtgtcctctgccggataatagacggaacccttctcactcagattgagcgatacttgaaacaagccattgtggataagaatcccgttgtttcaagtgcagctttagtcagtgggcttcacttgctcaaggtaccttttacacaccaaaactattaggtagcttcttaattgtaatgttatgcttatattcgtatattgctgttttcagacaaacccagaaattgttaaaagatggagcaatgaagttcaagaaggtattcaatccagatcagcccttgttcagttccatgccctagctttgctccatcaggttagtttgttgcattattatcaccgaagtcgattggtctatgtttctactctttgtttaattaaacagccactgagaagaagtatctcggaaaatgagaggtgttactatgtgtattggactagattcataaataataagttttctgtagcagcatcgtagctctttactacggccttttccagcaattttagtttcttgtgaggtttaatctgtgtctggagtctgtctcagatactgctgattctagcatatgtaactaattaggttggttaggacaacctatttatgtgtctaagatgtacgagttaccaaatgatatgtattgctgctgttacgttgatttaaaatgactcccaacatgatacactctccttcttacttatagntgtagtgagaatcgatctaataactgtcaatctttgat

SEQ ID NO: 55636 - DNA, 144 bp, Arabidopsis thaliana landsberg
caggctcgtttcagacactagctattgcgcgcaaagcgtgtgcgggattgggcactagaccgaacctgttcaattggtgacacattgtctgtgagccaatatcatttgtgggccgtgttcttaccatttgccattacattggtt

SEQ ID NO: 55637 - DNA, 240 bp, Arabidopsis thaliana landsberg
aggtaaagatgatggcgagcacgaccggaccggtatttcccctgtcgacccacgcgtccggtttaatcttcccaaggaggggctcgcgtctgagtagctagttggtgaggtaatagcttaccaaggcgatgatcagtagctggtccgagaggatgatcagccacactgggactggaatgcacacccatgttgatgaacatgagatctttaaaattgatataaagccttctgccatgttgc

SEQ ID NO: 55638 - DNA, 1030 bp, Arabidopsis thaliana landsberg
tatgcacgacgtcgttctcagtcccactccatgtcactctttacagatcccaaaccctttgattttttttcttttttcctttttttacaatagcaacaccaacaacaataatgtaacatagttacagttttataatcgcaaaaaattacatccccaataactaatgcatatagattcacatctcaatgttgatggtctaatactccgaattctttataaaaaaaacagtaatttacgacaataatttgctacatataattcatggctcggtttagataatgtaataatactctgaattctaaaattggttggtgcatgagataaaacagttgaacatgtttaacgtggaatacttttagggtgattttctttagtagaaaaaaagaagtgattttcgataccttgtgaccgaagataaaataaagaagaccgaaccagatagatcaaaaccgcaaataaaccggttgaactacaaaacatccggttaagtcccgaaaaatcacggtttattttgctcctgactctaataaaattctgtttaccagaacaacaaaaccgactgaaaatctatggtttatgttgatccccgactctaatagaattcgggtaaccagagctaaaccggaccaaagctctctaataataataaccgtataagcaagctcataagagacaaaaggattacattgacgttaccttacaaaaaggttgttacactaaaagaattcattttgaagaatacaaaaacaagcttcgtaggttcttgtctaaaatcagtcattgaaaatcagaagacgatgaagatgttagatcaggatcttcaaacttattaaaccttttccgagtcgctgcatcgttgctaatgctaatcccatgctgctttctaccatacgagtcttcgtttatgtaatcttcatcctcatcatcaacaacattcacattcacatccattttcatgttcatgtcttcttcttcttcctcttcttcttcgtattcatcatcactatgtaagctaaattcccccctacct

SEQ ID NO: 55639 - DNA, 490 bp, Arabidopsis thaliana landsberg
ctagaaacatctcacatagtataaagcaagaggcataatctagtgctacgcactttggagtgtcacttttttttttgctaacaacggtgaagattgaagattcgatgatcaacggcttgtttgcgagttcatgtgcttagtttgacaactgtaacacaagtcagcgccggtgagagccacgtgtgtggaagtatgagtttggttcaccattgattttttttttttttccaaacttataaccggatagtagtcatggacaagatcgaaccggttcttgggttaattagagtcattagacagtttttgagttaatgaatatactgtatatatatgtattggtataggatttagtttctcgatttttctgcatttttgttgtttcatatgttgattggacaattttatgtcttccggctctgttctccaactttttagatgaaaacttctcaaatatcaacaataagcagtacaattttgttctatggaagta

SEQ ID NO: 55640 - DNA, 173 bp, Arabidopsis thaliana landsberg
  unsure (1)..(173): unsure at all n locations
cttcaaaaaagagaatttttataaactcactcgaaatggcttcttcttcgaatctgattatgtaataaacttcactgagaaaatctccaaactcaaaaacccatagaaatcttcattttccggaagagaaatttgggaaaaatgagaacagagacgaaaccggntccgagaag

SEQ ID NO: 55641 - DNA, 419 bp, Arabidopsis thaliana landsberg
ttattcatttttgaacgctttttataaaaggatagaagcctagggatcttgaactatagagccatgctcatcatgtcttcttgctggcagacgcactataggaatccgctgtatttgtaaaatcgccatatgtagtagcctttatgtcataaaccatacaagggtggtctattaaaaagatgcattgtatagcaaacatgattttaaattcgaggggctcacacaccttggtgatgaaacattaccgaggctacattgaatatggtttggggaagacttattctcagcaccttgatgcactgtatgttaaagatcgtatatttaacgatcggtcgtacgcagaaacaatgcacttggcttgattccaccaagcttacaatacaacgatgtctatgatgctggtaagcaggtcaagattc

SEQ ID NO: 55642 - DNA, 385 bp, Arabidopsis thaliana landsberg
ttagttttttattttattttacagcaacagttgacctttatttcaaactattattttaattagaaagcgaggttagagactatgcttattttcggttctaagagatgaaatggtcatccaagaggtcttgagacaaaaccggaaggcaatgatgtagtaacacatcaccaaactgtactaaattacctattgtcccaaaaatacaaaacaaggctcgccctaattttttttgttttattgacccaactctttttttggcttaataccaaatggaaagatacttctttcttttctcttctgatacctttcatttgacctaattgtgaagagtcatcgcgtgagagaccaccaagaggaggcttactgtggatttgagagcctgtca

SEQ ID NO: 55643 - DNA, 953 bp, Arabidopsis thaliana landsberg
aattggcgcttctgttgtggttctaacttgtagacatgatccctcacactcttcattaccccataaccccaatttttcatcatcataaccaacttttccacactaataattctcttgatttacctattcgagtcactatatacattacagggactccatgttcctattcagtatggccatattcattttatttgaaacaaaaaaagtttattgaactatattgtgaaactatgatttatgaatgtttacttctgatctaaagtcgtaaagaaatatttttgtgatgttattgtatgttcaagatgtatagcttacataccaaggtaagctgtgtgggtgacattcacaacataaaagaatgacaatatttaataaaatatatacatttacagtgtaatcattttatctttaatcctgacacttattttcacatgaaacagttatgccgaaaagttgaattaggtgtgatcttgaacttgaagccttgtctaaactaaagtgaaatttatgttctggaaactactaatatcatatttttggataccttagccaattacatgtctacaacaaaaacaatacactgaaaacctttacactatagtacaaaagaggttgattttgcaaggtaggtatgatgtgatgtatttctttacaagccatgcctagtcaccaatcaggcttcggtgatagaaattaagattttctccaaattataaaactacaaaagagacagttccttacgacaaaaagcataacatattgaaattaagacttattttgaaagagtttttttcccccagtttcccaacgaatttattttccaatacaaaaactataaaagggacaacccctaacgacaaaaagcataaaagaatattagaactaagattttttttttttttttttttttaaagagtttttccgaactttcttacaaattcaatttccaattt

SEQ ID NO: 55644 - DNA, 617 bp, Arabidopsis thaliana landsberg
ttaaagtggcttcagagaaaccctctcctccaaccaaaggtcgtaaggagtgaagttagctattggtaatctaactcaagactcctgcaacaatagctccaagttgtctccagcattctacaaaagagccatcgccacctctgtttttttttttttctttctgactgtattatgaagagataggatctttgatgtgttgtgttaatatggacaagtctggtctttgccctttttcttgatagaatcgtagatgggtttgtaaatttttgcattttatttttctcctttaaaaccacaaggattttgttaacgaagtggtgtattcatatttcaaaggtacatttgcaacaccattgattctttattccaattcttatctacgtgtgtgtgtgaatgaaacttgaaaccaatacaagtcactaatgctctcagattatgtaattgggctttactgggccgtttataaaattgggctagaaaaagggagacagcagacgacaagagcatccttgttctctttaaaccctaaattacaagcaaatcaccaacagagagagtaatggcgaaaaattctggtagctcgtttgaagcagagaaatcagagggaaagtggctta

SEQ ID NO: 55645 - DNA, 599 bp, Arabidopsis thaliana landsberg
gaggccaatacagtagaggagcgaggcgaacctcataaaacgtaggaagattgagggagcccaattgtataatttcagagacagacataagtcaacaagagcattacgacaaacacagacatttgactggcgatggatgcgcgagagagcgatcacattactgacttatgtctggacattagaacgccatagagataaaacaacatacccctaaatgtatcatgagcacatctgagcatccatataaactgatggaaaatcatcacaaaagtgaaagctatctcggtttatttagtatattatatcagataaggaagtgacgacaactcacgagagactataagaacgtaccagcttatgtatgatattaatcaggagtgagattcgcatgtgtatgggcatatatattatacataataaatgaaaattggatgagacaagatggaccgctctaagtgtgattgagatgtagctcgagaccaaagagaccgttatcatcatcaaccatcatgtcctctctttagcacatggaaagcaatatactatagaacatgtcctatatatatggatcaagcataccaatcagagtccattttgat

SEQ ID NO: 55646 - DNA, 589 bp, Arabidopsis thaliana landsberg
agactttggacttcaatggtcttgcggtagaggtcccagagatagtgctgcctctaaaagatatggtgatcaagtttaactcggcagacctccttacctggccctcattcacttagaccttattcgaacacctatatccactcccgagcactattgaccccactaaccaagagctttggaagctttcttatgctttgtctttctccggaaagaaaatcgtcatcattcccaataccgataagttcaccacgccctcaagcatgctcacttctgggcacttttcgaataaccaagcgggccaattaaaggtgcttgtcgtcctgatatcgatagacgtgggtgataagcaggagccaatcataccgctaaggccagatgaatatttaacaccggccaaggacggcaagaaacagaaggtcaaataggaggatttgagcccagctcctgggcttaagaaacatatcaagcaagagaggcagatcaatcaggacaatggtacgaagaataaggaataggtcaagtaggagaaggtagttctagctttcatctatctgacgtagcgtatgaggaccataatgatatcctcgac

SEQ ID NO: 55647 - DNA, 1381 bp, Arabidopsis thaliana landsberg
atagaacaaaggtgctcctcatagggctcctttttcataattataaaccaataaaaccataggtaaaaatcatatatattatataaataagcattccatatttatatatgtatcgtgtattatttattaggtatatcgtaacgggtacgataaaataagtagtactctattatcacgaaaatgtgtttacttttgtggggtttttttttcttgcttttgtgggtagtgtcaaattagtttcttacttgtatttgttgatgaattattggtctcttcatgaataaaagaagttgtatgtgattttggtactatataaaagtatattcgtcgtaataagtgtagattaataaaactaaagaaattaaaaagaaaaggaagaggactcgtagtttgggtaaatttcattgggagagggaagagacgacgacaggttttcacggggacagctgaaaagtcttagctgcgtcatcaattacaccagtcaccaacaccgttttttctactttactagtatgaaaataaaatgttagttttttttatttttcttttcaacaccaataaaatgtggggggctttcaacagacaacaagcaataactttaagattttaaagtggtatcaatttatgtttagtgtgatatcatagtaattagtttgttaataaagaaattttaaacgctttaaaatattcatttttttgttattgttatttttattgacaaacctatctataattaattaatttttaagagttttgacgatttctattaaagtgttgttttttcaattttggatttatttttaaaaatgatgttagttctacgaaatcaaaaataatatacaatataaatcgtcgtcataaaatattaacatataatatatcaaattaaaatttttactacaaaaaatccaagttaatatttgaaattttgtaaatctaaagtatgtaaccgtaaaaacattttgaaatttgtgtattattggagataaatgataaacttacagaaaatggtgattttcttttttgcagaaaaccgtaaataatataacacggagtaacataaatgtatggagcccaaacatatttaactcttgtattttaagagtatgttaacacaaaaaaaagtaggtgttcttttgtgggaattgtttatcttaagtttgtcctttctacagtaggtcatgtgtagagactgccacaatattgatataaactatataaaaatacattggttttctactcttgttagtgatagttttcacaatcgaataagtggttatgagaaatggttttcttatgatttattcaattaagttgtaggaactgtatgtttgttttactcgcagatgtatcttaagatcccttcatcgggaactaaacc

SEQ ID NO: 55648 - DNA, 611 bp, Arabidopsis thaliana landsberg
tgttccatgaagatgaaacagagcgatatagagcatggtatgggtaaggaagacgaagaagacaaagctcagctatatcatttggtagacctgaaatcaatggctgagattttgttcttgtttcttcttctgcttgatcattaatggtgtttatgtttgacgtagtttcttgttctgccattgttgttgatattcataagatgaaatggttttagatataaaatgttaaagtttgggaaaagaatgcaaatccatgaatgtagttggatcttgattgataaaaggtcacattcgcataattacgacatgggacggtggatggttgagagtctcgagaaaactagtggttacacatgagtccacgtttgtggttatttggagccaacaattctcagattacgtgtgtatctatgtagagacaattttcaagatagttataattgcagttactgtttccagagacagttttgtaacacgacattgtttaacattatgtcaggaccaattcgatcttcttgaagtcatgttctcctcttgctattacaagactttgttcgtatattcaatctaatataatagttgaagatgtttctggttatgatattgtgact

SEQ ID NO: 55649 - DNA, 633 bp, Arabidopsis thaliana landsberg
ctcttgtgtgacataatctaattttgttaatgtaccaatcatttccatatgtgtatccgatgtctgcaccaacaaacaccaccaataagcaaaaatgtcacgacttcaaagaagatgatcgagaacaagtactctagctgggaagcataagcaaacactatacctcaaatccaacaacattctctacaaataacatttgtggaggctttgttgtatgcggtataagctcaagaatcctgagaaacgaaaaagcccgagcatcaccagagtgtttctgaaggcctaaccaaaaaaaactgttagtatccaaaagcaagtcatgttgatagtaaagaaaacacagtgaaatgaatcaccttgtctagtataaggttgacaaggaggagaaagaagccaagcatctgcattatacttatctaaatcagcagcagtgagactctgaatattcccctatgaaaaacaaccaaaacaataagaactaatcatggactaagtcacagaactagcatcatctatgatttgcaaatgtaacaatgcttctattgattatatcatatataagcattaagcaacctgatagggacgatgtttgaaattatgttgataaacatcattagcagaatcattgatctc

SEQ ID NO: 55650 - DNA, 324 bp, Arabidopsis thaliana landsberg
  unsure (1)..(324): unsure at all n locations
ttctcagcaatcgcgagctcccaacaactcactgaaagtttgattataaatttattaatgtaatcaatagttgtttttctattaaaaaaaaggaatgaaactaaatattatttacttagtaatgcaatcaatagagttgattattcgattttagaattattcttataaagattgctttttttatttagaagcttttagaataattttacagattcacatagattttatggggaatatcacctttaccctaggattttgaaaggtcttattggncaattttnttttaaaggtaattaaccatttacccttaactgtattttaatc

SEQ ID NO: 55651 - DNA, 467 bp, Arabidopsis thaliana landsberg
atttaataagtctaagccacgcgcaaaatattcatcggtggactttgcccatgctgctggtacttgttttatagtcataccaatgtgagcgcgtaggcccgcagattttgccgcttgtgcgggtgctggcaaaaagaaatacatatcattaaagcaggctgagccactgcgtgtcaattcagccatggcatacagctatgcatcatgcacgaattcttgatttacccattgcttttccgcaggccaaaaatggtgcttcaaccaagccataagcgctaaatcatctgcccagccacgacagtaatttatagccaagtgggtgtgaccattgatcaagcctgtcatgaaggagcgtgcactacaatcttgcgtgctttttgatgagtatttttcagcgactatgaagcttgtgagtacattttgaatgatgccgctgccaataaccagtgcgtgactctctaaactaa

SEQ ID NO: 55652 - DNA, 227 bp, Arabidopsis thaliana landsberg
ccccccccccctttccccgcccccccccccccccccccctcccccccccccccccaccccctcttccccccccgcgccgccccccccgacaacaaaaaccccccccccccccccccccccccctccccccccccccccccccccccccccccccccccccccccccccccccccccccctcctcccccccctcgcccggccgccgccccccgcgccccacccccccc

SEQ ID NO: 55653 - DNA, 1454 bp, Arabidopsis thaliana landsberg
tttgacaaacaattatatacagtatataacatatataaaagaattacacacgtgtgttgagttatcgcacgtgtgtgtgacagggaaacctgcggctgagtggtgagagagaaatacgtcagcaagcagctaattgtgttttgcttcacgcaaagcatttgtgtttgtttgtcctttgtatatatcacaaatctgctctgccgttgcttccaagctttactcattctaattagtactagtacattcattctcattactataataattcataatccccaccacttgatccctcgttataatccgattttagtaccttgttaactgaacccaccagcctatatatatcttcattactcactatctaaaattctaaatccttacttgttcactactttctaggccttgcttgtgtgatagactgatagttagttctagattctcagtggcatatacaaaatctttttatgtcttaaacctatgattgctaatttagatgatatatattgttgatttgtctacttttcaatttacaagtatatgttatccctccttgtgttatatgctttcattgattttaggattccataaatagataattctttcacttgtttgaaaatagcttgtttcttgagtgtgtgattcaactatgtacagaaaagtgaaacacaccaaggaaaacaaaaaacaaaaatatggacatacaaaagaaaagatgatcaagttatagaaaaatgtaatgattataaatgacccaccaccaaaagcaagacatgattttcttgcctgacacgatcctctatgctccacatcaacttaaaaacatttattcataaacaaacccatccatctctctctcttaaacatctctttggattggatatataataactgtggtcgacgacgacacaacttcccccaaacaaaacgttacgtctttgacataaaagatgagcggaagcaccaccggttgtggaggtccatgcggcgcatgtaagtttctccgacggaaatgcgttgctgactgtgtcttcgctccctactttgattcggtggaagggacgtctcatttcacggccgtgcacaaggttttcggggcgagcaacgcctccaagctcctcatgatgattccagccagccggagactggacgctgtcgtcacgcttacttacgaggcattggctaggcttcgcgatcccgtctacggatgcgttggtcatatcttcgcccttcaacatcaggtattcaactatataaaacccaatattgtcacatatttatgtatatataatatatgtttgatgatctatatacattgaaagatttactatgcatgcatgcgtgtatttagttatatagaagttcattgtataataaaatcatcccataacattaggttaaagatgagatttatatatccgcatcttttagccacgtaacttgttacttttataaca

SEQ ID NO: 55654 - DNA, 147 bp, Arabidopsis thaliana landsberg
gcatataaactgctgccaatagcgcatgcgtcccccgacgtattccttaggaaaagaattttgcttcgcggcttaaggggagactgactatacggaggcgctaaacttggaaagatatcgtaccctattcccctttaaaacagaaac

SEQ ID NO: 55655 - DNA, 1315 bp, Arabidopsis thaliana landsberg
aatcgcatactaaaccaatcaaaatcagactaaccaaacaaaagcattagaagatcagtccgatgttacgacaataaccctagaacatggccgaaacattagtggcagaagatgactttgagctctctaggagaagcacagtcatgcataagcgaaggactatcatgagcaaaagtgaaactcgaaggacacgcatgcttaaagaacagcgaatggctcgaagctttacacgtgttagggctattgtaatgaccacgacaacacagctcgtctgtatggaaagcctcacacccactcttacaagccaccacgtgtccactgtgtgaccggacctgaagatgagccggacacgtttttattagatcttcacgacaaccaacgacaggacagacaccatggccttcgtgaggagtcacggtcatcggaacattgtaaccgtcaacgagagagacaccgtaagaggagaagtcgtggtgaccaccgtggtggaggtcgaactgagctagagaagctggtggtgccccgccgagaccgttgcattccaggcggtttccgcagtctccggtgaggcaggagaattttccgttgtagtgggcacaccaggttctggcccagatgcgaccggaccagtgtgtggttggaacgttgaaggagcggtgagtgaaagttgggagagcgaagcacctttctctaggacggggtggccggcgttgggttgaatggctggccagacagtgaagggacagttgttgacgacggtgaggaagagacgggaagtgtctacggcggaggagaaggagatgaggaggaggaaggaggcggcgagaggaagagaggttttagccattgtgtagcttttggtgtgaaaggtgtgccaatgcgacgtgtgtgtatataagctaaagtatttttcgatatgcatacattttttggagtgacgaaaataccctttggatgttttgggtggttaggcaatgaatttagcatgtgggtttaaggaggcgaagggctttaatgtcagtttaaaagagatgaatattggattctatttctatgagtcaaaagcttgaaagctctttaaagaataaaatgatggcatgtggtttgtgactaacgaagctttgtttccttcattggtaaactaatcctaatgtgtgtttttggtaaatagcactatttcggatggttgaaaaataacatattctgaaaaatattaggcagatatattaatttttacgctgtttccaacagttttgcttttctaggataaaaagcataaacatatgtaatgtttacaagttacaatgagtaagcc

SEQ ID NO: 55656 - DNA, 1574 bp, Arabidopsis thaliana landsberg
aagcgaggaatattagagatccattgatcttggtcaatgaaattagagatagagaattgttgtttagtgtaaaaagaatgaagtttatcaatccaaggaactcttcgtgacatatccgatcgtgctcctttacactcaacttctgcatacgtgaaactcatcctaacacacaaaaaaaaacatcattatcacatatagtttgataatggtatatatgatatattatagttagagatgtgcttactcgtatccaccatagtgccaagagtaccaaccctcagggtgcacgacggaagagagatcggtttggatgaatatcactcgactgaatggaccataggctcgtccaagatagacactggtgctccctgaaacactacctcgtaggaacacgaacccacttgggtccgaatcgctacttcttccttgagccgttatgtacccaaacgacacttttgatgccaatgctcctgccgttgcgtttatatgacagtcctgtcaaacattttatacgattcatgcatgtttcacatagatcttaatcggtggtgtctcaaaatcaacttgttgacttacaaaaaatcagtcctcctagctagtcaagtcacatgtttagttttgttctaggaaaaaacatgctacaaacaaggttttaaccaagtttgtttctattatttgaatgactgaaatgttactttttctagaacaaaaagttgattttagtacagggtgtggctgtgcctagctcctttctagggcgttttgaaacaaagattttataaaagtgtgtttgtactgtgaatgtaacagtctttgtgtaaatagtgatcaagtacagttttcgtgttttgccattgaaaatcgaagtgtacgtaatagagagagatattaagtatacatacctcgtaaacagattggccacttccaaaaatgaaatcgatagcaccttcgatgtaacaatttttgaagtgatgtctgccaagattatcccacactgtatcttgcaaccccaagaaatcacagttgtaaaacgctgatttatcgccataaaccgaaatcgcaaccgctggctttatatcccaactcataccgtttgctttagttagactagtcaaacgattataagtgttctgccacaaaaacatataaaatgttatcattatcaaaattatattgttacgtaacaaaatatagtatataagtcaaaagatatgttggtccgttccgttacgtaccatgattgataagtttcggacgacaatatgggatggatatgaagtgaaagttgagctgacgtcagtggctgcatgaccattatacgtgatggtggtgactctttgtccctctccttctactattatgcacggtttattatatggtattatcaccttctctctgttttatacattcattatcatacaaaacaatatgttactattaatgttaatcttactattaagaaaattaacaattgcaaatccatcgaaatcgttgtaaattagattaatacgggtctagaattctatgaaccagaacatcacgaattcaagatttaatgatatcaactatgcttt

SEQ ID NO: 55657 - DNA, 369 bp, Arabidopsis thaliana landsberg
  unsure (1)..(369): unsure at all n locations
tagtannnnnnnnnnnnnnnnnnnnnnnnnnnnnnnnnnnnnnnnnnnnnnnnnnnnnnnnnnnnnnnnnnnnnnnnnnnnnnnnnnnnnnnnnnnnnnnnnnnnnnnnnnnnnnnnnnnnnnnnnnnnnnnnnnnnnnnnnnnnnnnnnnnnnnnnnnnnnnnnnnnnnnnnnnnnnnnnnnnnnnnnnnnnnnnnnnnnnnnnnnnnnnnnnnnnnnnnnnnnnnnnnnnnnnnnnntccaaagggtaacgagcacgaactcgtacgcacagtcacagcagtttcccgagagaaattgtcatccgctaatcattcaagccatgatactcgaccggttgcattgcgtctaaaccctggagtgccagac

SEQ ID NO: 55658 - DNA, 562 bp, Arabidopsis thaliana landsberg
  unsure (1)..(562): unsure at all n locations
gaagcgtgaaataatctttgcccaattaattattgaaaaagtaatacttgcgtatcgccgacaaaggttgattcacaaagaggccgcagggtagcaaagcattactacattactacctcatattgcacaagtgaaatgttttcacggaaaagtcgcccctacattactactacaatgaggggtttgctggttatttattgacaaaaagtaggaggattttgacttttagccggcagtcagatccattttgccgattacttcttcgaggtcgattccctcacccaaaaccggtttgaaaaggtcgccttcgcgctggatgcgttccatcgcattgaagatcgtgaagtctttcagttgcaatcccttctttacctcctcccaatgcagtggcatcgaaacggtagcgccgggtttcgggcgcaccgaatagggcgcggcgagcgtggccttaggccggttttgaaggtaatcgatgtagagcttgcctttgcggttnttggtcaggcgctccacgctggtgaaatcgggagtttgctgtgtacctggcctgcacccattcgcg

SEQ ID NO: 55659 - DNA, 346 bp, Arabidopsis thaliana landsberg
tctcgtcgaatttgtttagccgaaagttctcttgatctctctctagaacaatataatattagtttttcaagtcttataattcaatttggcttgctgtttgcattcaccttgtgttagtttcttagcttaagtcacaagccaaccttgtattgattccttttcacgaaggcttttactctctttattgccttcatggcttcatgagatccaaccctttaaacccaagttcagaatttatatcacgtacacttcgtaagtgcttctttcttttttaaccatgaaacgtgaaagctgctgcgatgtgctctgataagatgttcggaggagcttatgaatctccattcct

SEQ ID NO: 55660 - DNA, 794 bp, Arabidopsis thaliana landsberg
acaaaaagtcggagaaatttgtcgaatactttaaggtaatcaaatgattcttacattgatattctctttacttgtctctgcgatattgtttgtcattgagtgcaagtactactaccatttgaattatatcccacaaatcaatcaaataaaaacattaacatcatctacaagtaaagttttcaatttgttttcttcatttgtcatacttgtaggggagaaatttaattcgaaaaactttttttttttctttcttctaaagaaaaaaaatgaagaactacgatgataattagaaacttcgaggaaagcaactcgacgcaaaaggaggtttgttgtggcatggaaaatttatggctgctgttctggctttctaaactcgtaaatttatttgatgttctgcattttaaaccttctaaatagtaaacaatatctaacaatttaaccaattttttttttttttcaaatcaaatcatgcatacattacaaatataaagatctggaattagattcgatcatatgatctgtcttttgttcataagacatgtacgtgctgtgaatatgatgaccttgtatttttcatatatgattaataacgactctccgcaacaatgtcgggccaccttttgatccagaaaaaaaaaaaaagtggttccagttgagtcttatcatcatggaatgaaatcgagctagcgttgtcaagaatcatgcaaagcgtacctttattcccaaaacgattcatgaccaaagttttttgataaaaacatatgttttgatggcaagtcaagaggccacgtaat

SEQ ID NO: 55661 - DNA, 1298 bp, Arabidopsis thaliana landsberg
ttttttttttcaatatttggattaatttgcaaacattgattgtttatgtatagatatgtataatgatatgcatgtgtatgtataattgctgttattcgtgtgttagtgtgtgctcacacctggcctatgaaaatattacttctcacgtttttctagcagctttcgtgtgcatgaaataattcacaagaaatccacacgagaaaaaaatcatcacacgaatcaaatctttatgcagaattaaaatcataataattagggaccagaaaaattaatgtggttcgcgatatgtcgtctgatttagtgacgatggtcacatgtttacccgacaaatccgaaataattaacaaaccatatatcatacaaacaaattaaactattattaaaaataaaaatcaactaagacggcagatataaaccatcgtgtgtggacagaacctcttcacacgtcgtattggtgtttttaccagaagtattcctaattctggttagtgttgataacttacactcaattatattccgatatttttctcaacatgttcatattggaggttgccgagacttgggcttctttgggcctaataattaacctggaccaagttgcgctagtcaatgacattacatattttattgtcattgcttatgcccatcgatatactattcttttgttttggttcaaaagcccatcgatgtacagtgcactcgatttccatgcctcgttgttcagataaaaaatcatgcacgtagatgtttaatactcgatttgttttatggaaatctttttgtttgagattatccttttcacaaatgttctggtaacccaagaagaagctcgtattgaaaattgatccatcgtcttgatttagtctaaacaaactattcgccgatagttgcaaatcctcggttcacaacagacgacgtttgttgaagaaccacaccaaagtacaaatcattcactgtactccaaactaatttatatatatacacacattaggtacgtatataacgttactttcaaaataaagctataaatatcctacgagtctatgacgtatattaagtttcgtcgtgattcaaagaattagtttcttggaagatagaaacccacggaccataaatagccttagcaaatatggacccagcggaaacaaacaatataggaggattgatacaaccaaaaatagacctcagggtttcgtttatattgcctgtccccatgctgaaaactatctttgcctaccttttgtagtctaccaatgtatgaatgaagaagcctgatttttataacgaaatataatatc

SEQ ID NO: 55662 - DNA, 279 bp, Arabidopsis thaliana landsberg
  unsure (1)..(279): unsure at all n locations
attagcagcaatgaattatagattatcatgcatcatgctacagtctggtatgcatcttatgagattgcaaactgtttttgatattgccgtagaacagttatgcgtacgcaagcttaattgcacctaggaagaaaaaacctatcaattcgctcgtgaaatatgttgccacggtctgtaggctgcagatcttacaagtaaaggtttctggggcctncttttgattgatagaacttgagggagcatattcaacctttcttcttgcggcgccttaagagtgaa

SEQ ID NO: 55663 - DNA, 572 bp, Arabidopsis thaliana landsberg
cactactttgcatttataacgaacgttaaatcattcttgaaacattcatgcaggccatgacgagtacattacgcgtttatgttattattgttgagtttatgattggtttttattcccaaatttgtgaatgaatgtggacattttataattaaaaaaattagaagattacagaaaaaaaaaggtttaaaaactagtaaaatactatggatgagtaaatgacgtaatttttagatttactcaatataatatatactgtatagaaaaaaatggaatataatatatagagagttttaattggaccatattttgcaagatttttctaagaagtttacctttcgtagctttggttttttgttgtttggctgctcacgttgatttcactttgaccaaattgaatgacaattgtgggacaaaagtgcggtgatttttgacaataataagaaatggggtcgtttatataaataaagagaaattggaggaccgttgacccagagactattgcgaaaacccgacacttcggggacgccacgttggaccaagcccattggttctatttggactcaaaacattga

SEQ ID NO: 55664 - DNA, 1094 bp, Arabidopsis thaliana landsberg
  unsure (1)..(1094): unsure at all n locations
ctagaaactctttatttttggtcaccaatcaaaccacattttatattttatattactagctctatgataagtgatggatcagacgtaaattattttatgaaacgtcactagctctatcaataaaacaacatagctttttcttttaatttccctcttctctacttgctttcatagcttttttgtttcatacttcaannnnnnnnnnnnnnnnnnnnnnnnnnnnncatacacagatttttgtaatagatatagttcaatgcattacatactgtatatcgtttaaggttattagttcatcctttgggtgatttggtctgactagaaatccgaactaaaacctagcttttccagccgtaactgatttatgtcatccggcctcaagctgatcgaaaataagctagtatgataaagaaaagttggtccagcaagttttgaaatgctccgacatcgatctgggtggacaaatggtttaatttattttgcaaagagccaaagaccaagcaatacaaccagccggaaacaatacagacggtcaagccttcactttatagatgagtaggcgacaatgtacctagtgcatggaagtcgaacctaaagaatatcgaatttacgcgtttccctagatccaactactaccatatcgcatccgctccaaccgaatttatgtgtttattactacataatccataaaaggtttttgtattgtattattcaccatggcttaaactgagtttttatacattttacaagaaaaacttaacaaataaaaaaacattgttctcaaaatcgtaaaatttcaggggctggtgttagttgaggtgttatttggtcataaaccaaaattttgtcaaacacgtttcgactcattcccagctccctaacacctaatatagttccaatcttgaaaatgataggtgaacgtgcaatttatcacgtaaaccgttctcaaatatttacttaaaacatgagcacacaaaaaacgttaagaatatgtcaatgcttttgcttggcatgaccattttgttggaaatgatgttaacacaagaggtttcatgaattattatttgtttggaatgaagaaatatatacataag

SEQ ID NO: 55665 - DNA, 1071 bp, Arabidopsis thaliana landsberg
ttaaatcttctttggttgtgggtgtgaattcaaaagttcattgttctatgctgtctctgttggttaccaacaaaaggttcttgtggttcttgcatgtcccttcaggagaaaatctcacttttggtactgacaacttcatcgaaatggaaaaaagaggtgtcgtcgaagctaggaatgctgcttttgttctggttgctggtggtcttggcgagcgtcttggttacaatggaatcaaggtacatagtgaacaatgtttcatttacttaatcacttacccgtagatagaatagatagacctacaaacagatttgacccagtaatgaatctatttcttaggtggcacttccaagggagacaactacagggacatgcttcttgcagcattacattgaatctatattggctcttcaagaagctagcaacaagatcgattctggtatgtttctaattttttaaatcaacgtaagtgaataagtactttttcacattcctcagtgattgtatatttctgcagatggaagtgagagagacattcctttcattattatgacatctgatgatactcattcacgtacactggacctgttagagttaaactcttattttggaatgaaacctactcaagtacatcttctaaaacaggtaaaggatcatctattgagtttcctagacagattttatgaaaacgtaaaatgttttgagaaataatgcactattggctaccttttttctaggaaaaagttgcatgtcttgatgataacgatgccagacttgcattagaccctcacaacaaatacagtatccaggtacttgtgttcatgttaacgttttcaaagctagtacaaatatttgcaggctgacctgtcgttttctttgctactcatagacaaaacctcatggacatggtgatgtacattcgcttctttattccagtggccttcttcataaatggtagttcatctatcatatatatcttttagttttataagtctgttgactaaaacaattttttttttgttgcaatttcaggcttgaggctggtttaaaaagggttttgtttttccaagatac

SEQ ID NO: 55666 - DNA, 187 bp, Arabidopsis thaliana landsberg
acactaacaattatgtgtctggtgggttatgtccagatatttgttatacgtacacaagtagcatattggcatggtcgaagtgaagtgaatggaagaggagcgcaatctaatattgcaagatggggcttacctgaccgagagcactattgagggcatgattaagctttcttagactatcttagcgtct

SEQ ID NO: 55667 - DNA, 481 bp, Arabidopsis thaliana landsberg
tagagtatgggggaggtggtcatgcatcaacgtctggggatgtttatagttttggaatagtgttgttggagattttgacgagcagaagcccaatagatccaacgttcaaggacggctagggcatcatcaactttgttgagaataactttccgaatcaagtatttcaagtcattgactctgacctcctagaagaatgcaggaactcaactcaaggaaataatttggtacaagaaaatgagatctaccaatgcttggttgatctactgcaagtcacactttcgtttctctattcattaccatctgaatgatcgaacatgaagaaagtagccagcagaatgcatgcaatcaaaacatcacatattgggtggaagcacatgtaacaagagcaagggtgttcctaaattatacagtaacatacttaggatgggtcatagtcgaaaatgaccagtggcatggtggtacaggcagttagtaccgaccg

SEQ ID NO: 55668 - DNA, 537 bp, Arabidopsis thaliana landsberg
gctgtcgtcggtgtgaaggatcgggtccatgatgatctccgttattttgggccgcgcctctcgcggcctgactgcgaacccggtcatgcggatcgagaccggaaccgcaagcggagcgcggcggcccagcgaagcgccgggcggcggagggagggtttcttgacgcgagaggaatgacaggccgcgcccgcggactgtcaggggaagaaacccgaccgacccgctgaaggtcgagctccgcgtgataccggtcgcctctcggcaggcccgcaggcgcgccaagggaaaccggaaagctggcccgatccttccgcccaggccgcctgcgacccaacctgcggctccgtcccaccaccccgcgtcaggccatgaaggtcatcgcgtcttccggcgtgagttgcgacctcaggcttgcgatcatccggtcgggtcccagccagcgcagatcttcgttgaaatcgctgagctcgggcgacagcaccagcggcaggatcccggagatttgcgcgcgccggctcaatcgctcgattgcgtggc

SEQ ID NO: 55669 - DNA, 1032 bp, Arabidopsis thaliana landsberg
gtttgtccctctgacgaaaaatcctccgatctgttgcattttctccaaagcttgaatcaggtcaatcggtcgcggacttatccattgatgagtatataattttgtttgtgggtattgctttgtttgatctgctaatgcgtttactctttctgggtattgttcgattgcttctctctctctctcttttgtttgaataaaatgttatttttattgttaacagaatcatagtacatcgaatcgctttacaattatgttccgcttgttgatctcaatctgtagcagttttttgaccctactgttcatgctatccttagttgactgagaaagtacatctcttgaggtttgaggctatggggatcgtgtgtttggattagattatgattctctaataatcactgattagtgatttcatctaaaaaggctgatgcttttgcccttaatttgtttcgtttagactgattctgtttggaggtttttctgacaaagtttaagtttttatgtatctgcagaagaaagcttttgaagatcagcctaaaagtgatctctcataactgcttaaaagattgttgaaactttaagatgtttttggctctagataaacaagaatgaagtcgacattgttattggggctcttaatgctgaccttacacagtttttgaccagctgggggcctttcttctccggattccatctgattgttgtcaaagatcctgagctcaaggaggaactcaacataccagaaggctttgacgtaaatgtctactctaagactgacatggaaaaggttgtgggcgcatccaattccaccatgttctctggctattcttgcagatatttcggttatctcgtatctaaaaagaagtacattgtctctattgatgatgattgtgtccctgctaaagatccgaaggggttcctagtggatgctgttactcagcacgtgatcaatcttgaaaacccaggcacgcctcttttcttcaacaccctatatgatccttactgcgagggagcggattttgtgcgtggataccc

SEQ ID NO: 55670 - DNA, 598 bp, Arabidopsis thaliana landsberg
tgagctctggactgggcgcaataaatctgagaaagacaggggccttagcgcaatttatctgaagactcagacttaatccccgcgcggatggcgcggttgatttcatcaaaacccgagggctcatctgcaaaacaacccacgaaggggtatcgagggcctacaaccgtccgattagaaaccggccgccaggattagtccatgccttatatgaatcggtaaacaatcctgatcggtggatcgagatcctacggctcagatctatcatacgcagtaacactcccacgaccgctttccggccgccagatgcggatcgaacggcgtcgagcctattacgcgaatcggtatgcacatgatctaatcacagccgttgctggtcatccaacggcgcacaaccgacgccccaacagcgcccacacgcacggcggcgccgccccctgccccacgcccagccgaactccggcgaggtcgctaatcggtgctcccgcgcgctaagcctaaatcgactcgagatatccatgcggaaggtaagacggacacgagggacggatttcttaccgaggggtttgagcacaggagcgcagcacggcgaggtgcggtc

SEQ ID NO: 55671 - DNA, 1216 bp, Arabidopsis thaliana landsberg
tgggcatcaaatttatatagaatataatgtcatacgttagaacaattaagatatgcctttttccactatattaactaattgcttaggatattcagcatcttcaaatagttacttcatcattttatatagtatggtaattaatattcctaacctagagagaaattgttctatataaatactattttaatcgagtttcaattaaaaacaagagaacgctacaactaatctaaaaactagaactaaaaatatacagtaacaacgccaaatggataaaaaaattatttgaagttatcatgatatattataaaccattcatgattatatatgatggtttacattttacattcgagactttgatcacgagacaatggattgatggatcgtcataatttatcgaagtatcttttgttacaaataaaaaccatcgaaggcgcataaaatcatgtggatcaatgcatcttgcaatagttaagtaacaaaaataaaacctgaaacgtgtgttaacccattttgttctttgaacaaagaaacccattttcatattcttaattataatcatcatttctattgtatattttaatgaattatttaagataatttctatataagaatcatatgaatcttagtgctctttttactaatcatattgatcatattcgcaagggtaagtggtgtacgagtgactgtgtgaaaaagggatagctaagaaaaagatgcacacacaatcacaacttcacgacaaaagatgccgtgaagaatttggctcaaggattgcgagaataatcaacacttgtttggtatagtgccttacatgcatctacatttacaaatcacacacacacaccctataacaagatccatttacattggataaatataattttatataaatgcatctcaaattgatgagaatccaacaaattttaattaaaaagaataccaaaatttatctagtttgacccaaatttaagaaaaaataactagatcaacactccaacattatggtttacttgaatgacacaaattttatgttaaaagaccaaatactcaatttatttccagttctattaaactaaaacaattaaatagaaaactataaaaaagaaaatacaaaacgaaaaaaataaacgaaaaaaaattaaacgaaataaaatatgcaaaaaaaccaaattaacttaatcaccaaacacacacaaaaatgaatcactctcttaaa

SEQ ID NO: 55672 - DNA, 146 bp, Arabidopsis thaliana landsberg
ggcgtgtggtgcgatcacgccacggccgcgcgcgccagcgcgccggattttgccctttacccgtcaccgaagcgaatgcggcgaactcgagcgcttcctactgggtcgccagcggcaatagatacaccagccgcaaggaaagccta

SEQ ID NO: 55673 - DNA, 1645 bp, Arabidopsis thaliana landsberg
tttcttgttagatgactcagttccaacatttattttaattaaaatttaacgatagataacaatcaaaatttgacttatatccttttgttagaaaacagggaaagaacttgatgtgattatacagcatataatcaaaaatgaaatgatttgtagtattattattcagtgctaactgataagactccaagttcaacggtgttaaatctttctatcagtaacaaaaatttggttaaaaaaggttttaactttaacatataaaaaaagtcaaaattatggttgagtattcgcttgatgcgaggcgtaggtcatgcggcctcgtggacaataatgcttcacaatgtccacttattacaattttcattctttctctctctctctttcttccaaaacacaaaaattattatatcaaaaaaccaacacgtaagagaagaaaataagcatttttgtgagagtccctagatttatttatattttcttgctgtctcgtgaactactactaaagtaaaatcaagaaaaagctcctgagtactactggaaacaaaaaagcagagaacaagagaaaaaaaaaagaagacgactttatctttttctgggttttgttgttcttctttgactttatgggttcttttgttttagatttaggctcctacagatctgcttaaatctctgtgatcttgtgtcttaattcttctgtttacccgtaatttccggaggattctcttcttgcttttccctgagcttctggatttggtcagagaagccttaagttcaaaaggatttggcttttgaagattggtgttaattaagcttctgggttttcatcagtttgtctaaaaggttcatccttttctccttctctctttgatgtttattgcagtgagattctatgttctaacctcaaatctcaggtttttggtatcgaatctttgtaataaaacagttttgtctgaaattaactaagattttgactttgtaggtagtaaatcagatgagtaaaatttcattttgggaaatacctgattgttgttgaatcttttaatgcttttgattctgtgttgttacatacgtctctgttatctccagtttaaggaaagattatctgagattctctgttaatatatcaaattgagtcctgatttagcctcctatgatctcaattttggggcatttttggtgagttatcatcaagattctctttggttcattattgtctttaagaaagaaaaaaagctatattggggacatgacctagtttctttattgggcatgcgatgccttgcatatctcttctttcctaagctttagcgaaacactctttctcttttaggctccactttacttttatggctctttttctttttatttcttacttattaagaaggtgactcagaattgccttagctgaatgactttttttcttgtgggtgcttatgttaatggacagtgagtggagtctctcatcttagtctgaagctcttttttttggatttgagcatttctggtttgagaagaatcttttggaaaccaaagagaaatgtcgtttcgaggcattgttcaagatttgagagatgggtttgggagcttgtcaaggaggagtttcgattttaggctctcgagtcttcataaagggacagctcagggttct

SEQ ID NO: 55674 - DNA, 555 bp, Arabidopsis thaliana landsberg
cgcgcattggccccgccgatctgtaccgtgacctcgcgggtttccccggtttcaagggggacggttaatattacccactcgaacccggcttcttcggcatcgaccacttccgccaataccggtttgcccatgtacgcgctgagcgcgtaggccgtgcgtgccagcagttcgagctcgtgaggcgtgaaagtcagcggggaagggggcgatgcggtcatggcgtcggcggttggggactcgatgggcgggttttcggggggcggccgcgggccactcgtgcattttacggcatcgcctacaatcattgctttaagatcattcctggattccagagtttgcagtcatggctcaatacgtctacacgatgaatcgcgtcggcaagatcgtgccgcccaagcggcagatcctgcgcgacatttccctgtctttctttcccggcgcgaaaatcggcgtgctggggctgaatggcgcgggcaagtccaccttgctgcgcatcatggccggcgtcgaccgcgacatcgaaggcgaagccgtgcccatggtcggtctgaagat

SEQ ID NO: 55675 - DNA, 576 bp, Arabidopsis thaliana landsberg
gcatgcccatcgtgcggccgatctacaagacgatgaagcagatcttcgagacgctgttctcgaagtcgggctccagtttccgcaaggtggcgctggtggaattcccggcgccgggcatgtggtcgctggtgttcatctcgcagccgccgagcaccgacgtcgagtcgaagctcccggcgcgtgacggcgactacgtctcggtgtttctggcctgtacgccgaacccgaccaccggtttcttcttcttcgtgcagcgcaaggagctgatcgagctggacatcagcgtcgagaacgcgatgacgctcctgatctccgccggcatggtgcagcccggctccgacaaggacgcccagaagaagctcgcaactatggccgcgaccgcgcgcgcgacacagatcgcgaagccggaggcggtcgattagcccgcccggatgagcgtgatcgcttcatccttgccgaacagatagagcaactgccgcaacgcctggccgcgcgcgctcgtcaatgacggatcgcgcgacaggacatgctgtgcgtcgtcgcgcgcggcgccgagatacttgccgtgcacctccg

SEQ ID NO: 55676 - DNA, 127 bp, Arabidopsis thaliana landsberg
  unsure (1)..(127): unsure at all n locations
cccccccccntcccccnnccccccccccccngcccccccccccccccccccccccccccccccngccccctctccctcctctcccctcccccccctgcctccccctccccgccccgccccccctccc

SEQ ID NO: 55677 - DNA, 786 bp, Arabidopsis thaliana landsberg
aaatgagtatgagaagtcttacttgtgccgaggagtgggacatattacagatcaactcatcaagaagcacgatatgcagcttcacttctgttacgggcatctttggtggagatagttctattagagcagccgaaagaaaagcataccgctttgcaacaacagttgtggtcgcagttggtggtaatggtgccactatacagtccaaaatttgttgtctcatgacaggaattttggttccttgcttccctttccctgtgacagcataacgtatgcaagcagcccactccggtatggattctactgattggccaagaataacattctgcaactgaaccattatccagctatcccactcattaaaaagaccattaacatcagagtgcagtacacctgctaatgcttcagcagcaacacactgttttggtctctccttggcgttacaaaactcctctaaggggctttttagtgccagtaacacaggcactccacattcttgtgctaatcgcttgaagatgcgagcaaaacttgggtaaaatatatcactgcctaacaaagatatccaactaggagttctaggccatgaagccgaaaattcaaaatagaaacgagtgattgacttgtccgccatgctctggaaagatgaacttccgtgattccctctagaagaactatctgtgtcagtgatatgaatatgagaaagactttcaaaagtctccttgaagaatccttcttctctaaaaatttggctcaatgctaaatcaagggatgagttggcattttcagttt

SEQ ID NO: 55678 - DNA, 1135 bp, Arabidopsis thaliana landsberg
cgaggccacaactggagaacaaaagaagttaaaatttaatctttttgcaaggaatcttttgctttaggggagcaaaaggacctgaagggcagagacattggtggggaaaccatagatacagagaaccatttcccatggacgtttcttctttgttctccaagcaccactagtgatctctccattgtgctgccttattctccgcctcgggtttacagtgaacctaccaaccaaacccagtttatgcaatcaatcactaaacatctcatagtctgattattaaacactcaaaatctcctatttgatcaaatttaagtattcaatcagataaacccagaaaatgtaaatcctttctcaatcgaatttgatccaacagaatcttcaattccaaaatcagagatgagagaaacaagtacccgatataggtttgacccttatgacgagggctaagagaggtcaagagataacaggcgaagaagccttttccatcttttccggtgactccatcctcaccgacgggatctagggctttccgatttccccttttctctctcatatctcttggattcaattcgaccgttgaagacgacagattattacactaaaaaatccgttttatctcttaaggatgacaatgggccgaaatgtatgattaaggcccactgtattcaatgacccaattttataatggcccaattttttataattcatttcctatactggattttgttttacttggttcacatgacattgttacccatcatgatagtgattccgtgataggtctcctattgattttagagcttataaaatttgctcacttatgtcaaattttaccgcaactaaaatttcagctttcaaataatctctcctcatattatatcctctttttctttttacttttcagatacaataaatgatggttttcaattttgagtttgtctctaataaagaatttattcttaactttggtttagtagagtttttggtttttattttagctatatagtaaactttgatttcagagagtttggtccaataatatctttatgaggaattaccccaattaaaaaaaagagattaaaaattgtccaaaaaattcaataaacattctacttttcttattcacaccaaacaa

SEQ ID NO: 55679 - DNA, 454 bp, Arabidopsis thaliana landsberg
ggataggtttcacaaaggcgaatgagctattcgttggtcgtgttgctatgatcggtttcgctgtaagtcccctctctcagagatacaccaacttatcttccaagaaagaagctttattatgaaagttttgtttctatgcataggcatcgttgcttggtgaggcgttgacgggaaaagggatattagctcagctaaatctggagacagggataccgatttacgaagcagagccattgcttctcttcttcatcttgttcactctgttgggagccattggagctctcggagacagaggaaaattcgtcgacgatcctcccaccgggctcgagaaagccgtcattcctcccggcaaaaacgtccgatctgctctcggtctcaaagaacaaggtatctctcaacatttctatttcaatctttgttacaatgacattgctctgaacaaccaatgcaaata

SEQ ID NO: 55680 - DNA, 644 bp, Arabidopsis thaliana landsberg
  unsure (1)..(644): unsure at all n locations
caatctgagttcctagatttaagagacaattgggttatttgctttaaattaaagttaactttttgaactgccacggatgcaatttatacaaaatactgtaaaagcaatttatagagaatcatgtaaagactctctttgtttgattttgtttcttacctccttaaaacccctcaagagacgctctaattaaagtgccctaagacgacaatgttctctatatcttctctatatttctaataaagttctttgggtcaaacaccaaatgaaccttaggcctgctcgaggcgtgtaggattttggggtccttgctgcagaagtgcggaccatccgtactaggtagccagaacgtctgtttttaggcgacaaaccattcgtaatatgcgcaaagaactctgataaaactaagatctctcgttccaggagggacctcatcggggagaaacgatcttggattgcttttacatcgacaggtcatccaaagctcctctaaacgacgtagagttgaaggaggtaaatattgaagattggaaaactaaacaactaaggactaatgcataatataaataagagaaaaaatctggattttggtttgactgatgtgtngttcaatctgtcgtacccttcacacatatagtggaagtatg

SEQ ID NO: 55681 - DNA, 1016 bp, Arabidopsis thaliana landsberg
  unsure (1)..(1016): unsure at all n locations
agtaataatcaaaagaacaagtgggtttgtttgttaattatctgttaacataataactaactccattattttaacttatcatcactatacatataacttgtaactactccacatgttccagctaaagatttgtgcacaaattaggacagtttatgtttccaaatttgaaatgtttggaggtttggtggatcatgaaggtttaatatatgtaaagattcatttagcatattctatatgctacgtttatggaattatattacttaaaaggggatacctttagcaagtacaatagcgataaggaccttatcttaaccactatatgtcccaaagcatgcactatttatacactctcactcattgctctgaaccatcatcaaactatcacaacatctatttattccctaacttccttcccaagaaacctagaaaaccttaaagagtaaagagagaaaatgaagtccggtcaggctgaaatcatggaaacaagcaaaggtatccaaaagagcggtctgatgagcagaaggattgcgattcttgagtttatcctcaggattgttgcattcttcaacactataggtagtgcaatcctcatgggaaccacacacgaaactctgcctttctttactcaattcatacggttccaagccgaatacaacgaccttccagccttaacgtatgtgttttgattctttaagattctctttaacctgtttttcactatcagggaataacctggaatcattcttgaagagtttttgccttacgtttgtttgatcaatcaggttctttgtggttgcaaatgctgttgtgagtggttaccttatcttgtctctaactttggcctttgtacacatcgtcaagagaaagactcagaacactagaattcttcttatcatccttgatgtggtaagtcatcagcaaattaaaacatgttctgtttacagaagggatattctngcttacgatagattcctactcatgtgttaggcaatggtgggtcttctaaaatctggagc

SEQ ID NO: 55682 - DNA, 601 bp, Arabidopsis thaliana landsberg
  unsure (1)..(601): unsure at all n locations
gacagcatttannnnnnnnnnnnnnnnnnnnnnngtattgtggttttgaccaaaattacagttaagatcatttctgtaggcaccatctatagaacactcccgcatccattaacactcgagatccaaatgaccaaatacaacagtgttcttcctcctcttgttcctcccacactaaaactcactcgctgcaactggagaagatgatggagagagggcagaaggaaaaaccgcttgtacgggttcaactcattggtgatccttggcgcctagaccatttgggagcatagaaataaatgtgtttttgatggttgtaatcctagcttggcttctgcccttaggcgtgccaaggatgaggtgttgttttggtctaaggctagggccacagatctatccgccctctgggctgaggatctacgggtttaggtagatctgtgtgtgtcggtcgtgtgttttggtttttttctagtgagatcttgggtatgtgtatgtgggtgtgttatactgtgagggtctttccctcactttcttctattattgcaatgatatgtagtctcctgcgtatttcaggaaaaaaagggaccgaagagaaatacatgagggg

SEQ ID NO: 55683 - DNA, 1155 bp, Arabidopsis thaliana landsberg
taactgaactgagttgaccaaaaatgtgttcctttgagagtgaaatctgaaacgtatgtttcttgtacatcattgttttttttttttacacaaagtaatttcatttattaattgtgtaaataaatagtttggtcaaattgaggccggtagtttttagtcattcggcccatcaaacatctaatggattttttcttttgacgtcaatggattgaagccttaaagcccataataaatgtaagtctaactataaacttatttcttttggccatagctagtatttctagtttccgaatatctaaatactaatttataacatgttttaacaaacaagtacagtatatgttatatactattcaatcagaagaagaagaaaaacagatacttcttttgtttctgttcgagttaaatcgtatactataggatgattacatgtaaccgagagcgttggcctaacaatttaccatgattaccttgccacgatccaattcgaacttaaaacaaaaagagaaatgtgacagacacgtggcatttagaaaatatctcatcatcgttatcatcgtatgatgtgcatggttggtcaatggtcatagttagtgagacaaacaccgtgttgtttttatgacttatggaagtgtgtagaaacctccggcgttggataaggaaagtgtggtgtgcgagacgtgtagtaactagtaaataaaatagtgtgtcgttttcatgataaggaagaagagaagtaaagcacggcaacaacacttgtagagaggcaagagtacaagttggtacggaacttgtgtagtagttttagttgtttatcatcattcatttgtactttcttctatttttcttcttctgacgcaaagtttgtttaccgttttctaatcaaaatcaaacttttaacacttttaattttggattctcgacaatgacgtctcctccacaacttgacaccttaagacaagaacattaaaaaagtatataccttaacattattcctcttcacggatacaagtatacaactatcactttaatcagagctctgttattgcgtaacaataatttcaaaacgtgttttacgagacgaattatacatgaattgttctagagaaagtacacaatttgctgacatattccttagttggacaacttgcaaga

SEQ ID NO: 55684 - DNA, 982 bp, Arabidopsis thaliana landsberg
agttaattatatattttacttaaacgtcgatcccaaatcatttcagatagttatacaatatgttctctttatcctattgatcacgagaagaatattactaccctaagaaaatctgatcttgtcgggctaattgtttggcatgatggcgcaatagtaagccctagagatttgatttggctaggtggaagctacatacttttttagttaaattcgaatgtgtatataatatcgtttcaaatgatatggattatggtccgaaaacacacatttaaatgcacagtgggttatagaaaaatcaaggaaacaaccagccaatgtgattagaccaataaccagaatatgattttgtcttacatgactaacaataaatatgatgagtatgccaggcagaaagcataaatatatagcatcacaaaataaataacatattgtgttctagtgacaaaattaatactaaatctatattatttttatattttagacttaaatctatatttgtcaaaaaaaaaaaaaaaaaaaagctgttatttttataacttcacttaacctattgggctttccctcaagtttcttattggcccaaataaaatctcatcatagcatcgtctattctatgatccctataaacaaatttcccttaaatttcatacgacgtcgtagtcaagcatctaccttctcgacgacgacgacgtgctgaccccattgaacgctacactaacggagacgttaattaagaattcgtcgtctgtcttccgtctcaaagatgttactgttatttaatgattttcttagaaagtaagctattaattcccaacggccaagattgagttaaataaatcgacgggtgagattgaatctgtatcaaacgctcttatttagagagaggtatgactgaaagagacttttcgttttgttctccgtttctcgctcatcgcttactgaaaccagaaacaagtttagggtttttgcggaggtttcaaag

SEQ ID NO: 55685 - DNA, 475 bp, Arabidopsis thaliana landsberg
tacgtgtatcacatgcacttaattaagattggtgaatatacatacacatataagtttgtctatatcatcagtatattgcatgcatggtttattgtttgatacagaatcatgtaacaaatacgtatacacaaagatatgctcaaagaaagatatgctaactaacttttctaagtgtatttagacccaaaaaaaaaaaaaaacggtgtattccacaattgttatctaaatgggagcttgtatcagaaatcacatttcatatgatatttttagtgcgttagttacattagaccatcactagacaagtacttgcatggtgttggccaaagagacggacgataaatcattttctcggtgcttgttttacggacttgctgaaaaccaacgtatataatatttgttttggtgcggaccgtgcggtcatctatttccaatgtccaattagctatacaaaaaacgacggcagataactcaaatt

SEQ ID NO: 55686 - DNA, 1494 bp, Arabidopsis thaliana landsberg
aaaggtttcttcttcttcttcttcaagcgtctcacactgatcagggttccatgaattttgttcttctcttggtagttaaaaaggcagggaaggagatttagagtaatttaaacaatatgtgattgttgtatatgcctttgtatttgtttgtatactcataaatgtttttctgttttgtactcggcattcttgtaaattaaagacattatccacattcttctatagacaaagaaagttatgtggtaccacttaacctaagtctcgttctgtaacaaccgactagtactagttcaagtttaacgagattttggtttgtagtaacttcaagaggttgatccaacaatgaggcaatgcaaaacatctgaactttattatttaaatgtcagattataaaggggagtccatttatgtgagtttaggcgctttatcgctgtttacttaaacttagcttctactatgtcaattttgaacacttatcaaaagtgattgagatgcaaaacagtagttttcaagatgacatatggaccaaaagtttttaacatttatatttggagtattttggattttacaacttaatgtgaattttcttgaagaatcatatttacaggcctttaattttcgaattgaggaataaacattcagataaagttgattcgcgagcaagaaatttgtccaatttgattgctgactcggatttgaaaacattgaccaaaggctaagaaaagaaggaagagaggaagagtcttcagatacagactcaggtagcaaagttcttgtcttagctcagaaacttaaaaagagagctaaaaaagacctcttaaaagctaagaaagaaaaaaatttgctaaatcaaaagaaaaaaaaaaagatatagaaaacaccaaaacactggtttcatacaatacctttccctacccttatgatcattctctctgtaaatctccttcatgcttaagccttcaacttcatagcttcatctctttggtaatttgttagatggcacacacacacacacgcaagtcaacaaaaacccgcacccatatatctttcctgatttctctggaatttgaaacttgttgaatcttcaaaatctttttctcctttatacttcctgtttcagtaattacttggccaattcatctgtgtttgctgaggctgttggaaaacgttaggcgcaggtgcaaccatttcagctccagccacaccttgagactgttgtaaaagcggatgatggactcctgttgctgttactgcttgtcccggatggtacatacctgggaatgcgacgtgaccagcttgtgctggagcataagtcacgtgttgcccatggtgctgtaaaccatagaaagagcttggcacatctcgtcctggtccagtaatccatacaggtaatgcttcactctgcagagaccccacaattataaattaatcaggaaagggaactaaactttcaactgagttggttttgggagggagagggaatatgtaccctgt

SEQ ID NO: 55687 - DNA, 565 bp, Arabidopsis thaliana landsberg
tttggtttgctaatctcatcttttttctaaggttatgcatctgctaggcataggtttatatttataggtatttgtttcaacatgtaatccaagtacatcaaaggttcagtagtaacttagaatgtttaaggttgcaggagatgctgtgaaactggacccacatctgcaatttgtaagagactgtcttctacactcgtggagctaccttgttgagagatagtatttataaaacagctataattgaagcttgagtgagaaaggtccatgattgtttctttcttgatttatcttttttcaccttctacatatgaagttgtgtattattgtgattgattgattgtgacatcataaacttgctcaattatcgctgacagaatttgttatgtgtcagctgtttctacagcagttcctgcagaaaactctgttgattagactgagaaaacacagtcaagcttagatggccaaggaggtgtaaagtcccgatctcaaaaatcagttgacatgaccttctcacgggaataatctctcttttaaatgtttccatccaccatattgttcccggttc

SEQ ID NO: 55688 - DNA, 436 bp, Arabidopsis thaliana landsberg
acactgtaaaacttatcattcatcgaattccgagcatacccgcttatcaatgtagtccaagtgacattatttttctctttcatttcatcaaaaactttccttccgtccttaaagttactacctttcatatacgtatgaaccagcgatgttcccacacttacatcatctaaaaacccaaactttatacactggcaatgcaactgtctaccaaaaagctgatcacataaagtagcagaaacctttaaaacagaggaaaagatagaacagtccatctccatccccaaacgatgaatattcaagaagagtctctttgcttactgagttcgtccatcacgagaaaacccaaagagcaagcttatataactttcgctatctcgggcaggacttttgtcgaacaggttgtgtgcattatataaacgagaggatgatacagtac

SEQ ID NO: 55689 - DNA, 815 bp, Arabidopsis thaliana landsberg
tcaacataccaatcaccagctcctttctctccctttcctgttaaataaacagggccttcgattccatacctgcataatccataacgtttccagtgtaagaaaatataatgtgctaataataggaaaaagaacaagaatagccaatcctttggtaagtacacttttcccctaaaattgccaattgcaaaactgtgagatatggtggctctgggaatggagataataaacaaggataaggaggatcggctacacttgctaatgaatttatattataagcaaagaatggagaacatacttggggacaaatactataaaaccattggatcttatcttcacaactctcgcctcttcatctgtgggtctgcaacagaaacacacataattttctcttagtctttaccagtccatgccttaaaatcaagtaagattcatgaagaatatacaatccataccgggttctgaagtaaatgagaacgtacagctctactgaagctcgacctgccatctgggcattcctatgtcgatagttcaaatctgaaacaagtcaatgaattagaacctacaactctaagactcaggtgcattagtaaaaggaaaatcattatccctaatctttaagaaaaattcgttcgaattttagacatcttttccttgacaaagatatgaccaaacaagaccttaatttccaaaacaaatcaggaagtgaccaaaagactcctcagtttgcaaattttgtctgaacactcaaaattctggaaataataaaactcttaaataatccacaggaggtaagcgaactcttactatcaatgaga

SEQ ID NO: 55690 - DNA, 586 bp, Arabidopsis thaliana landsberg
tatttgatttatctactgatcgatgcagttatatgttttcaagattagctgataaaattcttgaaaagggtaaatatatgcttcaatttctattaaatctttacttgttcatttacataaaaaatttttgttctgaataaagttgatgttttttccccttaaaattctgaaaaagattatgatagaggaaaatcaaatttccaaaagcaacaaagttcatcatgcttgccaacacaacttccagctagagctcaccttcctgcttgcattggtaaaaagatttcttaatctcttgcatttggtaaatatctcaaaaccatgcatgttttatatcacatcccattgcagactttggtgaatcacgacataccaaatttgaaattgcgacgacagattatatgccacccaatctccaggtaacacaaagcctttaaatgtgctgacatatagatgaaacatattttacagaaatttctccatcctcttttgattaatttttcttttaatctttgtttatatagaagcagaatgaacaagacttttcggaaagcgactgggagaaaattgacaatggttcgcggtcccg

SEQ ID NO: 55691 - DNA, 636 bp, Arabidopsis thaliana landsberg
  unsure (1)..(636): unsure at all n locations
aagatcgtactccgtcactacgccgtcgtaatctcccgacccaataacccgaccgcccgacccgggtctccaccggagactactaagtttcgccggagtacagatgtaatattcgcaggcggtggcttgatcgacgaaggaaactccggtaccggagacagcgttgttacgtaaaagagaagggaggccgtaaaaacgaatctttcttgaaatcccggcggtacgacggatgttatcagtgggatcgaattcaatagctccgataacgtcggaggcggaggaggaggaggaagatacgacggtggagagagaaagatcccattcgtatctagcttcttcttgttgttgtgcttgttcttgttgctgcttgtgaggatgaagactgttcatatgaaaacagagtaatgactgttgcttctggggtttcggaccaatcgaaaaccaatcccattcaaaagaattttttttattaatagtttaatacattagaatataatattcattttaatatggctttttgtatttcctcagtaaataattgggtttattactatcacgtatgaattttattctatgagtttactantctatgcaatgcagagaaggtcgatgtgaatctattcagcgagaagtgtg

SEQ ID NO: 55692 - DNA, 639 bp, Arabidopsis thaliana landsberg
agatttgagacatagtggaagaggatgagtcaatgagagaatgaatatttgtaggatgggaagtgatagagttacaatttaaaaataaatatgagagttgaaaattctaattgattgtgtgtgaataaaattttgtagagaaatatagtaaatatataatttatatgactttagttttatattaaagtgtgagttaaatgtaagcaccaaaaaatagtgtgacttaattatatatcattaaatgtgtttttttttttttgaacatcagctttattaatcaagaacatgatactacatagtcacgatgcaaatgcatcagaaatattaaaaggaacatagaaatgaaacacagatgaaacatttccttgtatcggttgcttcgctaaagaatcagctaccatatttgactctctttgaacccagctaaattgtatttgactctcattaaatgtgttttatttgtggtttaattgaaaatattttttttgtaaataaattgccaagtggattaataaggagagtgtgaaatcttacttttatttataagatgttctaacttgtttataaaatcattttgaaaacttttctatgatatatatatatatatatatatatatatctatatctatatttcaacta

SEQ ID NO: 55693 - DNA, 576 bp, Arabidopsis thaliana landsberg
tctttgggggagatgccatagaaaatctggagaaaatgggacctaaacttgcgctgttaggctatctgaatgagacaccatggtacagtagcctgctatggatcagaacgccagcgcgacagtctcgccgctgatgaccgatctctgccgcgattcacgccgccgtcgttgcgattgacgccgccagtaactagataagcctgccaggtaatagctcgtcgcctgaggataactccgatgactcaccaccgtgcccccgtgctttgcggcttgagcagataagctcaccggcgacagatccttccggtcttgcgccacgtgctctggtacctccgtcgcgtcgccgtgactctctatagccatctaatcgtcgccggtgaagtcgccacgacggtagacacgagttcatgcgcgccagtaactccctgtccctccgaccgccgcgcgtcatcgtcccaatttccggccaccgcttccgcttagtataaattgagcctgtggtcagctccgcaacatcatcacacacccaccatctagtatcgccccaatcttgcaactgtgagcgccaattttaag

SEQ ID NO: 55694 - DNA, 604 bp, Arabidopsis thaliana landsberg
ccggcattagatctggaattaaggtcctctctcgctgacttttcagttataagtgtttatctcttttatctgctagagatctttgcgtttgaggattttcagattttaatttcgttcatttagtatctcgttctatataatcgggtaggatacattgtttttattggttttgcaatgaaacggcgagaatgatgaaccaattagatgtgcgaatgaggggtaatttcctcattatgagcttaaaactgtttgaggcatatttaacatctctgacttcgccgcttttcaaaagttttgtttgagtttttattgtttgttttggtttgatggaatagtggaaaatgaggaacatataactcaaacgtgaatcaaaccatgtaccagtttttgcttattgatattctgattccaccatttgaaatgaataaccatatttgctttgttttcttgatttggtttgctgtgtttacgatgaactctcatttgcttctctgtatttattatctttttattaagaagatcaactcatacgaaatggtgatgtttcaaagtgaattacttccaaccttgatatccttaagttacaattagcgactcatgaact

SEQ ID NO: 55695 - DNA, 318 bp, Arabidopsis thaliana landsberg
cgggggacaaaacctgctccagaacaggggcgtctttctgggtccatttgcgctacgccatgttcttttgaatgttctaacggaaacacgggaaatggtcctgggtacgagctggcgtggtgatcacaggacgcgtaccattgtaattggcgagcagcccagcgtgtggatcatcttcaagtccacgttggttactagcctacatgagcgtgcttaattttatgaatctagctagatctcattgagtatactccggcgagacatagagttacttaaatgcgttaaggttacggcctgcttctaatctccttttgaaca

SEQ ID NO: 55696 - DNA, 547 bp, Arabidopsis thaliana landsberg
  unsure (1)..(547): unsure at all n locations
tacgatatgcaagcaggcaaagtctccatggacgccttaagggcggccatcagcaaggcagtggccgaggccaagcaggttttggctgcccggctcagcaccttgcaaaagtttacgacttataccccacttattattgtatttgcagcaatactggccattgcggtttccatattttcttactttaaagtaaccagtgaggtagcgactaaaaccaggctgcagcaggagcttgaggaaaaagacgcaaacacctcccgtcgccttgaactgatccagcatgtggcaggacagatttctaatggggattatagtatacgggtaagccaggcagaagaagcgcaaatgcatgatggggctatggatgacctgggtggtatcagccaggcattaaataaaatggctatggccttggaagattcttttaaccagctctcagagagcgaatggatgcagatcggtacagctggtttaaacgatcagatgatcggagaaaaggaattattcttattagccagtgatattctgcaatttattgcangatata

SEQ ID NO: 55697 - DNA, 575 bp, Arabidopsis thaliana landsberg
cagcccgctacatagcagactctcacgtcctattgtcccattgtgatcctcgtgcccaccattcttaactgcacacctgaagatcaaatccaaatctcgcgcaaagctcaaagggccacccgtggtgtcgcaagttgtcctccctccgggtccatgagccaagacatcatgacatgtcgttatcgcgaaacctcttgtccaacaactacttgacgaggattcagtcacacgtcacaacgcttgatatccctttgtggcagttcgagggcggttaccagaggtagacagcgttctcagtttaaaaccacttccgcctttcgaacctgacttgactcaaccgtcactatacaatctcaaagtcatcctggacacttcaccaactattttgattgtacattgtggccgtgtggcaatttgatttagcccagaagccggcctaattagcagtaggacggctcagtctattatgtgctgcaggactgggactgttatagtttgcatatcctatataaaccacgggaccggaacatcgcattcgacaaactgcaaccaatcgacacgtcagccagcttttc

SEQ ID NO: 55698 - DNA, 498 bp, Arabidopsis thaliana landsberg
ggtctcgatgacggacgaggcgaaggaagcggtgtggcagcgcatcctggcgcagggttacccgttctggtacggctgagctcatattaatactggcaccagcgcatcccacgtcgtccccgcgcatgctcagcatgggaccccgccgaggcggctggcgaggtcgacgctacgtgcaggtaggtctcgtatcagaacgtcccgataaaatccttcttgccgatctccagcccattgtggcgcaggatgtcgtaggccgtggtcgcatggaagaagaagtgcggcagcgcaaaatgcagcaagtaggtcaggcccttgaactggcgctggttagcgcctgtgccgaccgtgacgtcgcgcgccgtgccatacttgatcgccgcgcgcggcacgctgttgatgaaggccagagtcttttcgatgcgcgcctgcaggccggcgaaatcgtgttcggtgtcgccgtagcgcgggacctttatcccggtcaggcgtgccgcg

SEQ ID NO: 55699 - DNA, 583 bp, Arabidopsis thaliana landsberg
ctgctgatactgtccgccacgaagaagtcctgtactcgtggctttctgaacataaacctcttattctgtgttgactctcccggttcaggaaagaccatgacgttgttcagtgccttgaggaagttgccagagatggaggttgttggtctcaacttttctagcgccacaacccccgagttgattctcaaaaccctggagcaacactgtgagtaccgcaagacacccaatggggtcttgttgtcccccgtgttgttgggtcgttggcttgtggtcttctgtgatgaaattaaccttccttccatggacaagtatggtacccaacgtgtcatatcgttcatgcgtcaattggtcgagtgtggtggattctggcgaacaactgacaaatcatgggtcaaattggagcgtatccagtttgttggtgcctgtaaccctccaacagaccctggtcgtatccctctcacgcatcgattccttcgccatgttccactcgttatggttgattatcctggagagatctcgctcaagcagatttacagtaccttctgccgtgcaatgctcaaggttgttcatccttacgtgccta

SEQ ID NO: 55700 - DNA, 1050 bp, Arabidopsis thaliana landsberg
acatgttcctggaatctattctcatgaacaagtagaagcatggaagcaagttgtggaagcagttttcgttaagggaggtttcatcttttgtcaattatggcatgttggacgtgcttctcatgcaggtttatatgtctcctcattatccactcgtaaatcttataaaggatttggaaaatttgtaacatttttgagtctttgtatagtgtatcaacctaatggaggatcaccaatatcgtcaacgaacaaaccaatctcggaaaacaggtggcgagttttgttgcccgatggttcccacgtgaagtacccgaaacctcgggctttagaagcttccgagatacctcgggtggtggaggattattgcctttctgctttgaatgcgattcgagctggtttcgatgggattgagatccacggggcgcatggttacctcattgatcagtttttgaaagacgggatcaatgaccgtactgaccaatacggaggatccattgaaaaccgttgtagattcttgaaacaagtagtggaaggtgtagtttcagccataggagctagtaaagttggtgtgagggtatctccagctatagatcacttggacgcaactgattctaacccattatcactcgggctagccgtggttgatatgctcaataagttacaagatgttaatggcttgaagctcgcttaccttcacgttacacaacctcgctaccacgcctatgggcaaacagagtcgggaaggcaagggagtgatgaggaagaagctaagctaatgaagagcttgagaatggcttataaaggaacctttatgtctagtggaggattcaataaggaactaggcatgcaagctgttcaacaaggtgatgctgatttggtttcatatggcaggctttttatcgcaaacccggatttggtttcgcggttcaagattgatggagagttgaataaatataatcggaagacgttttacactcaagatccagttgttggctacacggattatcctttcttggctccttcttcccgcctctgagtttgataatcggagga

SEQ ID NO: 55701 - DNA, 1229 bp, Arabidopsis thaliana landsberg
tggtgtttagtgtcgggtcatagcatgcgttcatccagttcttgctgaccagcatcggtccaatccatctttgttcctggcttagccgtgagaagatgtcaagaagacattctcgagtcaactcagaccagtcagggtagagtcccgatcccatctccacctttccttccccgccgttgacttccataggattgaagaacgcttcgtcgttttgagtacgaatagacttgaaatgttgagactttttttatcgtcaatggaataaatgtagtcaatggaaacaaaaatgctgagactttttcagcttctataatcaagcatgctctttacctattacaaaacagagcttttttttattggtcattagtaacctttccaattttgatatccagtttatattaatgttctgtcagtttgaagttggagcaaaacggttctgctcctcgactttgattaagagaatgagtaagaacatccaacaacaaatgagattccctaattaccaaattggattaaaaggataatgtagtcacttatgacaagagttattattcaaaggttttcctatgttggacatatggaagtaatgactttctaagtcatcaaatcaaatcttatatctatatacttgtataagcatatgtgcatattgggacgacaaatcattatctcaaatcctatttcatactaaacaccctaaacacttaaagccactggatcttgccatgtaaccttcctcttcactgctctatttaactctttctccacatctccgcaaatgggtaactttctttcaacatgtagatcactgatcctgttatcaagcattgcattcttcattgcttccgcgaccatatgttcaccattcacttccggctcctcttcttctctctacaaccaaaacacaaatcaaactaataaagttctatagactctaccaaaaggaagacactaaaataacacaagttgtttggctttaccgagatctggtttaggtcaaagccagggactttgtcagtgccagaagtgtttccctctccgttaaggtcaggaagtgaaacggggaatgtcaaaacatcgcttcctctgctcctttttcgcttcttatccaagtcacaacttgcaacattattagccaatgcttccttctcattgcaaattgtattcttcagtttcaaatcaaaacatggtacagatgctctcacaccagactgcttctttctttcgcc

SEQ ID NO: 55702 - DNA, 131 bp, Arabidopsis thaliana landsberg
atatgacttgcatcactggaggacgcggtctactaagagatcaaatgagtagcgaaacacgctcttctgataagttctacactggtcactgaattacactcattacgattgccatgcaagaggagaacatg

SEQ ID NO: 55703 - DNA, 657 bp, Arabidopsis thaliana landsberg
  unsure (1)..(657): unsure at all n locations
ccgaagcattttcaaggcttaagaactcagaagataaatttacctcgcagtatcaactcatgaacggtatatgcaagattattctatttctagaattcatgtcgacttctttttggactacatatttgttgaatgtttaaattatatcttgcttcatgtgtcatattaaacatcaattatatttttttgtttggtttaaaaaaattnnnnnnnnnnnnnnnnnnnnnnnnngccccctcttggatcaatactggatccgtcactggtcatagaaacgggtcttgtatgcgtgtgttggtagtgggtagatatgtttatacgtccgtcttttttgcattttagcccttctggggttttattttcataaatacgcccttttcagtttcattttaaaaatggaccatcacctcggcgctatcactattggcgtcaactacaacgtgttggcgccaattagtttagcgtgtacatataagagtcgacgtctacgtggatctgacgtggcagcacctcggtcgcgtggatcatcggcgccgacctccatgtatgtaaatatacactccggccatcagtttttttatttttggatgataggagttattttatcaatgattctcntcatacttagttatttgggtatgaattgtgtcttgtgtg

SEQ ID NO: 55704 - DNA, 1172 bp, Arabidopsis thaliana landsberg
ctaaattactttcgataaatcgttgaaaatttaatttataaattttgtattttccaaattaggaaaataaatatctgaaaatatttatttttaagtatcttagcaactcgaagaactgagaaacgcgacaaaaccaatcgtcctcttccgatagccacaaaacaaaaatcagacaagaagaaagaagaacgtttcttctaacagatagagattacaatcaaattgactcttaatttctcaattccgtatctctcatttcatcttcttcttcttctcctttacttaaggatctctggtttctctttctctcctctgtcttatcttctccaaagttacgctttttttcaatgaaaacattttcttgattcctgatttcaaatttcacaatctggatttcgtgtttcgaattcactttgaagaaaaagtttctcaatttcgcctgaaaacccacatgggattggaactaaacactagactgacaagaagaagaagagtaatcatcatcgagtgtttattacgattatgtccttaacgaaatcttcagaatcagttttcactgaagaagaagaagaagattcctttagcggtcgatacacgttatggatcaaagaagcattagaggagcttccacacaatttcacaatcaccgacccgtttatttcgggtcacccgattgttttcgcgagcttagggtttttgaaaatgactggctattcacgagaagaagtgatcggaagaaatgggaaagtttttcaaggacctaagactaatcgaagatcgatcatggagattcgtgaagcgattcgtgaagagagatcagtgcaagtgagcttgttgaattatcgtaaatctgggtctccgttttggatgttgtttcatatgtgtcctgtttttgggaaagatgatggtaaagtcaccaattttgtgccggttcaggtcccgatttcgggacgagaacatcatcggaagaagttgagaaatgtcggagatttgtcgtcggatacttctccgacatttggttcttgtcgaagagaggtttgttttggtaatttcgtgtgtcaggatcgagctttaccagtggaatgtgatgatgatgaccaaggtaagaaaatttaaagttatgcgttttacttgtttgatgaaattccccagagagcgtttaacagtcagag

SEQ ID NO: 55705 - DNA, 606 bp, Arabidopsis thaliana landsberg
  unsure (1)..(606): unsure at all n locations
ccgtagatttattttgccaaaacagtcacctaccacctcttcaattttctggaactctacaatctcagccaaagcaccacctaaggctaaaatacagatcgtgtgctaaaaaattgcgtgtaccttgttatctatggatggagaatttggtgcgaaccatgtgtcctgcagctcactctggcaatgcgcgaagtaagagttgatgaacacccatgcctctcggtttgctttcaaactgtctaaaagatgtcagcattccacttctcagtcctgcccaaaaaatggtattctaaagcaacaaaagagcccccaaacattaggatttctatggatacacgggcatatacctgcaaatggtattctaaaccaacaaatagctctagaaatgtgagcccccaaatttgctacaaattaaagaatagaagctgaggaacaaaacattctatgaagattaaagagtaaccaatcaatgaaaatattaagggccaaagtcagacgctaaggattttttacagggaaaacaaaagaaattattaagggccttacattatacattttagtcagttagaagttgttattactgatncntgaaacaaaagtaattga

SEQ ID NO: 55706 - DNA, 612 bp, Arabidopsis thaliana landsberg
tgaggaaacttgtctagaggatgcgcccgaaatagtataactaatgaggagtaaaattagaattactcctcgagccgaccgtgacattgcctatgtccgccgatgaaagcgacgacgacgagtcaacaacggcgcgtgaattcgacgcgccttaaatttccgacgacgctacggagcagtttatggatgaaatcgctgagaagatcgcttcaattgatttctactgcttcgccaccgatgagtcgttcgctggtatgactctgatacagtctcgtctttaattttggccggaaaaagttttaaatttctcttccttacattgagttcttatgtttgattcatcttttctcacaattttccttgaaagttttgatttttctcttcgtcaagtttgtagatttttagcttgttgagtttttttcatctttcaagattatactatagcctatatcactgaggtagtagaaggtgaagatgttacattgcagtttgtagtattaaacaaagtctaattcctccgtaacgcctaaatatatggaggtgcgtctactaagaacatgacttgagtaacttttcctactggattctctgttatctctgtggacgtttatc

SEQ ID NO: 55707 - DNA, 666 bp, Arabidopsis thaliana landsberg
atggattcaaattttcattactcgatagatcttaacgaatttcaaaaccatcacgaacaaccctttgtctatcctgggggatcctcttcctcgcttcatcatcatcatcatcatcatcatcatcaagtcccttctaattcttcatcttcttcttcgtccatttcatcgctctcctcttacctccctttcttgatcaactctcaagaagatcaacatgttgcctacaacaacacttatcacgctgatcatctccatctttctcaacccctcaaggtaaatttacaattacatatcaaccttaagtgtgtgtgtataaatgttattcttgtacgatcgttctttttagtttagcagttaaaatcatgcctgatcatgtaaaattcatacaataatattagtttctgaatttgtatgtcgagaattctatatagacgaaatttaatttatcaaataaaaaggagggatcttaagaagccatatcattatattattatgtacaattccatctgttgttgattataaaccttgatcggtgatatatatataccaggccaagatgtttgtggctaacggtggatcatcatcatgcgatcacatggtgccaaagaaggagacaagactgaaactaacgataaggaaaaaagatcacgaagaccaaccccatcc

SEQ ID NO: 55708 - DNA, 579 bp, Arabidopsis thaliana landsberg
ttttttgtcaaaacattaattaccatctactgattagtaattgtacattttcatgtccgttttcactttctttgggagattaaaatttagtgacaacattttttctttgtataggaccgcaacttttgtatttttttaaagaaacatttgtaagtgaaataacagtttttgaattacatatcgtatgaaaccaatattagtcccatcttgtcgagaggttggcaagaagaaaaagcaaaggagtcgtgtcgcaatgttgctgcggttagttcgtcgtaacactatggctgccatactcttttcttctcctgaactgacacgtggctcatctttttagccgtcgaccccattgttctcccactctattcttttgcttacactcaaactcaacagttctcttttttaactgaatagacatatagttgtctgtttgacataacgataattagtagaagtctaaaacattagttaacaaacaacaaaaagagttttaggaatggttctgtcatcgggctatatttttccccagatgtttagtgtaattaatataaaatttcacattttaactcctatgtaagg

SEQ ID NO: 55709 - DNA, 1527 bp, Arabidopsis thaliana landsberg
ttctcttgtttggtatttgattcattcttctaatgtaggccttaagattggagttagaggctcatccagccctggacaagcttacttccaagatcagtacccttaatttggagcgggttcgacagattaaaagcaggctggttgcaataactggacgtgttcaaaaggtgctatgattcagacattaaaatggctcctttgatattatgataaggatttatcatgtttccttatagatgtgaacctatgacatcaccatattctaaccacgtttgcctatactaataacactttttctctttacatgttctaggtgagggatgagctagaacatctgctagacgatgatgaagatatggctgagatgtatcttacagagaagttagctcagaaacttgaggattcgtcaaattcctctatgaatgagagtgataccttcgaggttgatcttcctcaaggagatgaggatgacaggcatgtatcaactttctgagcttgcagtaccttctattgttctgatataagtttaacatctgcctttttactccaggcttcctcccgaatttgcatcagaggctaacagagatggaaggtatcttcaagcaaatgatgctcacgagcttcttatgagtactcaaagtgcacttagcagaaatagccgtgggactcacacaagctcaacccggagtgccatgaccaacaaattagatgtggaagagcttgaaatgcttttggaagcatatttcgtgcagatcgatggtatactgaacaaactatcatacaggagtaaatagaccagatgctttggtactctttgtcgtgatgatatccttcttctaatacattgtggtctttgttgctgctatgatgaaaaaagctatgggaatttgtggatgacacggtggactacatcaacataatgctagatgacaagcataatcatcttctgcagatgggtgtgatgctaacaacagctactctggtgatgagcgcctttatcgcagttgctggtgtatttggtatgaatataaccatagagttgttcacggataataaacatggtccaagtagattcatttggactgtgattggaggttctatcggcagtatatgcctctacgttggtgccatcgggtggtgcaagtacaagcgccttcttgaatgagtcgaccaacaacatattgggagaggagaataatgtcgcattgccacaaatctatttaagctaacgagacttttatgtatatcctttgttcttgaggatctttactactctcaaacctttttttatccgtctccttcactatttgcatttctttcgatttaataaaagagcaaattgcatagtttccttcttgcttatttcgacatcaaaattcagatatagactgattagagaaccggatttcaaagtcgtattgaaacgtttttgtgcacaattctactaatgggtttttttgatcttgaagaatataagcggaactgtcttattgggaaatgacatttctgacggaaattaaataaatg

SEQ ID NO: 55710 - DNA, 735 bp, Arabidopsis thaliana landsberg
tggcgaagaacgctctgctttctgttttgtaatatctttcttattaatgataattagaaactttgaaagaaagaataaatcaatcattatacatagtgttacagctttatggcattcaatctaatattataactagagcatgaaggagagcattggacgaattcttttggatcaaaccatgtggctttagtttttgttgtcatagacaaatagattagttagtttcgcttatgaaaaaaaattcaatcctaaatttagaaaaacaagaactaagaacaagaattaattatttaatatttttaaacttatgtcctaatttgcaattatgtaaaatttaaggaccttaaaataaaaaatgtttagaaaatgggacccggtgctgtggcacacccagcacaccccaagagtcggcactggtaatatcacaactaatatactatatatagttttaaatttgaatagtaaaacttcgagtttacaatcaagttacttgaaccacacgtgatgtcggattcacaagtaagtaggaaacactgacgatactggtataggaaaaggaaccacttccaatttacattcaatcgtatcttttacctctatataaacaatctatatgtaggaaatgctgtatgcttcatgtcgacatgacgaaaaaatcataagacaatgtcgtagttaatgttatacattgttatgtacttatgttcacacttaatcgatatgtatgttgtattt

SEQ ID NO: 55711 - DNA, 388 bp, Arabidopsis thaliana landsberg
ataattgttttcgttctaaatattaaaagattataacactaattcaaatactcgacagaattgttcgaaataaaaaaagaaaacttcgtcttcccaaggaagtcaagaataaaagaaccaaaaagttagttgagcaaagagagaagagagaagcaaagagaaacacctgggtttcggaaatcgatggataggcttgaaggaccaccacggctcatactagttgctgatctcgattgcacattggtaatttgcacttgctgtgtcacttacacttctgatttcaaattcgtcttttagattcgacaaaatcaaacaattctcaccaaattcgcaagttgatcacgatgatcctgaaaacaatgatcttcttagattcaatgcgctatgg

SEQ ID NO: 55712 - DNA, 568 bp, Arabidopsis thaliana landsberg
tgtttctcgccgttaaacatggcaactctgatttcatgtttttttttccggaaatgattgacgtataaaacaatagttttcgagtatatttatcatgaaggaggtgaagagaatggtcaagatcattgctctgtttttgtataaaagaacttgtaaaagacgaaagaaacgttttagtttttaggttgatatggttgttatacctgaaaattgcaggggtgtgccggaaaatggcggtggttttgtgagactcaaggcaaagattagcattaaggagaatgtactcaagccagccaaggtcaccattgggtccaatccttttagtaccgtaaccaaacgggtcaggtggacccgctttgtctttgagagagtgatgcaaagcaaagaagttgatggcttcttgctccaactgagtcaaaagatcgggtcggaccccatggttgatgactttgaagacccaaactcttcacatgccttgacgatttgggttttggcatctgagtcggttaagtctataacagggattaaaccggacgcggtttgcattttggattaacatagaggttgc

SEQ ID NO: 55713 - DNA, 616 bp, Arabidopsis thaliana landsberg
tccagggcttccaattacatcctcaactagatgggcacttatctgaaaaggaagatgtttgattactaagttacatttatgatcgatcacatgttcaggaacttgaacaataaatttgccattgatttgtatgcattgcatataaataccatacctccaatttaagttgggttctcaatgagacaatgaaagcacccatagccgcgtttaagaaagctttgttattggcaatttctctatctcccttgtcagacgtgcacctaagaagagggcacaagagatgtgagaaatgcattcaacccacaaaacaagattttcacaacagaatttatattgtttcctctctctaagtgcactgaaaatttagacatcatcccacctgccaatgatttgcgtattaccatgatatataaatatatatatagattggaaaaaactggtagcaaaatgatgtatttaaagctgcataaaaccaacaacttaaaagaactatcttctgaaatcctcccaaatatatttaaggtattttcactatgcgacaagcaaaacaatcgttcgatgaaaagcacgacgtagaactagaagctacagattctagcataagggacagataatg

SEQ ID NO: 55714 - DNA, 628 bp, Arabidopsis thaliana landsberg
atctttagatgatgcttatatatattttctctcatttggattctcagaaatggcttgttacagttgcagatttgagaattgcagaaattcaagggtttctagaatcatcaattcagagatcatcatgtgaacgagacatttgttaggacaggatatttttgtacaaaagacaaggcacaatgcatatcccaccatcaaccattggtatggtcttgcacttagcaaattaattactactgtgcgtggtgaatgttaaatcttatactgatgtgtggaaatttgtaggagtgcgttcctttgatttcctaaggttgggttatcgagtggattggccaatcagtataattttaacatgcgatgccctgacagcgtatgctgatgtatttagtttcctggttcaagtgaaactagcagcctacgtattaactgatgtctggtgttcactgaaggtaaaggttcaactttgttgattcacttcttgtggcaagcccctctaacatttaatttatctgcaattttctgaattttgtgtggaaaatgtaatttgaaaaattgttttgatggtctacctgatatttctcgggcactatttatctctgggtaatggcacatgactgactgtttttta

SEQ ID NO: 55715 - DNA, 318 bp, Arabidopsis thaliana landsberg
  unsure (1)..(318): unsure at all n locations
tgaaaatgacaagtagtagacgatatcaagatgacggacatacatagaagagaaaaaggcaaataccagtttcgcaccgcctccatcggctatacaaagaaagcatgaaagatacagagcttcacctttaggatactatgtcatacaacatcatgtatgcaaacaaaccatnttgaagaaacattaagttaaagttgtgttttcataacaaacctgtgatgctcaagtctgagagaaactggaaacatagaagcaaacaaactgagcaaatgcattttgtgctttgtagggacccacacccgatatttactacaaaat

SEQ ID NO: 55716 - DNA, 815 bp, Arabidopsis thaliana landsberg
acttattcacttctttttttacaaacagtttgtttaagctaaagatcaatatttagtcactgccatctttcatgtaaattttgtgaatgttttctatttgacactgtcaagataactgcatacagtcttattttccataatacgctgaatagtgaatgccaaatttatgcttacacctatttttacttaattagcttcataatgtaatgaatttaagcagcaagatgagctacttacagggtacaataggatgttctgctaactttttgggttctttttatgatattccttcttggtctctactactttctgaatgaatttatataaatgatgctaatgaaaatttctgcacctcagtatactggaatgatgctattggaggagatagcttcaatcttcatcacaccatttttgctgatgtttgtcgtgccaaaggtatatttctctcacattcgcgttagtgtaccccacgtcaaaattgagaatatacaatgattgtggtctcacacattttgagttcactttccagcgggtggatgacatcttgcaattcattaaggatttcacagttgatattgaaggtgtaggccatgtttgcaggtaaacaactcttctagtcatatcctgtccagaaattgttttaaagaaatttacaataaggattacattatgatcattggccgtttcgcttgcagctttagtgctttctactttgagaaccatggaaatatcaaatatggttcaccacataatgcaactcgtcgtgagcagagaagctcacaagggaaaatggagaaatcattctgaggtttggg

SEQ ID NO: 55717 - DNA, 629 bp, Arabidopsis thaliana landsberg
accaattatgaaccgtttgattttcatgaataatcaaaccgtataacattttaaagtttgggtatatttagacaaaacgaaactaaaagagggaccatacatgtaaatatatattcctttagaactttcgtctccctaaatttttggtcattcactctctctctgtcgcctctcgctttgaaattccccgcgcctgtctctcctaatcatagtctcgcttacctccgtcggattctctctatttccggtcaccggagctccgtcggttcacttaaatccgtttgaataccaggttagggttctactttccacacagctgagaaaatgcgagaactaaagaaatttctcgaaacagtcctagtgattaaatttggttaatggctctcggatttaggagaaatcctttagtggagcttcattttatagtattgaaactgtttaatttctaattttctagccaactttgaagtacattttcgctttcaaatccgagtgattttgatcctcgggttttgattctgttacttagggtttctattcatagaatcaatttcagacctgatttctgttgtttttaggaactaaatgacgatttggtttatcacatccacattctttagggttctagc

SEQ ID NO: 55718 - DNA, 1162 bp, Arabidopsis thaliana landsberg
agtccttttacctataatcagcctttcataaccagtgaatccttggttatgcaaattctctattgttgcctggcgaagggtctcttcgtctcttccggttactaggaaaactttgaagcctgtttctatcagtttatagaacaattcaagaacaggttgtattgctggagactctcctttcatcgcccatgttctaaatccagttggatcataagggtcacatctacatgttaactcatcattagccacaattttctaacttttggtatccaagaatcacaacatcttaaaactagttttagtaaaaagaaacaagtgtgtatacgtacccatatctcttaagccgatagtaaaagacgtttgagaagcaagtatcatcaacatccaagatccatgcgtccatgccatgaccaggaaggataatctcattgagataaactttgatttggtccacagtcaactggacgtctctgtcatactgaccagcaagcatatatacctcaacgtaacgcagacactgcagaggaacaatgcgccacgcacgtacattgttggtctctactgctagtctccagcttaagcaatagctagcaccataatttccatccatcggcatccatgtacttgtactggttgccactgatgatattgttataaaaatgaaaagcaacgtctctctactacacttttccattgctcttgaatattcttcctaagtacccgtgagggttttatgcaaagataggtagagatcatcatgagtacaaagtgttaggaaatactagtgactagtgaacaaaatttgttgaaaaggaaaagaacacaatacaagagagcatagagttgacataaagatagagatcaagaaagagagcttggttggtgaaacaagaaaactaagaggagaaagtagtaatgcttgaaaagggaagatcagagtaataatacctatgatgtggtggtggatcggatcagcttaattagtaatgtagccgtgttatagattagtatttaaagagttttggttcggtagaagattctggatgaggtttcatccactaagtagcaccatttttacgaccaattaacttaataattatgaagtaagcaaaagaatttattacattaaaaattatgatatgggggatcctctagagtcgac

SEQ ID NO: 55719 - DNA, 1280 bp, Arabidopsis thaliana landsberg
attccacataataagattggaaatgcatatcttccaggcaaagaacccgatcactagtcagatcaggttctaggcaaatgtatcgcagataacacatgcctagttcgatcctcgggaaccaactcactcatggtgatagtcttgcacaaacggattttcccatagagtttaacgtcgtcagctttggtgttctccaattcgtctgtcagaaaacctagcttctgttttaatcgccttatttcctgcaacgttaacagaacacataaaattcacttcaaataaatttaactggagatagagaatacagagggaagaggatcatttatatgtacaactaactgtacctcttctgtttcccgtaatcgtgctcggaaccgatctctttggctgcagataacttttagcattgagctttgatcttgctctgatggaacatgtttctgatccataggctaataaaaggaaacacaaaatgataaagagcagtagttagtgataagtctaattgtgaggtatataatataccatatcatggaaatacccttagttgtatgaaaactttttaatggtttgacaagaagttcagaggtattttgcttttgaaaaaaaaatagatcatggtaaaatatatacgtaccacgattccctagcaatattttaattcacgccataaatagaaggcagagtgagcatacatgttagaccgttaagattatctagtagagaacttaaagcgataggttactgtttatctaactcttagttctgaacgattccatcctttcttttacttttgggaaaattttcctgctttaagagtattgcatgataaattacacgactcattgactcatatatgcacagggccagagagaagtacctcagactgctcagccacacctgcttctgagaactcccattcatcaaatagagcaccttttcgctcttttgaaccgtaaccctgtgtaacaagtaaataaggtttcagtataatcaaagactttgatcgagtttctcctccttagtagcagtagcacagataccttttaacttaaaatggtaactacacactcttacgtaccttcaaaatatcatcctccaacttttgtatcagtctttgttgttcattaaccttagctgtcagttcttctcccttggcttcagccttctcaagcaaggaagctttctcagaaagttgaacctgggaaaagaagtggtgtgaatcgaccagtgactttacttgtgtatgttcactgaaaaggggaagagtaccgaaaaga

SEQ ID NO: 55720 - DNA, 411 bp, Arabidopsis thaliana landsberg
aataccggccgtgccggcgctgcacccaccgtgcgcatacgcgggtgaacagcaccaataattcagaccccttattcgggttgacggcgtattcagaccaatattgattacctgaaccccgagatatgaaagcatggaaatactcggatccttttcattgcatttcgttgcaggcggacaggaattgtggtaccaccaacgtgcgccaaaggcgacccggtggtttcagagcttgtagtatgagatgtaaccgtagaacctgtacagagctggggcttaaaactgatttggcagtgtaactcgcgtgtgattgattccacttacgaacacactgcagacagtatggcgatgtttctgacaaatactggcttcacagacataatcacactattaaatggttatacagatggg

SEQ ID NO: 55721 - DNA, 343 bp, Arabidopsis thaliana landsberg
aatgccacggtttgggcagcaggatttttgtggatgagaagaagatcgttcccgatggaaacctctccattcgtgaaggggccgtggtgccctgggggcgtttttttgaagggggagaggatcgagaaacctggggcattgaaaaaatccgcgccatggaaaaacaatggggcctggatctggacatttcctggaagaagatcgccaaaaaaatccaaggcctcattctcttcggcaagagtgatgaaagatgaagctcgtccttggtggtgtcttggaaaggcgaaagcagtttccgacgatgggtgactgagcatgagggtctgatcccttcactgatgag

SEQ ID NO: 55722 - DNA, 1244 bp, Arabidopsis thaliana landsberg
aagagacctttgttgaagtcggctaacaactcatctaattttattttgaacactctgcactcaatgtccggcctaacattcgcagcatcattcccgtaagtcttcaagtgttcagatatttcctcccattttggattagttgtcatagtgataaataaatctgggtttccataccatcgacatatagccattgcatcatgatatttttcaaccctgtagcgtgggctgcctgtatagcttgctggtagtatcactcttttcccaattgacttagcatctgtgtcaccccttgcaactgcatcttttacgttgttgtattgatcagctcgcaactttttttgatttagcctgtaccaacgtaatcgttcttgctcaatcgacgtatatgcgtccactatatactgatgtagtaatcgctttgatcagacaatcgtcatgccttctgtcagtctggtttgaatctggtaggcataaaattctctcttggtgatgaaagttctttttctagtattctcttcactttcgacaactggtattccttcgtggaatccaatttccccatatgggaacaaaagagggtgttgtagagtcataaacaaagggtgccaatcgcttatctgttgtagtccagatgatttgtgatgcactatcacattcctttccccaatattttttgaaaaatcccccacaatcaaaccagcaatttcatctgttgttggcatatcatattgcttccctttcttcttttggccaattagcttgatactaaactccggacaatcaccagcttcatatctatcccttgcctttctaaaaacctttgccaaacaattgaatgtatcgactgtggtgataaggtcttttactattttctcatttaactccccaacttttgtggtccttttgactgctgaaattctgttgtgaacctcgttagctgtatcaaagatgtagagttgtaaaatttttggaggttttccttcttctggcaccaacgatcctaacttgtggtgattttgaccatgaattctgaaagtgaatggaccacctttgtgcatgacattcttatctatttgcgcacccattgacgtgaacgcaagaatagaattgtatgttcttatatttcgctggtagtgaggagactctgttaacagtttcttcaacatatgtggtggttgtggctctggtggtaacacatttgtagcagcgtaaaacatttccaactttttccaattgtctgctac

SEQ ID NO: 55723 - DNA, 536 bp, Arabidopsis thaliana landsberg
actctgacttgtgttgaatttcaggttcacaagcagttgttcgtttagtcttagaaaaagagctcagttttgtttctttttcattggtggctgaagaggtgaaactgcttaataaattcttgttagatgtctcacactttacttatctttgagtttgtgtttatggactcacattgtctaaaatgatctatgtaggactcaggcgatctactcatggatggttctcaggatactctggagcgcatcacataactcgtgaacgacactttggctaccgtggaatcgaataatggctctactatgcttactgatgatctacttatagccattgactgtggaacatctgaaggcggtccaaatggtcgacactgggtcttggatccaattgatggcactaaagggtacgttttaaaactaactagcctagagtgaaatattgttattttagagaaaatgtaaatttgatagaatgatgagtcagatgttatgttcctgacactgagcattttcatgattttagatttctgaggggagat

SEQ ID NO: 55724 - DNA, 621 bp, Arabidopsis thaliana landsberg
aatcttgaaaaaaaaattttggacaaaaaaaactttggtactttggaataatttgaataatatggtttttgttacttggctcaggcattagtattaatgttttgggttttggctgtagccaagagggagatatctccaaaaagacccaaacagagaatctttactctattggcatcaaatcaaacgcatatgatataaaggttttactctataagattctaataaaaatatttgttcaacgaaatatgcatgctaaggttttttaagctatgggtataactttatatttggtttcactttcggatggggtgtaaattcatttttggcttcataaatagctcaaagttgttgaacaagaataaaacttggtcatcacatttctactttaataaaatttcttaactcatggggaaattcatgcatgaaatcgttttaattcgtagaaaacttcgaacaaatttgaggtttcttctgtctccatctctatttgatttggcaaatccgattgactcttttttatcataagagttcagggaatttcaactttatttatgtctcttttagggccacaaagccacccagttattattttgaaatgaccgtatgtgaaaaaaatgacta

SEQ ID NO: 55725 - DNA, 1167 bp, Arabidopsis thaliana landsberg
aggtgttgcctctgcatttcattcgctcccgtatgcttatactatctgtttactcttattatagatgtgtaggcatctatgcttcataactaatgcttttttctttgtattatcagacatacgaaaaggtagccacagtgtttaaacaggaagaaggtgtagtcatcgccaatttggatgctgatgcacacaaagcccttggcgagaagtaagttggacaggcattttattaataccgattttactgtttaaagtcatttatgtttcataaaaccaaaacataaagacaagtaccttatattcagatatggagtgagtggattcccaacattgaaattcttcccaaaggacaacaaagccggtcacgattatgacggtggcagggatttagatgactttgtaagcttcatcaacgagaaatctgggaccagcagggacagtaaagggcagcttacttcaaaggttcggtaaaaacatgtcttctgcagaatcaccatttcccactaaaaattgaaaacttatgttgattctatcacactctcaataggctggtatagtcgaaagcttagatgctttggtaaaagagttagttgcagctagtgaagatgagaagaaggcagtgttgtctcgcatagaagaggaagcaagtacccttaagggctccaccacgaggtatgttagtagtaactcttaatcgatacatggagtgtgagtgttgaaagttgcctctttaattattgggctttcatgatgtctctataggtatggaaagctttacttgaaactcgcaaagagctacatagaaaaaggttcagactatgctagcaaagaaacggagaggcttggacgggtgcttgggaagtcgataagtccagtgaaagctgatgaactcactctcaagagaaatatcctaaccacgttcgttgcttcttcttaaaagtcatatagcttgaagctaagagaataggagtcgagagagtttataactgatactgttttgagattttatgtttgtcaagatcaagaacgtctgtggatgtttctggttaattctgaaactcttttgaacccaagcttatctggctctggtgaacaagcgaccacgataattataaacttcattcgcgtgaaaaaaaaaaggttaaacatgggccaggctcgtattca

SEQ ID NO: 55726 - DNA, 759 bp, Arabidopsis thaliana landsberg
taccaccagacgtgactggtctctaagcgcaatacagatacattcacaactttccctaatctctatacacaaacacctttattgtatgttgctacacattctattcaaggaatcaagtgatgcatctcatagaaaatatgacaggtcttctaccaaatggttcataactcatgagcacctatcgttgtttaaatatcttacccctacttatttcggctagcgtactgactatgtaatcagacaacatgtttctctattttgaaaaaggatttcttgttataatacctttcctaaactggcttgacctggagtcatctgacccgtctcatacagcttgcagagacgccaacccattagaaacatcgcttgaacgttacccagcatctgcacaagcttctgttggtttaactggaaagcagccaacggtgctccaaactgtttcctctccttcagataccttgaaacaatacatattaatggaaaactgtaagtaacgaaatgaaagctcatactaggattacagagatctggcggtttcccggaaatacctgtggcacatatcgtagattcccattgatatgccgattggttgccaggccaccattacacgtgagacagccagaacctattcaagtgtagacaaacatttaattataacaaagaaaagaggaagatgtgacgtttttctggtgataaagtattttagagcattttggggctatgttgatggatccacaccccattttccaggcttttctc

SEQ ID NO: 55727 - DNA, 618 bp, Arabidopsis thaliana landsberg
agtgaatctgaaggagaagaagcgaaggttgagagagatcgtcgaattagggttttagtgagacacatttatggttttaggaagagagaggctcgaagaagaagaagaagaagaagaagaagaagaagaagaagcacaattgatctcagccgtccgatcatttttcacctgcggctataatttatatatttggttgagaaatttatttttaaaattgataatacaaattgacttataacaatgaaattctataactaaaattaagttcgaaattttgaaaaataaaattctacttttaatgggaagttctgtgttttatacaattttcatgatctaataaattgtatattttcttctaaatatgaaaacaatttagaattaagtaacataactgaaatgtgaaccataggcaaatgtacaagaaaatatgactgatttctttcttaattctagattctttacttaattctagatggtaaatcaattttaaattaggtaagatggagacaatttagaactaaatttagactgttttcatgatctaattattcaacaactcttctttatgaacctacctttaaataatcagtcattgtttttgcattcatcagtatcata

SEQ ID NO: 55728 - DNA, 586 bp, Arabidopsis thaliana landsberg
  unsure (1)..(586): unsure at all n locations
cccagtttgtttaggcggtgggcagcagtcatagccatgccctgttccgcaaacaccacaagccacaacgcaaacatcatgccctcgcccagcagccctagcaaaaactccagcaaaacctactagctagaacaccaggtgcgggcaatcttgtttcaaatgttgtgaagttgggcattacaccaatgtctgtccaaagaggaatacaagtaccccaacttgaggcagtaatcctaacaagtagaatcagactccattcagcaaccacatatatannnnnnnnnnnnnnnnnnnnnnnnnngctgaagctactactgatggttctaacatcgtcattggtacgatcctcattaattccatgtcaacttccatactattcgattccggagctttgcatttattcatatctgcctgttatgttaatacacatagtctaccttttgttattatgcaaaaacccatggtagtcattacacctaaagggccttttgaagcaacctatatgagccataagatagatgtaacaacatggggagaaaattttggccatatctatagtgttagaagagagtagcatagacttaat

SEQ ID NO: 55729 - DNA, 805 bp, Arabidopsis thaliana landsberg
gattatgtactagaaacttgtttttttgtattagtattatggctcgaaagtgatagtatttgtgaatacaaatattctagtaatagttgaatattaaaaaatcatatcaatgatacgatggcttaattttgtagtcaaatttgtctgccatatgtttcctctctttatgccgccacgaaaaaattgaaaatataaagaagaagaaacagacagcacactcacaatttgtcgaatttttaactaatgattttgtcaacttgtataagtgcaaatccatattttttattccttggttatagaattttatttatcttttactaattttcgttgttttaataattttaaatcatactagcaaaaaatgtcatccaaaattaactaaaacctaatgttccgacactttcaatctcattctacatgtaaacaaaaagctcaaaaatgtaagaaaaaaataacaaggtttgctaaattagaagagctatttaatatcacatgcgctatttaattttcttttttaatcacgaattagctattttgcggagaatagaatttgagtgaaatataatcataacaaaatccctttaatattaactctcaattcattacaagcaaaggtgatgtcttattttatatgacgaaaatgcccacaaaccagccagatatatcaaccgtttgagttctttacatcgtaaatgccgttagttacggcaacaatctctaatcctttcatcttcctcaaaattattaaaatcataggactactaatttagaaacaagaaattcacagaacaaacagaaaacaaac

SEQ ID NO: 55730 - DNA, 992 bp, Arabidopsis thaliana landsberg
gggtaaattggtcacaaaatcattaaaaaagttggaaaagtgtcctttccttcaacagtgtctcaaacgtaaaaactttctttagaagtgccttattatggaacattcccttattttatctatataaaaatgttatttttgaacatttttgtttatgtatttcttcaactctaagcaaatcaatatatgtgtagagttgatagtgtaactctaatagtagtgtatactcttatgatttaagtctttttggacacaacacaagagcatacaacgttaggaatttataagaaagataacgatcattagatactctctatctgtgtcctgagtttagactctaccaacgggagatagcggcggagccataggagaagaagattttccggtggtctttgccttggaagcacatgttagtaccgtcacacacacaaaaaacgcttgtaacggtgaaacaaacgaaccaaactccaccctatagatccctgtcttcagctctgtcatcgccaaagctggactcgagtcttgttcactcacttcctgcaaatgtaaaacgactactctcaagaacacggcataaaaaatagaaaagcaaacacatattttttatatgaaatgggtttgcaggaaaatcttagaaaaaggttttggttaagttatgtttatattacctgatcgaaaagtgtgaagctttggttgaatttatggaggactgttttgttggagaggacatgtagtttacatccaacatcccagccaccgcagtcgcataaccctccagacctccaccggctaatcaatggcgacggtgctcctttctcggggaagctgtgaacgccgcctggaattatcacactagtttcctcgaagctggtatagcttccttcgacaggctttttcttgatcactacagctgcaacctccttccttccttttacttgctctgattcgtcaaacagaactgactctgtgatcaaagatttctgctctgatat

SEQ ID NO: 55731 - DNA, 532 bp, Arabidopsis thaliana landsberg
ctttctcttctcgcgaggaacaaatgtaccatcggccttggcaacaacatctgattttgttttggcatattttattctctgtccacattgctaaagttaggaaataataatatagcaaagtgattgataagtatttccacaacctaaaacatggtcaataacctaaaagcaaccactaaacatataaagggtctttcaaatagaatccatgtggttcactaagaaaagctctctaatcagtagattcaaaccctaattaggtgttccactaactctaggggcaaataggcaaaccaaaacacatcgagtaagaagaagttatcaagaaagtaactggagtggaaggaattggtaccatctccttgtcgtagaaaggaaaattattcattttagcaatagcagtggaagcagactttgtgttgtcgaagactacccaagcttgtcctttgtgcttaaaggtcttaaacgccaatatctccagtttctttccgaactgtgagaacactgcattcagcgatttcttcagctttgt

SEQ ID NO: 55732 - DNA, 557 bp, Arabidopsis thaliana landsberg
ccctgaattgaaacagtttgttttattcaaagtaaacaaaaagtttgctgaccttcacctctaagcaatatcagatatgcaaaaggatgtataaattggataattgatatactcctgtcaattcaaatggatagccacagataaagtagcactttaatagctcatgctccacttttaaaatgtttatttttattcacttaatatttttaatcagtgtcattgtacacgtgacacaggggagggagaatgggcacagtcagggaggcctgaaaaacacacacaagaggactgctaatagagaagtctttcattttatgttgaaaataatgggattttagtatataagggcttaactccccagaatcatgttagatccactgatatttagttcagtggggcagagaaaaattacaaatgaaccctaaatagtattccttagagaatccaggaggagcataattagtttaggaaagtattaagagaggagatataaatgtttaacatttcctggactctggttgcaccataagaaaccatctcaattggcaacttttaac

SEQ ID NO: 55733 - DNA, 1376 bp, Arabidopsis thaliana landsberg
  unsure (1)..(1376): unsure at all n locations
aacttctgttcatctccttcgtccaggtaggtaagttcgattcctaacttgatatgatcatatatatgagaattcgacaaagatttttggttgaaatttgcttacttgatgatcagttggcttgaaccctaagctatatgatgctcgaagagtacaagtaagattctttaatgttgccgcttcttggtccgaacagatgatctcttatactatagtctgattattttgtcttttgggttttaagtttgatgtaagagcctcttcaagtcgtaaatcacttaagaaactcaaaagagagtcacaacaaggtaaagacataggcttaagaaatgttacagatgaagaagtttcttctccaagatttgaggaagctcaagttgatgatattccaacttcaaaggactccattgatgtttttgttgctgctcctcgagacaaagtgcttcaggcttgcactgtaacttccggtttgatggctgcactaggtctgatcatcataaaggtgaatcccaaatctgaaagtttatgattttgtgattctagcatttgtatcttgctgatttggttaccgcttgcaggcgtctcatgttgcttcgactgaaggattactggttccagactgctctatagatgtaccatgtaacatctcggaaaacgattatgttgtgtactaagaatcctttgagagattcagtaaccaaaacatgttttgtattgcatgatctttcttgcagttgggtttgaaacttggcatctcggtttaattgctggaatcgttgtgtttatatcgtcaagtaggttcttgctacttaaatcttggccagattttgctgattctagtgaagcagcaaaccgacaggtcaaaacattacacattatatacatttatacgattctttaaactccgcttattgtctcctttggtattcactacttgcagattctcacttccctcgaacctctagattaccttgttgttgcaatgttaccgggaataagtgaggtaacaatgaacaatcacaataaaacacagaaagggtctcctttagaaaatgtcgttcattggtttgatnnnnnnnnnnnnnnnnnnctgctgtttagaggtgcattaatgcctttgttcggaactaattggaatggtattgtagcggttggcctcattttcggtttacttcatctcgggagcggaagaaagtattcttttgcagtttggtaagccgtttttactgaacattttggtacctcaatgctgatgagaattgcgtagaccgaatcttgatattagatgattgcctttaacatgttcttgcatctctctatcacatttgcgaggttttcctattgaattctttgcggtttcttgaaattttcagggc

SEQ ID NO: 55734 - DNA, 885 bp, Arabidopsis thaliana landsberg
gcaaaaagctaatttctttttttctcttacgagattgtaatgagaattttttttttttgggaatcactgaaaggtttttattttgtgtgggcaagagagtgaagttcaatgatgtcaaatgtaatgatgtttggagcatgaaagacgaccatttttgtggagttcttctactgtgggatgatttgatagccctttaaatgtgagattactcaaatacatacttggttatattagacattaggatccatgaaacaacatttgatatcttaacccgttggaagaattttagctaactaagaaactcatggattattcccggtccaggaacaaatttcactatacataaacaggtaatttaatgaggacaaaaaaggttatttaacaaaaaatttagaaaatccataaaccataaagaatacaacacctagccacagaaacctcaaaacattggacaaatacccagcggcaatgctcaatatgctctctccaattacggacacagtttttcttgatgaagctactttacagttcccttcaacaaagacatggtttggttcctcgtacaccaaacttaaaccacaattcacaatctcacctgctccatctatcacttcaaattcgattgaagcctccgtaggaacacatttatgatgttctttcaacttcaacgacccttctagatgttttgttatgtgggagctactagtgtaaccgagaaacacatgatctgaatcaatcttgcgagactccatccaacttccaccaagagtgcaactgagacgtatacatgtgccaagttcattagtgaactcacagggcactctattgagagacggatgacttcatcttgagcgtcacggaatgtgacaacagcacatagagcta

SEQ ID NO: 55735 - DNA, 535 bp, Arabidopsis thaliana landsberg
actcacctgttcgacctcgtcgtcgagcttcgcctcagccttagctcgtcggtcacgctcgccagatgttcgatcgaggacttcagctgaaggccatcgtcgttcaggcaactaccaaatcgaattgagatgtggtgagccaattcgttatttttactattggttttaagattgtaaaataagacgcttcgtatgtgtatatgattaagttagaaataccagtaatgtgaaaggtagattaaattatatgatattcgggcgagctgatgacgtaaaaaaataggctaagtatttctatcagctagttgatagattttctagagttattatatcaatttgggtaattgatgtagtcgatgccctgcttaattagttagtttattctaggtttggtatttagttcgatgtcatgagagatgtgcaaattacctcatataattaacagtgaatggcatcgacctatctaattagcgtagaatttaagataattgagaaacacaatttagaaagttagttaatatgcccctgactctca

SEQ ID NO: 55736 - DNA, 492 bp, Arabidopsis thaliana landsberg
ttctctctcttttttttttcattaacaatattaggtatactttttaagctttttaattgactttcatcgcccatcatctcacattggctataaaaaaatcatttagttgacttgtcgaattaataacattcgtgtaaacgacgtgggcacacttccaaacactaatgcttacttgtttttttttggatggttagttggttactaatgctgactttagggtttagttatatacttattccccttgaaaaaaggttacttgttaaaacctcactccttgcgttaaccaaagaaaaattaaaaaccaaacgtaatttcaccaaaaaaatacaaatgtaaatattataattcgagtcgaactttgatttggttttagtaaatcattaacataggactgaattttttaagtttacgtacgttcatgcatttcatcttttttgccataggcccacacaaaaccatttcaggactattggttgtaactttacttaccac

SEQ ID NO: 55737 - DNA, 542 bp, Arabidopsis thaliana landsberg
ttgcgtgcgtgccagaaggccgggcgccgggaccagtccagtacctgcaacagcaacatctagcacctgacgatacatggcgcgacatcgaccagacggcctaggtacgttacgtatgtagcggcgaactcccccagccagccagccagccagccagcattcaagggtgaaaacggcgacggagcggctgcccatgtgcccccgcgctcctccgcccacccgtcgcgctcggcccgcccgttttgtccacacggcgaaccggaccggaccgcaccggacgatagatgccactaaccaccgtggcgcgcgggccggccgttactggtgcatggtggcgcggccccgtggttggtccggaatataacgaccggctaacggtcggggggagccttgattggcgttgcgagtgtttttgctttcggtccgttggttgtgcgcgctttttaatgatggcttatgtctcgccatgtgaccgcacggtacgtgctctgtcgaacagtcgtgctcggcatggacatgcattgcatgcccacatgcataat

SEQ ID NO: 55738 - DNA, 577 bp, Arabidopsis thaliana landsberg
cacagtgacactgtctgctcatgtatatatagcttgctttccctttccttcactagcttttccatatatacacatatcactgtcatttagcctatctctaacactttatctatcctcatatctatattcaaactctactctgcgaacagtacagtctatagtgtagaacagtgcaaaacattacttttaggtaatctatagatagactactgaagacggtcctatacacctttaaagtgggagttttgacgtccgtcgtctccctccccgcacggccgctgggatttgaactgtggccataagaaacaaagcgcttgcctctaaccaatgcagctcgtgtttgtttatgttgtacaaatgatagatattgtaaatatatttatattaataataaaaccagctcatgtcgggttaggtcagcaccgcggtccaaaaaggtgacccacatatgttatgggcccactttgaatcgtgtcaggataggtcgtgcccgaatcggccgctagacacggccattcgctaccataatcagcactctcttcggtgtgctaatctcggagaaggaaaaacggggacg

SEQ ID NO: 55739 - DNA, 1052 bp, Arabidopsis thaliana landsberg
cgcaccacctcactaaggaacgatttattatcattagagggcacctgaaagttagtattcccgaatccttcattgcgtctgttgatgctttcaggagcagctggtttagtaccattctcttctgagaatatagcagaaattgtttcatgagcagtttcccgtacagccttattaagtgcatctccttttaaaggatctggatgccccttgtaatggaatagattgcgcactgcaaccgaattcctttgcatttctcgtctaaactctgagccagactttcccacagcatactttatcaacctaagagcctgtatatacatataataaccaaaatcagtataaccagttcctacagagcttttagccacaataagatccattctacgtctccctataaacaaactctacgctataatcaaacacataaagctttctctttgatccattctaagaaaaaacaaacatctacctacaatctaaatcaatcccgacatgcaaacatttcaatcaaaatcttcatggaaaacaaatgtctcacaaaggaacaacatttcacaatcaaaaacagaaaacaaacgtaattgaaaataccttctgcttaacaatggggcttttgttatcaagacgtttcaaaatgaattcagaaaactccttgacgatgctgacatgagaagaacgaaggaggtcacagatctcttccaatttgtacacaggcgcaactttgtcctcatcagacgtaaccgcatctatcatccgcgacctccaatacgattccacagctctcctgctcgtatccatggcgaattcgaaacaaaacaaccctaattcccaaaatcacaactttttcgtcctcaccagtcaaaaaagcttcaaagacaacaactttatgaaagaccgatcctcaaaacaattagatcagtcaaaaaaccgatcctttaagctccaattccagctcaaattcaccaaactaaagatcacgatcgggatccaaatttcccctataaaccaatcaacgcggaggtaaaattagacccttgagacaacacaatcat

SEQ ID NO: 55740 - DNA, 1625 bp, Arabidopsis thaliana landsberg
  unsure (1)..(1625): unsure at all n locations
gatgggatattaagttttgatactaaatagataattatatgtttattaaagtggagttccataaacagcaattccttgaacacaagcaagcaatagggttctcactatatagggagttataacattttctaaatggcaataacttgttatcaagtttgtattctatttccattaaaatactttgcccaaacttatactatgtctgaaatcataattcaattgattttaaactatctgttttcttaatgagttattccaaccaaaggcttttgaactcattgatcaaactatattaattgcttactttggttatttgactatttttctttaccataataaaaagtctttcttaaccgtagaatttaacgatctagatttctttgttttcttaatgaatgataactcccagtcgcccatatactttcagacatttttctacacttgccaatataatgtgaaacttccaccatttgcattctctgttcatatttagtaaagttgctgattttaacaactgttgacaatattcattgatgattaccagattttaaactcaaatatcaagagagaaactttttctatatagtaataattgatagaagaaacacaaaatgttttgaactgaagtttgtgcaatggctttttttctcaagaaaaatacagttgtacatgcagaacatgtgacacgaagattttagacctaatcaaaattaattacaaccaaaacactcaagagaacgaaatcgtagtggaaatagctcacaagttgcttcatcaacttgctaggaacaaactaattttgagatatcataagctagtttccatctaatttggtgcaaaatgaggcattgctttgctttaggttaggcattcaattcttatgatttacaaccatttggttcggtttaatgaaactttttgctttttgtttttgtttgttctaatttgaaatatacaccaaaccagattactaattattctatttgggtttattataatcgggcttgatcggtaatgcccagtaaaagatttaaaaaatcgattaagaaagggagagattacataagaatgagtggcccatataaaacccttgaggttaatctgaaaatatgagaggactacgaggatataaacgtaaatactcaaaaaacaaaaaaacgttgatttgttattagagagaggaagaggtatcgaaaaaaggaaaaaggaattatgagagaaaaaggaaaatgttaccagaaaagatcaatcctttagtacggacaaactatggggtccactttttccctcttccatccaccaataacctttcgtttctctctatacctcgtattttcatcttcacgcgctctaaacccgcgtgtttatcaccctttcttataaacgcgcgtgaggaacacgagatacgactcgagatgacgtttggtttctgactagaatgctggagccaactgttattacattttggtgttttatataattataagatctggattgttagattcgtattttatttgtttgtgagcaaattcgtcatcctttacatcaccataatattnttttaatctttatagatattaaaactattactaactgaaaaatctncacaaaaatatcgaatgaaa

SEQ ID NO: 55741 - DNA, 964 bp, Arabidopsis thaliana landsberg
tcaaagcatactcttttcttctctccaaagataatctacacttctttatatatgtacacacacacatatagagacatctagatttcacttacacattctaaaacacctagacctttatcaaaaccagagaagaccaagaagaaggcatggctagatcaccatactatggttcatcttacttagactacctctctctcccaaacccacatctctgtttcctcttcatcgtcgtcttcttcgtgttgtccttcacatggtacttgaacttcgagtccatcatcgaagacaccctggaccacctcaagctcgtctttatattcacccctctcttcctcctcctcctcgtccactttttctccggtggcctctccttctacgtcccctggcctgaacaagactccattcaccgtgctggttcttccccttggggcgtagcagccgtgctcgtgctcatattgttcatggtttcgtaccagtcagatttccaggagaggtggttcccgtttggggctaagtagatcaatcaaagtttatgatgaccagctttagttattctctagctatatatggaacatccatgtaaaatatcaaagtacctgagtaatctggtaataatagattattatatgtatttttcttaactttagtctttcatgtgaacttaaattaaatatgtgtaggaatgaaacttttttcgaaggtcttataaagagatttgcatatgtacgtagatgaagttgtctcagcgtatgtttctcttttatttgttacatttcttttggaaaatgagatggactgagacttttggatacaacagaaaagtttgatggatgaatattggatggctaaaatgaatcactatgtgcaatagaagtgaatatggcgcgtaatgtgtgtatattgacttacacaacgagcggcagtagtggatattcttgtcttcttttgacaagtgggggtttga

SEQ ID NO: 55742 - DNA, 927 bp, Arabidopsis thaliana landsberg
aggtattgagtaatccagaacagaacaccataggatctgttcaacaacagcaggtacttaaaaattagttatatgttataacaactctcttttcttgtccttttgcttgtgacatcaagaatcttttcaaaactaatcatcaccaattaatgattcgtataattaatagtgttcaaacaagaaatctatcaatactcaaggagaagtagaagaagacgaatgtagtccaagaagatatgtagatctttcgagccgtggactatgtctaatgccgatctcagcttcatatcccgtggctgcagctgcggcttcggctgcagagatgaacgtacatctggtttctggcatcttccattctgtgtaaacttataaactagatacgtagatacataaacaaacaaagtaatcttccacaaacaggggatcttgtaaagttttatgtccctttttattttatacagaaatgtaaatgtcctgcatgtaatacttcaaaatcatatattgtttgtttgcgtacgtttactatttttctctaaatcgaaaaccctttcacaaaaaaaaaactatttttctctaaatgaacctactatttgaagcaaaagaattttgttaattatgaacgtaaatgtcaaactaaaccgaaggttttgcatttggattataaattatagtataaaaacctgaaaatgttttgttttttgaataattaaacctgaagtttaatgtatgtagcacaacggtttaaattgaggccaacctgaaaatgtttaattcctttgtaaatgaaattttctcaatctaaatacgaattatataatcgtactgccggccttaaagatatgtggattccaaagtaaatgtatatataacccattagcttaactaaaaaaaggttttatataattagcgtcttttcgatctcttact

SEQ ID NO: 55743 - DNA, 517 bp, Arabidopsis thaliana landsberg
  unsure (1)..(517): unsure at all n locations
gctttggctggcttggctgcaacgatttccagccgcgcctgcgcctcgcgcttgcccagtatcacgtagcgtggcgatcgccgcgacctgcgccgcgcgcggcacggtcttcttgctttcccagttataaaccgattggccgctgacgttcagcagcgcgccgagctcctcggcactgaggcccaagcgcgcgcgtaacgacttcaaacccttggcgacaaatcgaagtttgccgccctcttccaacgccttcgattgcgcgctcgaccctgcgacacggngcagcttcttcacttcctgctcaagctgggcaatctgacgcttcatcgcggcgagctggcggcgatgggaagtcgtggccgcctgtacaggcgccatgtgctggcggatcgtctttttggaaagacgtgagatttcgcttttcagcaagcttgcaatatcgttcatcggaactttgcctttagagtgagcccttagtatgcctcagctcgctacactgcgatttgcagcacgggac

SEQ ID NO: 55744 - DNA, 805 bp, Arabidopsis thaliana landsberg
aaaaaactttttttaaactccccccggatattctttcatagaaaaaaaaaaatcttatgatgattttattgttggtgttacctgttttctcagcattgatccatctctgctcaatccttacaccaaattttgatggtataagaggattcagtgacaatgcttatattaaaaatggagtttatagtctctctgaactatctatgtccaagttcttgggagttcggaagcaccttacatcgttgacatttgttctaagttttcctatgacaattcttttcgtttgcacattcagagatcagtttgagatccactaaagttgatgtggtctgatactcacttcttatcccaacctaaacaccatgataacttagtgcttttgcttaccgtcctaatggttttgtgtttagtttttttcttttttttttcaagtttccattgttgcaggagaaacaggtctactcagacatgcaacttccattcatgatgcagcaaaatgatcattgttgcaagagaagagaagtccacaatgatgtctcaaggatcaaggacattatttagcaacaaagaaatgttgatttatgttttcaactatcatgtactaagtaataattcaaactttgtgaaacatctaacaatttgagagcaaaaaaattacaaattaacatatgagtgtcaaattcacagacggcgtgcaatcctgatctagatagagcagacgacacggcgtgtcttgcacacgtgacctaaaacggaacgtagtttactctgttttggcatattaagctatttactgacgtggcaatgc

SEQ ID NO: 55745 - DNA, 728 bp, Arabidopsis thaliana landsberg
ctagaatttttacttagtcacttatatacattaccataggtgatctgaaagatatcaggtttttggatcaaataaaaacgtatttaactatttatagtcttttttataggtaaaataataaatatacaccgtagatgggatcgtattcgtataaagaaaggaagccaagctgagccgataaagctgaattgtattacacttgtcttatttttttcttcaaaaaaatgagagactctttagcattctcgtgtgatgtgtaacggcctctgtttctttctctctataaatatcttcttcctcatttctcaatcctctgtgtatctctttctaccttctctgaacctatagagccaacgaaaccagaggacagtgaacaaagaattgtataattcgatctcaactcgttcctttgttgattctttactccgactattatgaggattgtacgtgcgacagagacgttctcggcggagcttaaagagttcatgtgcgccgctgtgcaaaggaggaaagacgacgacggattcagaggctctcgtggcggtggtaaatctagaaatgccatggatcttgattctgacgccggaaacagattggtttgtgttactggtggtgtttcttacttggtcgtgcattgttaacgtctcttgtcatggaacccgttaaacgtcgtgattgcaggtaatcacctacgtttaatatgcagatttgggaatatctactgatag

SEQ ID NO: 55746 - DNA, 1155 bp, Arabidopsis thaliana landsberg
tgtaaagattattggtagagtgattattgattagccaaccactaaggtacgacttaacttaatttcaacagtctttttaaccacatgatcacgtaatatatatatatcattctcatattttttacagctataaaaagattattgagttagcagcatggcgtgggtaaaattagttgaagtttgaaagctaaattccaatcctagtaactaactacggaagttgaccaaaggttcattagtgcgtatttttgttatcttgtgatatatgattctttgaagaatgtgattctttttcccccccccatgatttcccttggtagtggaaaccagaatgtaacgtgtattatgcaatttgatttgatatattccagaaaattcccaaccacaaacggaaccttttaatccatcataaattcccattaaatgtctaagctatgtgttgcagtggtcagctatctgtttactcgagcttcttacacttgctttgagtctttagagatcatcttaatctgaggatggtattaacatcatcttatgttttctttcttcagtttctctatattaaaatttcaaccacaaaaagctgatattgcagttatgattatgtgagattaacttgatcttgtttctgcagagtgttgaaggcaagcctgcatcacttggcccatggggaggccagagtggtcatgcctgggatgatggaatgtacaccacagtaaagcaaataattatagcccatggttctggaatagactccatacaaattgagtatgacaaaaacggtagctcggtttggtctgaaaaacgtggaggaaagggaggcaagaagtttgataaggtatgatcgagactctttatcctataaatattgtgttggtggttctcagaaattaatcactgttctcttcttgctgtttaggtcaaatttgattacccacatgagtatctgatttcagtaaatggaacctacggtagctttgacgtctggggaactatatgtgtccgatcacttactttcgagagtaaccgcaaaaaatatggaccgtttggtgttgattcaggtacattctttgcattgccaaaatcacgatcgaagattattgcgttccatgggaaggctggttggtatttggatgctattggtgttcacactca

SEQ ID NO: 55747 - DNA, 566 bp, Arabidopsis thaliana landsberg
cttttctcttcgtctagctaagctcggttttgtccctcgccacgtaccaaacgccaccgtgggctgcgtccagcatggttggggagtgtcgcacttcaaaattttcttttagatttttgctctgttcttctattccacgaatagggtagtccaactcgatggtacagcgctggcgtatcaccggtgggttgctgctggtgaccgagggccatggcgacgtgagggtagacgagagaatgaagtgagatgggagagagaaagagacgcaggagcgcgtgaggttgaagagggtacggctaccgtccatctcgcgatgggcgtctgtgattaaaagcgaatatactcatttggtgaagggatctgagccattggataaggagtggatgggcaggattagaggcagagtaccgttctggagagtttgatccgagccctcagcgggtgatcggacggtcgacattcaatcgtaccccttcgactgggtattttcgtaaagagacctccactttaaacgattcaaccgcagtccccccagctgtacctaaccttgagagctttcgaataga

SEQ ID NO: 55748 - DNA, 1095 bp, Arabidopsis thaliana landsberg
atactcaaatattactttagtaaacgtttgattatatacatcttctaactataagttgttgaataagggtatgtatgtatacattgttttgatgtgaagccaaatttctcagatccacatattcatccgatgacaagttacatttgtttacagtaaatattgaagaagccaaagattgataactcttaatcacaacaaacttaactagtagaaattcatgtgtttttatattgttttcaaccacatttttcagtcgaatttgagatccaaactttatagaaatatatgtaaaatcctagtatatttggtccgacgccgcaactttgtcaatcacacagtaacatgcgacgaacaacgtgtaagaagtctcgttgctatatataccaactgtagtgtggttgacacccaattacacaaacaaaacgaacatatgaagggttatatgacaaaatcttacatggaaataaatattaaagtcgatgatgtaacgtctcacagccttacattatgagaaaagtctaccaaagaaagtttcatgttacatgttctggtatcaagtcttcatgacatccgccagaagtttatattagggaaaatcatatttgcagatcttgattcaaattatatatcattttggtggtgggcacatctaaatttcctaagaaaataggttaaatctaaataggacttcattttaacaactcagtctagactgtctagtggttgaaggattaataagaatgagtttaattcgagttttttttgataaaaaaaattgtggtgagcattgagtatacattaaatgacaactcgaaattaatccagatctctcagttcttaaaagataaaagacataaaactaaatttagagttcattcaaaaataaataaatagagtttgataatgatttagataattgaacacattagtatgaggttaaataaaacactaatatgagtgacacaagctgattttttcaaagaaattgtactagatgatataattgataaaatcataactaagaaaattataattaattagaacagtagacatcacactagacaataacgataaacttcgttagtgttagaaatt

SEQ ID NO: 55749 - DNA, 496 bp, Arabidopsis thaliana landsberg
tataaatcatgtgagtaaatatattccaaataaataacaaattcaacttcaatcgaagttataacttaattatattttagtcaagttatagatgaaccaatctagaatactacattaacttagattagacaagttaattcaatagacataaattaaataaattagtcaactattattacatgataaaatagcattattaacatgtaggcaatatttttatgaagttaacgcatctggtacgagttaaatcagagctaaaacgagaaagatatggattttacttttttcaggaattatttccgtactaaaatcaatttcttgatctagttttatctttaaaagtcactaatggacgatgggtaacattactgagaagcttagggtttaatatgttaatatcaggacccaaaataaatattgttttaactaacaccagacgacgaattaaatatggtaaagtcgcaggtctcattatgcaaatggttgtacagaaggg

SEQ ID NO: 55750 - DNA, 481 bp, Arabidopsis thaliana landsberg
ggttgcctggggaggcgggtcggcgagagaagaccagtgagggcgcatgtgcacgttgggtagcccaggaggcaagcccggaggacgaggccggctgcacgcgcgctggaagggcggtggcgacgaccacgctaggcgagaggaggcctgagctcggaggtggtgtgggccacgacggcgtccctggtgacggcggcgatatcacacaagagggtcgacggggagagccgagccggtgcctgagggccaacgacggcggtggaggaacacatggctagcggcgcggggtggctgggcggcgctagggaggcctgaagatggcggcgcgactgccgctggggggggggaagggcacgactgccggcaggcagaagtgttgccggcgcgcggtcgcagtctgggtggcgacgctgccagcaaggggccgcggttgtccgggggaggtgggctagcggcgtgccagcaaggaggggcgcggcgc

SEQ ID NO: 55751 - DNA, 608 bp, Arabidopsis thaliana landsberg
caccttcttaggcaggagggtgataaaagccgtgttgaggattttgagtttggagacatgcccacattgcacagcaagcaaagcacccatcatatcctccttgatgatatcccagcaaaccttataaaaacgacatgtgaaaccatctggcccaggagccttgtccaaaggcagatcttttacaactgaccaaacctcctccatagaaaaaacaagctcaagatcccccaaatcatgttgttgaatgcccaggctgcgcaggtccagggcgtagtccctatgttcagctgtacctagcaggttatcataaaaatccaaggttgcttgctgtttttcttcttgtgatgtgacaatacgttcctcaacctgaaattttgcaataaagttctttttcttgtggtagcgggcttgctgatgaaagaaagaagtatcaagccaccaaggggacactaattatattgactacgccaagtagtaagaatacaattagaatgtaagtgtcatatcattatacacattttgattatactttatttaaatatataataatgattttattattgtatgcttcttccttatatagttatatgcctcctactttatatcta

SEQ ID NO: 55752 - DNA, 478 bp, Arabidopsis thaliana landsberg
tgggcgtcgacaggccacccaagacgcctctagtagacgacgtatagagtcgaagagaggtgaagatagagatggaagaaggctatgttactgctacttaggatgcagatagatagacagttggaaagttttttttggaaaacttatccatttttcagtcaagattgcaaattcagaactaagactaccttcctctataccatctccctaaatttcacttttcaccattgttgagcaccatatgccaccaggagaggccagatgatctggccgtggatggtccgctcctaggcgcaaacggtccacgtgtagcactagtagaaaagagctcaaagcctgcgacacgttcaacttttcactggcggtttccgttatcaaacgtcagtgaaagaaacaggtgggcccggctttataaaccgccagtggaaacctatttccactggcggttatcttaacgctaccgccagtggaaatgggt

SEQ ID NO: 55753 - DNA, 1052 bp, Arabidopsis thaliana landsberg
caccaaactctacaaactcagatgacccttttggatacaccttttcctttcctttcaccaaatagcatgtctctctttcttcaaataccaatgcatatttccccggctgacaagaccatctgttttgtcagagagattcatcatgttattaccaataaattgaggaatggaaaaagtgaaaatctatgtagttagtagtaataggagcagagcatgtgcatgtttgatacttacttaggccatgacatgactccaaggtcagataaccttctgctcgaagggttgttttcgattacaatattcattttggaagaggaataaggtgagaattcgacgatgtttcaatgttattagatagaacagaaagaaacagtgagaacaaagataagaagaaagtaggtatatgagatgtatttatatggtgaaggacggagtagttggtctgcatgtgtatgtatttataaaaccaggtatgaataaagtgacttcttcttttttcccttctattgaaagggataataggagagaggaggaatctttaaagaaacactttgacccaggatagatacaaaaccaagtcaacaaatacattcattaagcttcatgtgttagatagtccttctagaagtggttcatactacaaattctctggttttctatttttcttgattgcattaatctgattaagaaagtttctcctctagaaggcaaaatgctgagctagtctctcaacaagctttaatgatctatccagatcaagtctccaaccacatggaccccttctgttttgtccccgcgtccactatgctttccttttcacagtgttaacgagtcttctgagctgaaactcagacacaagtctccggacaatgtagccaccatgtgaattctgcagtgatcaagtgggtacactcgagaggattaatataggatctaacttttttcagctgttttatgcactattagtctagatttgtgtagcttgaggatcagttattcagctgttgcgatcgcactattaatctggtatctggatatgtgtagttttgaga

SEQ ID NO: 55754 - DNA, 577 bp, Arabidopsis thaliana landsberg
cgggcaccaggcaagccctatggtttagggcttggattcggcaagagagggagacgaagagccggggagcgaaagacccgaatggccgagacgacggaacggaacggagagagagagaccccgagagagacaaagacaagtggtttttgggcttcttgttcctatgggcccgttacccgttgtccccgcgattgatgggcttcgcactgactgacgtgtcgaaaaagctaaatgggccggcgattagtttgggctattcttgcggcacaaatgattggtgggtgtccgccggctgagcagcagtgagcctgtttggatccttcaagcccgctagctctaactctagcccaaactagctctagccctctacgtgtttggatccaagggctagtttacaataaacctttccttatccagatttagtgtgttaaactcttgtgtggcttctccacacacaaataacacaaataaatttattttcacaaatcaaacatccaaatcacaataagtttaacttctgcatacaaatgtgatgtccatacgaacatacaagtccttaatcaatattaaaaaaaat

SEQ ID NO: 55755 - DNA, 636 bp, Arabidopsis thaliana landsberg
  unsure (1)..(636): unsure at all n locations
gattggttgaatgaagatctgaaaaaagaattgatgccactacgggctctagtttcttctgatgtggtgggagataagatgtaagtgggcctaggagttccatacggtaaatatcagcacctcatggttatcccaaggtgattccctcctgcctatccttttgtgcacacccttgggtgagattcatcgcccttgtgtttagctaccctaaagactttattctatgaagttcctctctgcccttgagttctggcctgggttcattgtgggtatggtggtactcgtgtctgcaagtttgtgtatctccctcctcgtcgccttagtgatctgctccagtgcaccgtagtgttcttcctgtgtctgtgtctggtgactgcaacagccatcttctccaccccaccgtggtcatcacacctcaaggtgttccccgttccttgcgttcgtgttcctaatcaccaggtggaagtgatgctcactgaacttttccttctaactctaccgcttttgttttgttcgaatgacagctcgccgccaagtgaacgccgtcgcacctcaaggttattaaaacgacgaaacnngttgaacacnntcatgggtgagttttaacttntaaacggtttaaacaaagtttggggt

SEQ ID NO: 55756 - DNA, 1139 bp, Arabidopsis thaliana landsberg
ttttgtggatttgatggcgttgcagcgacaaaactattcttgaattgggccattactccagttctcactgaattgattgccccacttctacttggtgcagctttagaagaaggtgtcctactagattccgagctaaatccaataccaagaccaaaatcaactccacgtactcctttgtttccaccacctcctcctcggcctttcttacctccttttctcccgtcacgcttggacttgaatcgtccatcctattgatttacagaggtaaaatttgaggagttagtagaatgaacaatctggaagatacaagaaagaaggagttgtaattaccttcatggcaagatctgtgagttctggaggcacattttgaccagcagcaaccagactgtttaccaattcaccagcaaatctagcctctctctgcgtaacaagtgtgtaggcaaccccatctttgtcaccggcacggcctgttctaccaatacgatgtacatgcatgtccatatcttttgcgatgtcatagttaaccactgtcttaagcgatttgatgtcaagacctcgggcagcaacatcagtggcaatcagcacatggtgaactccagatttgaacttctgcagagtttccattcgtgatgcttggtctttatcaccgtgaagagcagcaactttgaaggaatttagagtaagttgagcttcaatctcatcaacagtggcctttttagatgcaaacactaatacgtcaccctcatcaatcattccagggagcttttcaagtagccagggaagtttttcagcatcagaaggtatgacattgacaacctgcgtaatatcttcattggccatccccacttcgccaactgtgactctaataggatctgaaaggatttccctagctaacttttcaactttccaaggcatagtggctgaaaatagtaaagtctggcgatcaggacgaatctggccaacaatagaccttacttgtggctcaaagccaaggtcaaacatccgatctgcctcatcaagaaccaaataactggctctcatcattgtcaaagccttcatcttcagcatgtctatcaaccttccaggagtagcaacaactatttcgcatcctgccgtgagttccttagactgttcatgtt

SEQ ID NO: 55757 - DNA, 1379 bp, Arabidopsis thaliana landsberg
  unsure (1)..(1379): unsure at all n locations
ctcgaggaaagcagtaaagagtggagtgttcctcttggagtctatagatgcagaatcagataactgtgtctggaaattagcagatgtaagggagaacagagatcccgaaagcaaaggcagaccgttaagccggaaacaaaaggacttgagaatcacactgcctttcgcagatcacaagaagataaatctctacttggattagttaagtagacgtagaagtagagttgctattaaagtaagttcatcgtcactgcagtttcacattgctgtttccggataatttcaagtgattttgtattagttgagatggtgagtgagatatcaaaacatatgacaaaaattcacactactaagatgttgtaagatgtgaacaggaaaaaaaagctgactaacagaaacattatcaaatcttatgaaaatcataaactaccatcttcaaacattgagccaacaagctctaacttcttgtactccctttcctctactggtttcataacgtatggaccatctggttcatcataaggctttgaggttctgtattccttctctgttatcgatcttataccgtttggatctgattccacttcatcttcttcttcatcatcttcttcttcttcttccatgtcatcctttggaggatatcctcgggtttgtgccagcaaccattgatcaataacaccacactcaattgcatatctcgctgtgcgttccaggtaccctttattgttcataagatctggctgaaccgtaagcattcttattagacctgaaatagagagtagtgtggttcagttaatcgcaagcataacttccaaattgctatgaaaaacaaatgacacaagtgaaaatgtacctgcaacgatnnnnnnnnnnnnnnnnnnnatatcccttgtaaaaggagtaatgggaacatcctccattccggaaacagcaccattgtgctctttggtatagtaatggatcttagaagtgccattggtcacaaacaagaccttgagattttcatgccaaagctgttccacagtttctggcgggtaatggacaaacttactgatgtcattgttttctgtatcgaactcttcagtaggctcgattccgcataagaattcaagttcctgttttgtgatttcaatgacgtctgcaagatcccacacttcctgtatgaaagacttggtttcttcgctggagtgccatagtggtaaagggagattcaagtcataaaaaatgacattgcctagttgctttgatatcttgatggcttgtatcgnagttgacatcatcttcttatcgagtagagaatgcgtgcttgaagaaaacattttcgcctgcacccaagttaagagattggtgaacaagaaaagagccaaaactcaatgttc

SEQ ID NO: 55758 - DNA, 551 bp, Arabidopsis thaliana landsberg
tacgacaccggatggatcgtgttcggcgcagcgaacgtgttgtgcgtgtccatcgccgggccggtcatgtatctgcccttgtgccgttcccgtctcgttggtgacgacatgcgctgcctggtccggatcgagattgaccaacgccaggtagagcttgccatcggtgccgcgcgccgacgacacgtttaccatcggcagatcggagccgccctgctgatagcgcggcccttcgaccgtggcagggtagggcaccgcaccctggaacgggcggtacatgtggaacacgtgataggtcggcgtcagcagcatcttgtcgccgtcggtcaggatcatcgcctgcagcacgttgaccatctgcgcgatcgccgtcagctttacgcgatcggtttggcggaagaagatgtcgagcgtcagaacggcaacttcggtatcgcgcaacgtgttctgctgatacaggaatccgggattggaccctttttccggatcgtaccatgtgccccattcgttgacatacagcgccaccatctttgtccggatcatatttgtccatg

SEQ ID NO: 55759 - DNA, 361 bp, Arabidopsis thaliana landsberg
atggtataattgttttataatcttaggaggtgatcaaagaagagagtgaagatgacatgattttcggtttatttgactagaagagcttctttttctttgcttccaaattttatgaattttgcctcacatgaatattttgattatttacaatttatttgattgtttatgagagacaacaaaaataaatcaaatctattattggctattgtttaataaatatatatacaacaacaaaaatatgggggaatttctttttgaatatcttttttttttttgcattccgaaatttaattaggacttttactagccaataattgggcaatagttagtctcactacatcacatcatactatacgtgtac

SEQ ID NO: 55760 - DNA, 128 bp, Arabidopsis thaliana landsberg
tctcactgtcccgtgccattggccttacatcgacttgttgttctttcagaaccttcagaaattcattatataaaaaccctttgtttgtttgagtgccgcgtagctatcggcttatgtcactcggcttt

SEQ ID NO: 55761 - DNA, 1220 bp, Arabidopsis thaliana landsberg
agagtgtctacaaccaaataaaaagtggatgtataactttagaaataattatgttatttttagcttcaattgtatttccgaatatgcaaacaaaagggaaaaatctaaagttttgccacagaaatagaaagaggacaagtatcacttatttggaaagagaagaaacttaaactttttaccgaccacaaaagcgtcaatttttatttcgaaacgaagacatttagttacaaagtacaatactctcccagaaaaaaccaacattagagttttggcagagattgttacaaaactacacttgctcatgttttcactaggcgtataatcgtgtcgtgttatttcgagtaagtacataccttgcagttcaagcactatgcaggtccagtggcatagacatagcctttacctgcaaaaacaccatttgaaaccatacaagattcagccacttggtaagcaaagaaccatggaagatttaactaccaagaactatgaaacaaagagagtacttttggcaatttttcgaccctcatatcaaatcaaagaacgatgaaactcaccattgtggatgaagggctagaagagtcgagaggtccagatcttctagcctcccaaaaccggcttgttttatctccacgacgcaccacctgcgatttgctctgttctttagaagagaaactgatcttctctcttcccttttgtacagctctcaaccgtcctctcagcaacccaacttcactctctattttcagtctttcatagtcaatagctgacattgaatttcttcgcatattggtagacatgttactttttccttgtggaaatgcataacttgtatctgaaacactctgtgatctgtccagtttcagatcctgagtggcatggtcagaaggaacattcagttgccccttgttatcttcatcagtcactacatggatgtcatgtacatgacaatcaatgtcgtgagggtcctcacaaagcttcttagaaacagcaatgtcgctagttcttgatactagttctgcatataaagtttcaccttcctctctttctttcagttctatatcactcagagcatcaaatggctcacttcttgactgatcacactcaggattgtccatctgattagtggagatctcaaatccagaagagagatccacagtctccaagtcatcccatggttcagtaatctgttgcggcgtttgcaatctgtcgatttgagctgg

SEQ ID NO: 55762 - DNA, 506 bp, Arabidopsis thaliana landsberg
gatccctgggggactcgtccgccggctcctccaacaccatcgacggcatcatgaacggggtcatcaaggagaagctcaagatcatccccaaggacgtcaggtgagatgggagttgctgttaccatgccaatcgattatcgtatcgatgcgctaaattaaacagctgcctgcctgcaggtgggtggaggtctccaatgccgtctactacgcgctggtcaacgacttcatgaagccacgaatcgacgaggcgagcaagctactctatatgaattaagctgatgtacgtggagcttttgttaaccatatgatcctctctctgtttttaattgtttttggtgtgtgttcattttcgcagattgatgagctgctatcgtatggtgtgaatgttactgtatacaacgggcaggtcagtagctctctcccccattcttactgtgtgtatatagacctccagagaaaatgacaatagtgggctgggccacatgcatgttaagataggatgaaaa

SEQ ID NO: 55763 - DNA, 857 bp, Arabidopsis thaliana landsberg
tattggctgtaagtttcccttagaaactgtctatatatatattgtacaagaaatctcttcgatctaatgatctcactagtctaggttgtggcattcatagtggatcaagtgtttgagaagctagtactgacatgttttacttcactctagcttatgattgaatgcactaggctttgttttctttgtttagtacaataggattatcggatcatcgatgtttggtaaaacgaaaatatgatattcatttgtctactcaatagctgtgttagtttagattatgaacttagtgattggcatatttctttgcgatattttgtgagtcgtcactgcatcaattagagttttttcttttcttagtacacgttattgagactgatgatgtgacaaaaaatttgcagtggctggggtatactttgcagagaatctcaaccgggagttgaggaaaaactggaagagcttctcaactcaaaactactttgactcgaacggagtcttcctatcgactctctggtctggaccacttttggtcattgcaatgataatcctggtaatgtgttcagcaatctttccctttcttctctgcattaatatattagaatctacttgctagctcttaataaattgttcccaagtaaaacatactttgattgagcagtcatattaactgagaaatcgaggatatgtttcgtgtttgatttggttttaactctaagagtatttgtagtccttaactcaaaccatagtaccatactgatccatgtcttgtttaggatttaaacgaactatgtgtagtgaatgtggaaaatctgatggaggtgttgagtttttgacagataaacacactcttttcgctttgc

SEQ ID NO: 55764 - DNA, 439 bp, Arabidopsis thaliana landsberg
  unsure (1)..(439): unsure at all n locations
gggtggtggtggggttgtgttttgttggggtgtggttgtcgcctggcggcggnttgtcgtgcgggtccgggctcgatttcgtggtcctggtcctggctgtttcctgtgtgngcttgttctccgctcgctgttccctctgctttcgggccgggtgcgtgttgtgtgctgcctggggtgccttttgtgtgtgctggctcgccttggttgcgttgcgctcgctgcccgctttccggtcgggtgtcctgtcgtgccngctgcgttgtgcgtcggccgcgcgcggggtgtggcggtttgcgtgttgggcgcccgggtggtttttcttttctcccgtgggacgggcttcagctgnttgcccttcgccgcctggccctgtgtgcgttgctgcatgcggtcctcgctggtttgccccgctggcgtgctcctgtttgctggtggttcc

SEQ ID NO: 55765 - DNA, 554 bp, Arabidopsis thaliana landsberg
tcagtcaattctactaataaataattttctaaataaacatgataatttatctatttttgtagttgtcttttgtcaacaaatattatcttgataaatgattattttacccacacaatcacaaattcattgccataaattacatggtaagatcacatattaagttgaacaaaaaggatcacattttcaaatatctacctcataatatttttttaacatgttataatttctgacacgaggagattatggaactgtctttaacaaataaagaaaagggattacggaactgagatcttaaagattgattatccaaaaaggattttataaacaaaaaatcaaggtataaatctaaatgcaaaaacgtattattaaatatcttcgaacctggtgcatgatcaaagcaacgtaacgtatcatgaagattccgtgacccacttaccttcaattttgttttataataatattgtgaaatatttattacatctcttctctctattgttctcttccagtctataaataacatgtcaaccacatcaacaaaatcaactagctcacag

SEQ ID NO: 55766 - DNA, 887 bp, Arabidopsis thaliana landsberg
ttgctccttagacaaacattttcccattatacatgtaatcagtttacataggaatccttttgataagtgtttcatttggttcagctactaaatcaaccttataaatgtttctgagttctctgtatcaaactgaaagaacaattacagacagcagaaaacactgtatataaagctattggaccggctgattcatagaaaatggctaacaagttgatcaatttctatggaaaaatgtttttacctattgttgtatattgttcctgaccagaacaagagttttgaactttacagtgggtgtacagcttcatagtgttcttcttcccaggaggatcaacaaatttgaaaagcggattgcttccgtggcacgcaatgcttggcctgtttgtttacatacttgctgtcgggaatgcagctttagggtttctggaaaagctgactttcttggagaatggagggcttgacaagtatggatccgaagcatttcttatcaacttcacggccattatcactattctctttggtgcctttgtggtactcactgcttctgctgagtctccttctccttctccttccgtctccaatgatgatagtgttgacttcagttattctgctatataaaacactttctacattccacgttacatctgtatcgccccttgtactctcaaaactccatttatgtatgatgcatttgtagcgaaaagctttgtgtgttacggctttgctacttctggtgtgtaaaatcttcaatgatattgatgaatcttttaaatcattttcttttcttttcttttctttcatattgccattcctttaaccatatatgcaatttgccttattggtgtcaaagcatttaagacaaaacaaaaaacaaaacatgttttttc

SEQ ID NO: 55767 - DNA, 1647 bp, Arabidopsis thaliana landsberg
ctgagtttttctttattgtttttgcttcatttattaatcaacttcttatgtagtttgaaatttttagctgcatgtgattagccatgcaaatgtgttacagttagggcaggcgtggttacagccgggaacaaatatatgaaactttgttctgttcatttttgtaaatgggcttagtcattatatgttaggagccttcactaactactggagcatctttgatttacttgtgtctccaacaacggcaattatatacttgaatatataagctaattaaacttcttctccagaattattccggaggttctagcgaatattttatcagactcgctgaggaaggagaaagtgttatcaaaaagggatgcttcggacgtccttagggacgtgtttgctaaaacagaagctcgcctcgaagaacaccaatatgaggtatttcagtttgtccttttcttttcctttgatggcatgtttgccttcttgacgacttggctggaactttttcattgcttcctacttaatgaattagttgatcgatgcagggttgtacagctactgttctcttggtttggaaagacaatgaagaaaacttcttcgcacaatgtgccaatcttggggattcagcatgtgttatccagtacgtaaaaaatattatattgctattcttgagattcgtagttgctgagcttgcattaaccagacttgtagcagcatttcttggtgtagaaagagggaggggacttgattactcagattagaaacaaagatcttgcgtgtttaaagcgtgagtgagtgtggtcttcttaatgaaaacctcttggtttggaaacagtagattattactaatataggctttatagtagagtaaatagacatcaatagatgagattgtttcacgttggagtagaatttttttggataagaaaaagaatatttgaatgtcgttgctttgctctgtggaaatagaaagagagtttatccctacatcttccttgataccgatcttaattaataataaaaaattcggatagttgttttgctcttaggaattaatggtctcggcattataatagtaacttggcctttcttaactgattacgatttggtttgcatttggcagtcttgatggcagatatatacaaatgactgaagatcatcgagtggttagcttgagcgagagaaaacgattccaagaagcaggactagccttgagagatggagagactcggctttttggtattagctcaatgaattaaacacgcacaggtgattgcgacttctttgtaacaaaatgaccaaatctgatgtgataattttcttcaggtataaaccttgcgaggatgcttggagacaaattttcaaagcagcaagacagccgtttcagtgcagagccatatataagtgagcctttgcgtatcgatcaatctagtaaagacgtctttgctgtattggctaggtaaaaaaaatgcataaacataataagcttttcccgttttctcattcttgttcgctaattttgaaaaccgaatactgcagtgacgggttatgtggacgtggttaagtccgaaaaaagctgtgcagctggcacttcaagtaaaatcaatttcttaatcgttgagacctttgctatgtttgaaaatgtagatctcatgt

SEQ ID NO: 55768 - DNA, 508 bp, Arabidopsis thaliana landsberg
gacgggtttaagtagtactgtaaacgaatcgaaatcaggtaatgtgtttcggttatcgagctcggttaacgaatcagcggttttgatgagtttgaaatctgatgacgatgagtttagctcttctcgttgtgattcttttagtccaagtgagagtgtagatagagttgtgaatgagagtttgtgcaaagaggaaggagaagtagatagtggtatggttttgaggaatttgggttttgttgatgatggggattttagctctaggctttgatctttatcatcatctcctgtatcggataacagcgggaaggaacatggtgaacctaagtcgttaccagacccaatggttgctgacgaggaacgggaagtacgtgctattatgaagagggttgaggagaaatggttgactctgctgtacaatgtgcagaacaagcgaagtgcgggaggagatgatcatggcggtgaacttgcggtttgcgggagtaggattgatagagtgaacgtgaaagag

SEQ ID NO: 55769 - DNA, 497 bp, Arabidopsis thaliana landsberg
ttgttgctgttgttgtctcttgggttcttcgttttctggctctatacatcataaatctccacatgtaagaaaaattaatacttttgaaagaaaaataacctttttattcatcacgaaatctgcatgtgtttttttttttcttttttttgattgatggagctttggtttctggttttaatggcttcgattttgcaaaacgaaaaaaaaaactcaattttttcgattcagattttgatcgggatctatgtttgttcgattgattataatttctaggtttatttttgtaaattccatttttcaatgttcttatcttcttcctctgattattttactaattttctcgggaaaattaattttgaaaattttctcggtttggtttttttctccaggcagctttgagaattgaggacgaaaggagaaatggaatcactaattgaagaagaagaagagtctcgatttttcgatgctcacgaagaaatcgcatcttgttcaagtcc

SEQ ID NO: 55770 - DNA, 846 bp, Arabidopsis thaliana landsberg
tagatcttttccgtcctgatacgataaattataacaatactctgttaacacgaatcaatgttataagcataggacatttacaagattatgatagaagccatgactaaaatacttgtttcccagaggcacgagacatctgttcatgttctcgcagggcttcttcaactctttgtacagctgctcttgcactttcaatctcagcacgtgcaaacgctctttcctcgtcgacaagtttcttagcatcctctgaggcctagttaaaaaatcatacccactaatcagcaagattattagaacacatctgcatctttttcaagctagcccatctagtaaccactaatttacaaccgacaacagaagactaatacaaatgtcccaagcaagataagaaaaagaatcaagaatagtaagtgaaagattatgtctgtaaagaaactacatcatagttctttgtcaaaagtaatagaatataaactactcaaatgaaaacaaaaaggacagactctctcttaatcatctggttagctcaaggactaacaaaaactgcatggtattaagccgtggacgaaaacgtatttgctattttagaggacttggttgtttcaagtgaaatgacatagacgtctcctaactattcacctcaagtgacacgagaaaagaaaatattgtcactgtctcaaaggcacactttacctgctttaaaaaagacgctagctttttcacttccgctttttctatgaatagctctccttctcgctgagtcaactgaacagctagagcttcaacctagcagaatttaaaattccaaacatacttaagatatagaggtggaagggaaaaatgttg

SEQ ID NO: 55771 - DNA, 382 bp, Arabidopsis thaliana landsberg
gagaaaggaggataactgcacttaagaatcgaaaatatatgtgactatagataacggtcaccagggatcttgaattttttcagatcagggggggttgcgacatggacatcatgagcttgaggccaaaattgctgctacatggcatgagacatggaacattgattatcatgatggcgaagcatgggtagataattaatcactctcacgtactctaattctaagtcactgcagaaagctctccactgatgtaaaacgtaaactaatattcatactaccagctaatgtaagacttggaccgatattgtgcacccaatatgctatgtcatagaatgccaatcgctgaacacaaacagctgaaccatctgtcctcaacggcacatat

SEQ ID NO: 55772 - DNA, 622 bp, Arabidopsis thaliana landsberg
tatgctctgggtgttttgtttatatgattgatttgtttccaccattttaatgtcagatgctgacttgtattggctggctatattcttcaggtgtaactccagagaaattacaagaaggtcttaacccaagacattgtgcgttatcacttgttggtgagccgattatgtatccggagatcaatgcccttgtagatgagctacatggaaggcgtatttctacgtttttggttacaaatgcacaattccccgaaaagattttgatgatgaagcctatcacccaggtatgtggtgtctgttttgtagctttaaaagttcactaaacggaaccaaatttgcctaattcatttctttgatatctacagttgtacgtaagtgtagatgctgccaccaaagagagcttgaaggccattgatagacctctctttgctgacttttgggaacggttcattgtgagtattttaaataacctcctcctctatgtaatgggaatttgaaatgaaatgtgaatgaagaccataataatctcggaccatttggtcccaggactccttgaaagctctccaagagaagcagcagcgaaccgtctaccgtttaacacttgtcaaaggatggacacagagga

SEQ ID NO: 55773 - DNA, 176 bp, Arabidopsis thaliana landsberg
aagccgtagcaatgcttgcaagaagaatctaccatcggtccggagaacgcgctgccttcgacgcgaaaagagccaaacctatatatttacaagccgccgatcgaaagcaacacaatctcgatcaacgacacaagtcaaacaaaaactgaaaccagaacagaagaccaaagaaacag

SEQ ID NO: 55774 - DNA, 1132 bp, Arabidopsis thaliana landsberg
agcataaagaaacatcaatcatggagtactacacatttaccgaaaacgacgaagaacgtgtatcgagaaatcatcacgtgaagaacacgtgggtgaaagaacgttacgagagcgatgaagaagatggagaggtgaacaaactcatcctaaaggaagatgaagaaactaaagatatggtgacatcaccgagtggtgagaggatgatgttaacaagtaaggtgaggtatctaacctatggagctctcaaacatgacacggcggcttcggcagcttccggtggtggaggaagagccttgcctcatccgtcgaacaagtacaaccgtggccaccccaagtactacagatgcagaggttgaagtgaaaactctctgctgataaaataatttcgaattaattgtaataaccctatattgtataataagtttgttgagtatgtatactccatgcaacgtgtgttatctatgtgcttgcaattcctattcttatatatatctaggactaattagagaaacaaaaaattatggaactgaccatgatgatcatcgagtattgtttattttagtaatctggtcagttagtctgattttcagattaattattgtcgtaccaacacacgacataagttatcttggctccgattaatatgttgcaaaattacgaaaatgttttaaaaaatttttttgtgaaagtttacaaatcataattttatagaaaaccatgatctatattcttactaaacgtttttgttctagctatttggttacttgatccgaatttgagggtaacaactacgtcatcaatagaaatctacgttttcgttctagctatttgcgtaattttttgattccacaaaattttactaatcaaaattttgacgtaatcacatttaatattctatcattttgtaatgaccaaaataaataaaactataatcaagtggtggtgatttaatggttgaaagattcactactctgattttttttttcttttatcggtgcggagttcgaaccttcacaaaaaaattatggatcttgagaaatttgtctggatttattcatggaattatttaggttagatataacaattaaacacatgaaattatatcaatttatgaggtctcaagtaaatcatt

SEQ ID NO: 55775 - DNA, 1500 bp, Arabidopsis thaliana landsberg
ttattttgtcactttcgatctggtcgcttcgatgggatctacatgccttacactgatgtaccaatatcaaaaaacattcaatgttcttacgtcatacgtgcattactatatactatacagtatacactattttatgactaagatttgcgatgctgataactttgagaacaacaggatgcaaaatttaaagtgaaattacgtacaattgttacatcttttccatagcaaagttataaggacatattctagaaaattgttgaataacaattataaaatgataattgtgataattctttgtaaaactgatgtatttaaatatgtcaaataattcatcatcaaaagttgcatgtattattacgataccgacatataccgtgagtacaaacatcataaagaagattgaacaataaaataagaaggagaaacgtcgagaagctttgcgacttaaggctaaatccttcctaatcatgaacatattttatgtaaacgacaaaacttaatttataatctttgttcattttgttatcaagaagaaagaaaatgttcttcgaaagtaggcttaaaagcataatgcgtaacaaagcacgttcatgatttcataatttcaaaatttccgcttatcatcatatccttttcacgaagcttacgccactagtgtgacctttatttgccttcaacacctctttattttttttggcggcccttcaatatatcttttatttttctagttttcaattttcatgacaaaatcttcttcctttattcctctatcaatgtgaacacacgttcacacacttggatttaaaaacatttttataaccccggactagatctctacacatccgatgtatacgaatctaatttagtgattttctaaattttaaactatggtaagtgttatcttctatgacttgattgccttgaagatcagaattagggaaactagaaataaaaatcgatgaaaaaagaatctttggagacagaaacgacatactaataacaaccattgtagaaacaacagtaatagaagatcatcagaacgagaccaaacccgttttgttcccctacagacccctcttcacatgcagcaaatgacagagtaacatccgattagaaaacttcccaaagctcgaaattcggctgcatttaactctcagtgattaagggtatgtcaacaggcttggagtcctctgctttttcatgttccttattcaacaactgaaacatagcatccacagattaacaaaacaaattttgcatagagcaaattcaaatcaatcacctactagagagaaagagagagatgatggtctatcttaccttgttgttgatcaaactgtggagggcgattacacttcggataagcgaagaaaggtagattacgagcatcatgtcatttgtttttactgtacaaaatgaataaagttaggaaaaaaaaagagttcaaatgagagaaaccctgtgcgaacataaaactttaaggaagaaaaagcaaacctg

SEQ ID NO: 55776 - DNA, 99 bp, Arabidopsis thaliana landsberg
ttttaatggttgactgcttacaacccgcgcttaatatcgcatttgaataacatcacgtgcgtaagttaagtagtgttatctaatgtcataaaccatatg

SEQ ID NO: 55777 - DNA, 827 bp, Arabidopsis thaliana landsberg
  unsure (1)..(827): unsure at all n locations
ctcaggcgatgattacgtgttgtaaacaggttacatgaagattagacagagccaaaccattgccgggaagggggagtcaagtgggccttggggtttccaaggtgcgaatgatgacagtccaaggataaccgcaaaatttgttgctccgtgctattctatgaacaagtgagtgttgagtttgctcactatacataataaatggttagcatacagttgcatagaatgaaattgtgtatccttgtctacagaattgagttagatgcgaaactaccaatcgtcggtaatcaaaaatgggtcatttggatttgctcattcaatataccaatggctccaggaaagacccgttccatcgtttgcagcgcccgtaacttctttcagttctctgtaccaggaccagcttggtggcaggtaaaacaaactttgattccatctctaatccgattttactacgtaaattcttctgaagctgttccttgttaggttgtaccaagatggtatgaacactggacttcgaacttagtctatgacggagacatgatcgtacttcaaggnnnnnnnnnnnnnnnnnnngctaaatcaatggagtcaccagactacgacgtgaacaaacagtacacaaagctcacattcactccaacccaggcagaccgttttgttctagcattcagaaactggctcagacggcatggtaagagtcagcctgaatggttcggcttcaccccgtctaaccaacctcttccttcactgtcttaaccaagcgtcaggtgagccatcaatcatgcatcctaacatcatttgattgatctctatatatatacaaacacatg

SEQ ID NO: 55778 - DNA, 1099 bp, Arabidopsis thaliana landsberg
ctctttacactagtgcttgttctgtatttgcaagttatgtcatttttaaccatgctaatgtactgcaggtaagtgttattgtaaatgtatactggaaggaactgggacttctcgtgtttgtctggattgtgttcctggcgctgcagatatccaaggatatttagtggtctttatcaaccaattcacatatatattgttcatgtgcaaactttgctgatatttttcattttctactatggaaacagcaaaatctggctaactgttcagtagcatattgggtcatcaatctgttacaggtatggagtcactaacattttcttgtacactgctttcagatacttacgctttcctacactcatgcagattccggttgcagttggtgtatcaggctatgaagcagtagctttgtaccagggtagaagaatcgttgcgtctaaggcacaaggagactcgaatttcaccgttggtcagcttgttatgtattgtacatttggcataatagcaggcatagtcggtggtttacttggtttaggcggaggtttcatcatgggtccattgttcttggagctcggtgtcccaccacaggtgtgaatgaatttattacaacattataatttagaatcacttgttcttgtacaacagttgtgtttttttttgtgtgtaggtctcaagtgccacagccacttttgcaatgactttctcatcatccatgtctgttgtagaatactatcttctcaaacgattccctgttccatatggtgagttctgtgtcattcattctattcaataaggccacggagtccattaaagtttcacgatatcctcactatttgtttacgtttgtgcagctttgtaccttgtgggagtggcaacaattgcagcttgggttggacagcatgtagtcagaaggctaatcgcagccatcggccgcgcatctctcatcatcttcatcctcgcgtccatgatctttatcagtgcgatatcgcttggtacattatctccctctcacccaacactattttcgcacccacggtcgggtttttatcacaatatgtaatgttgttatcgttgtttctttttgttcgtaagtggcgtggga

SEQ ID NO: 55779 - DNA, 329 bp, Arabidopsis thaliana landsberg
taaaggccctcactctctttacccgtatggccgacatcgttcaccggatagggtatctacatagacagatcgtctaaacgttcaccggaggtgaatacaaagacagaaaattaaacatgcctagttttgttgagtcttggagtactccaggtagatgttggtcataactttgccactgagcaaactgacataaaaagaatttttgagccgcatatgatactaacactgtgtatatatcgtctcgctgcttgaccacttgcttagaaactgagtaagggacaattatatccttattgcaatttccacaatgttattctttttttccttct

SEQ ID NO: 55780 - DNA, 455 bp, Arabidopsis thaliana landsberg
  unsure (1)..(455): unsure at all n locations
tgnnnnnnnnnnnnnnnnnnnnnnnnnnnnnnnnnnnnnnnnnnnnnnnnnnnnnnnnnnnnnnnnnnnnnnnnnnnnnnnnnnnnnnnnnnnnnnnnnnnnnnnnnnnnnnnnnnnnnnnnnnncactccgttcgcgatgcagttnnnnnnnnnnnnnnnnnnnnnnnnnnnnnnnnnnnnnnnnnnnnnnnnnnnnnnnnnnnnnnnnnnnnnnnnnnnnnnnnnnnnnnnnnnnnnnnnnnnnnnnagttgggcgttcaggaccttcacactcccacgtgagggcggagtattgagataatatcatatactcttatgctatggtgagataatcgtggaaagtcgaccgtttagagagttgagcttagcatatacggtgacgcacaggcgtgaagactcaagtgcaagagcgaataaagccaacactcatacgtactagaagtgtccccgttg

SEQ ID NO: 55781 - DNA, 300 bp, Arabidopsis thaliana landsberg
ttttaatggtatgactgcttacaagcccgcttaattccattgaaaactcagtggtagttagtagtttactaatgataaaccattgttctcgtgacgctaacaaaaaatcgacggattacaaagttgaatttttcatcggtaatccataaaggattcagtaaactaccgtgatatatagccttatgtggtatgattgggcactaacctgttcagttccagtagcgcaggttccgaatataaggattctagcttgacctatctgactcaacaacgcaaaaattcatgtctttgaaacacggt

SEQ ID NO: 55782 - DNA, 1552 bp, Arabidopsis thaliana landsberg
gctgtcaggtttttgaaagtaacggcatatgttaacaacttgtgaactgagtattcagatctgtgttcgatgtgacgaaaggaaatttcattacggtagtgaggagggtacaaccatttgctggaaggtttgttttgttaaaaattatgtggagagattctcatatgttcttctatcttcttcttgttaatctttcatgtttgtagctgatgggaagtgtttttccatgtcattctttcgctcagagacgcttctcgtgcatttgtttctggcaactttacaggtacgaatcgtttgctgcatcctaatcaccatgcctgtttgatccagataaatttgtggaaaattttgtagtatattatggtctttgcttctgttagtacttatggacattggcatgacatcctcgaaaaaaatgagatttcattctcttttcttgctaatgttatgaggaaattttctgtgttcctcccattacacatctttgaatcctcataaacaacattagtcatgcgtgaagaagtcagaattatccaaactttgttagttatttggagaatattatacatcaagtccctgaaatctgtggaaacttctcatttgtgtgctatgattattttcttgtacaggagatggacttacagattcgttacaagggttatctagcagtgaggtaatgtttttttagctccatatatctcatcaatgaaattatagaaacgtctaaagtagtctttgatcttgccattgtgccagatgtgcttatttcttcataactattactttctaagatattgaagtagcatatagtttgttaactgtttgatattctataactccgattatgtttagttacatgtttgatatggcttgacaaagatttcttgtccgcaggtgaagagcattgttgactggcgaggtttctactccaggacctacacgtaagttattacttttatgtttaattcacacaatagaaagctgatgcatagttaaactaagaaggtggtgtatggataatacattgctcaccttaatccttgtattatatggccctcttggtttggttctcagcttctaatttgtgatcaacagtcctgttgggaagcttgttgggcggtactacgatagccaagggaatccaactaaacaccttaaaggagctgaagcaaaagcctccagaggtgcacaactcatggagaaacagaatactgaataagccaagcaatcgaattgcaactcacgatggagtcaagatgaaggtggagaggtagaaactcttgttatcttctatcaatccggtttataggggagagaactataacgtattagtgaatccttgatgggactaaaagcataagctattatgcaggtttggcgtgatgttggagtgccaagactggtacaaagacctttggagatagcaataactggctcgatgagcaaacgctgtgcttgctttgaggaagaccaacttgatcagtctggcttggagatctataaagactgtgaaccttttgccaagacttgcagggtttgaatatgattcacg

SEQ ID NO: 55783 - DNA, 562 bp, Arabidopsis thaliana landsberg
ggccgcattcctctcccgacgctgttcgagccgatcgagctgtcagaatccgagccggacgcacactgacgttattaggacggcggtgatggtcgcaaggagtccgttcggcgtgacggtcacacccgggctaccctgcgtaccatccgttgcacggtgtccgtcgccagcccggtcagatgatcggtcatgaagtcgcgcacgcggtccacggtggacggtccgttatccgcatgctcctcgttctactcagcgtccgcgcggtgggcgaaacgggagcggtggcgcatcccgtcgcggaggtgatcgatctcttgctcctgctcccgcgcgatcttcaggagccggcgggcgcgcccctcccagatctacgactgatcgtcctcatgatgatggtgacggtgaccgtgcttcgtctcctcctactcatcgtcctcattcccaccgacggtgatgaggccgatgagcagacctgccccgaacgccgagcccaggatctggaccggtcgttcgcgaacggctctcagtacgtagagcttctgctcgatgcgccccttcttac

SEQ ID NO: 55784 - DNA, 1515 bp, Arabidopsis thaliana landsberg
ttcctaactcctcatcctcactcctctatacgacgtcggattcttgttatcatcacttacgttgttcttccgccgtttccctccggcgtcattgtcttgcactaacgatcttttggaggtagaccaagagtctgacgaagacgttacgacggaggaggaggatatcgtggctgttataacggaaacattattgtcttgatgatgagtagcactactctctatgttgatttgttttcccatttgagagagagagagtagtgtgttaaagctgtaggttgctgtctgaagtgggctgctataaatattcttgcaagttactttagtctaaagaaaaaggaaacattagagagtaatactatatagacagaaaaaaaaccactataataatttggttatacatagtgggtccgttgtcaatcgagtgtaacttacccccatgtgaaattaaatgataataacgtgtttcaatatattatataagtaaaataatattcttatatacgcaaacaaagaaaacggggaaaggggacaaataatcgaataacaatttagatgcattcgttgaaatgggatgttatttgactatctcgtgttatatatggacgaatccttgtgcatgtatcatgtatgtacgccactccataaaccataatccatcaactctgctcgagattgcgtgacgtcataattatcaataattagcaaaaaaagaaatctctattgtacataaaagttttgtgtcggcccactttgatttgtaatatattgacaatctaattaatttggacgtaagaattacacaaaattggtgttaataaagaagaagaaagaatataaaatatactactaactcagtaatttttttcttcttatgaagacgcatgggtctggattgttttattcgattcggcgccattataactaagaagcacttttatttgattagtgatgaaatttgaattactaatcaaccagattttcctacaaaaatcattgaatagtgtatatattctattatcattgttgctatttttctggtttggtcgataggctttccttgtgctgaaaggctttcccacagccatgctgagcttggagtggttagtagcaaccctgatgcgtgttgaggctgtgctaagaggacactgtaagtctgtgttctcaaaaacttaatggactccacaatggccgctgagagacgttttgatgaaaggttggtcaaatattgtggcggatgacgtacaatgaggtagggttggacctccgatacgatcgattgggcctcctatgagctcaatcttgtttaactgagattaaattttatataataacggtgtgaattctctgttatatgatgttgggcctcctatggattctgatatcatgttgagtgatgacaaatatagaaaaacctcgccttgatatatttattaattatggtcctaaagcccgaaaatgggcccattaaaccagcaacgatcgtaaacacgaataaaggaatttcggaatcggaat

SEQ ID NO: 55785 - DNA, 459 bp, Arabidopsis thaliana landsberg
agcgccgcgctggagctcagctccgcaacctccagcgtgcgcacgcgtttggaggcgtccacggaccgtccagccgcgcctcgcaggcccgccgcatgaacggcacgtcgtacttgtcggtcgcaacgaggagcgcgtgcagctgccgctcctctgggaccggctggaccgagaggcccgcgccgtcgccgccagccgcgcctcgcaggcccgccgcaggaacggcacgtcgtacttgtcggccgcaacgaggagcgcgtgcagctgtcgctcctccgggaccggctggaccgagaggcccgcgccgccgccgccgtcctcctccagcgcgccggtgtagaggaaggcgaggaatagggcgagctcgtcattggagagctccgggagagagatggcgtcgcgaccggggccttgcagcaagggatgtaaaatggttcgaaaaaatagatgtaaaatggg

SEQ ID NO: 55786 - DNA, 555 bp, Arabidopsis thaliana landsberg
  unsure (1)..(555): unsure at all n locations
tgaacactnnnnnnnnnnnnnnnnnnnnnnnnnnnnnnnnnnnnnnnnnnnnnnnnnnnnnnnnnnnnnnnnnnnnnnnnnnnnnnnnnnnnnnnnnnnnnnnnnnnnnnnnnnnnnnnnnnnnnnnnnnnnnnnnnnnnnnnnnnnnnnnnnnnnnnnnnnnnnnnnnnnnnnnnnnnnnnnnnnnnnnnnnnnnnnnnnnnnnnnnnnnnnnnnnnnnnnnnnnnnnnnnnnnnnnnnnnnnnnnnnnnnnnnnnnnnnnnnnnnnnnnnnnnnnnnnnnnnnnnnnnnnnnnnnnnnnnnnnnnnnnnnnnnnnnnnnnnnnnnnnnnnnnnnnnnnnnnnnnnnnnnnnnnnnnnnnnnnnnnnnntatctacagggattaacagatccattgtcattaccagcctttttgaactcatttcccttggaagtgctctggtaaccttgtcttggtggtggagtgtatgacgaagttgctatagctctgggtggtgctcgaatctggtagcttggagtgtcattctcttgagcctcgataagcttagcaaagtc

SEQ ID NO: 55787 - DNA, 598 bp, Arabidopsis thaliana landsberg
  unsure (1)..(598): unsure at all n locations
cgatcgcgcatgtgaaggaataatttgctctaggtttcttttatttaaaggaaatgatgaaccatggttatataggtcaatccattcatctttttttttgcatcatgaatcggcatcatcatataaatttgattcgttaaaggacttacacgtttatcttcttaccaattcaaaatacataattannnnnnnnnnnnnnnnnnnnnnnnnnnnnnnnnnnnnncagaaatcatggaatcaaatatagaagaagtatagaacatctatttgaaaaatgtatttaataccctgcactccttacccgtggagtaccttgccgaatactatcattaaatggcttgtatggaactactaagacaagatctggctagaagaaacaaactgagccttgcatctactccgactgcatattgatctgaccgcctagtgtgctagcaaatgagatacttacattcctatagcgtgatagcaacttttgagatttttcttttattgcaaagtactagctcttctacatcaaaaaaccatgtttagaatccttatgatactaccctggaccagtatgccacaaatgttaaagtctagtttatcttttcct

SEQ ID NO: 55788 - DNA, 1255 bp, Arabidopsis thaliana landsberg
ctcttactaatgttctcaagtctcactcccgacgaaatcgtttactctccattgtttgattgcttactgatcagcttgggatcggtagataagagtgattcgagctctgaattggagctggttgcggaaacgtgagctctaatattggggaatactcgtctagggttagaaacagaggagagtttgaaggtgaaaagtgtagggcaagtaatagtattagtgaagaagaaggtcgaacgaaggtttaagctatggagattcgtcgttaataccattgttggtataaaatgttagacatcaaacgattaaaacgaagctattttgattgttaaagaaaatgtaggttttgattgttaactctcgaggcttctatagcgtgtgagcgaagaagtgtcacgaacacacacgtatgcatgtgaagctcaaggctcataaattgccacgtgtcaaaccgcataaccactatttttctagattaccacgtcaccggattgacaaatcgggcactagtctcacccgtttgtgcacattactttggtttctaggttattattcgtgcattaatcattcaccgatagcaaataaggaaaacaaaacactaggtttatcaatatagtcacacacattcctaaattatattaagtaattaaaaaagcgtcaaagtacagtacttatgtcgaaatcgtacaatatctaaggtaattaatctatgtcacgatcttaagaaagaactatcagtctaaatattatatttccctagttagaatgtctaaattaccttatataccgtttggcttaaaacaaatcaccttatatagtgcaagtgaatcactagaatcttctccgataatcacaaactcgaaaagaacaaataagctttccattatagattaggacattgaattagaacactaaagtaaaaggttagctataaatgcatacaatctatttaataatacattttaccgccttataaatgatgaattcccacatttctttattcttcttcgtccttcaagatttaacaaaacacacaacaacaaaaaaagacgatggtgaaactcatggggatggtatagcgtgaaagatcgtaattttgaggtaaatgtttcttctagtatatctcctctaattatgaaaataaatacattattcaacaatcactaactaaaagtgtaactttcacactttgtgcagagcatatttttcaagataatatacaaaaatgtatcaagaaactaagcaattttatcat

SEQ ID NO: 55789 - DNA, 1700 bp, Arabidopsis thaliana landsberg
tcttgaatgatgtaatcttggtaccaaaggtaatccataatttgattgtgtaattgtcttgtttttgtaggtgagaggacttgtgaagcaacacctggattctttcaactactttatcaatgtcgggattcataagattgttaaggcaaatagtcgtattacatccacagtggacccatcaatctacctaaggtcaaactttttttatcatctttttatctcaatttcttgacatatgtatattgatatactttgtttcataatcagtatgtagaaccattggtgttttgaagtctttttttaatcgtcctacaacattgatatataaattgagattgttctatttattggatttctgctgtttcctaaactaacctttcgtagccaaattttaatgcaggtttaagaaggtcagagttggtgaaccgtcaattataaacgttaatacggtggaaaatattaatccgcacatgtgccgattagcagacatgacgtaaagagttcttttatttacattttttttgttgttcgatgtttgagcatatgttgggcagttagaattcggtgatatcttttgcattttccacctgtttctgttgttctgcattcttccacatcatcaataactttcttttttctcttggctgtgttaaatgcctgaaaacttcttgttttaatcatcagatatgctgctccaatatttgtcaatatagaatatgttcacggaagtcatggaaacaaggcaaaaagtgcaaaggtaaatgggaaaaacaaaatgtataatacaaactgctggttattggaaaattcaggctgaatatgatgtttctttatttcaggataatgtaattatcggaaggatgcctattatgttgcggagttgccgctgtgtattacatggaaaagatgaagaggaacttgcaagattgggtttgtattgtactcttatttcaagcattacatcttcttgttcatcatatttattgtatttcatttggattctaggtgagtgccctcttgatcctggaggatacttcatcattaaaggaactgagaaggtgcttcatacttcgtatatacaatctactcacagcatcttatggagtccatagattgcctagtagtccccctttgacttagtggatacatgttctgtgttggtgcatatctttaattcagacttgatcgtatgtttatttaactgttaacaccgttctcgtcctaattggcgtgttttggtttttagtttcttatgtcaatagagttatccgatttttcatggaatcctttcctttttacgtgacctgaatccatgccattgcgtgtgttggtgtttgatgttcatttcaggtgttgttgatacaagaacaactttcgaagaacagaattattattgattctgataaaaaggggaagtaagtgatctcttacagtattttggtccctgtagtattattgagcaagcatccccatatacattaattgtcaagccaaatcattgtatcatgctccagcagtgttcttccgttatttacccacccactatccaattatcaattttactatttagtgactctctttcttttactacgtattttcagcatcaatgcatccgtcacccgcacccccgaaatgacaaaaagcaaaacaaatattaaaatggaaaaggagaagatatatctatttcttcctcggtttgt

SEQ ID NO: 55790 - DNA, 407 bp, Arabidopsis thaliana landsberg
tgtcccgatggctctcatctctctccggcacctccgcccgcttcgccctcgcgtcgctggtcccccgggccatggtctacgcggcgtcggcggcgtccggggccatgaggctcgcggcggatggctctttcgcgtgcagaggccataggaggccgggcgcgtccgcgtacgccgctgccgaggactcgtatggcgcccgatcccggcacgggccactaccgctccgccaacttgggcgccgccgtcgaccccgtctgatttcgtgcggctcacctctgccgctgcgacggtttggtttgtgcggccccggctcccttcgacgctcgccgtctcgtctcgtatgacactggctctcggtgcgttccatacgtgagacgagtctgatttgccggggttccgtgtgcgta

SEQ ID NO: 55791 - DNA, 999 bp, Arabidopsis thaliana landsberg
aagctgatgattttggcagctttatttcaagtcgacggatgttaatacgatacattggccaaacgctgggatcatggcagcctttaagcaactgatatccttctcgctcctaatggatatctgctctctctgggctccatctcagaactcgactaggtaatgccgtctccaagaagaacattcgaaaatgcgatatgatatttgatgttcgtcagttgttatcaatagtcattgagcctagcacggcgtctaattgtttgtggcgttcttattttcggataggtacgcattctctggatcttctggagatacaagcgcagagtttgagaaggacgattacacgctaaccctcattaaaccatctccaattccttctcatgaagtcaagaacctctcagaaaccagacttttaccagctgatgaaggagaaccagaaaaagatttggaggaagacaaaagggagtaaagaagtgaagacaaaactcacaatcatgacttgataatcctttctctatatcaacacctttaaattttactacatgtattcttttaggtcacgtaagtttagttttgtacaatacaaaggtcaagagaccatatatcagcctttctctttggtgttgtagtgttagttggggttagtttgtgtggctatgtttttgtcacgatgtaatctttaaatttttcattttcctaagttgaattatagattaaagttttgtttcttgtaacatatgctttggtctataacaagggtggagaaagcaaaaaccaaaacgaaacacagcaaataagcgtacaaacggctttgagtctttgacattgacacaaaacaactttcatcatatgaacaaatgaacaagaaggatataagctaagaatttggcaagtaaccaaacagatatattataagttcatacaacattacagctcatgaatctgaaaacttaaaattcaaagtactatcatcaatccttcgttctttcttgctcgattttt

SEQ ID NO: 55792 - DNA, 593 bp, Arabidopsis thaliana landsberg
tcgctcggttgatccggttcagatggatccgaagaatcgcaaccctaactgggaccggtgggggccgaaggatgctccgcagggttcccagtcttggggaaaaaatcggagtctcagctggcggttgaagactggatctggaaagccttgatggcacaggatgacatcccataccggctggcttcaatctgcaaggcgggcagccagtgtatcctcaaaacccctccgcctcccattctgaaagttgagaatgaattggtgcgtagggttttctgccaaaaatgtggtatggatggccatcatgctagggagtgtttcaaatctttgtggtgtgagatttgtcgcaaggaaacacacaataccgctcggtgcgttctccccaaacggaacaaacctagcatgcctattgttgggatggtggctgatgggttagggttttactcttctcatttcaccaagccgttatcaaacaaaccgaggcacagttctattggcttggttaaaatcgttgagggtttgatctcggccgaggatcttgagaaggatttcggttttcatttcacctggggccgtacttggaaagctaccaagtg

SEQ ID NO: 55793 - DNA, 1394 bp, Arabidopsis thaliana landsberg
acggagaatcctcccagagatgtgaaggaactaaaggtgtaaactcatattttttcaggagttttttcttggggactacatcagcggggccataatttttgactactgttactttgcaggaggagcttggaattgaatacgatgaagatgtcggtctaagtttccaggcatatgctgacctaattcaacatggtaaaaagaggcctcgaggacagtaattttcaggtaagttcttcgaatttgattcaaagttttctagaaacgtttcttgtataaacacacacatatgcaactgtacaacatcattgaaagcttatatccataaagaacacaataatcttacatctttgaccacaaaaagaacatagaaaagtacaaaactgagtgattacaccgtagatgcacctgaaaaacttataacatttgtacttagtatccacgaacctgtcttgtcctgactgaaactggacccttcaaacctgctttacgcataataggatcttcaatagaacgaaccatgtggtccacatgtcttgtatccgctctattcgaaccaaccatacgattttgctcatctttagacttactaatagtaatagtctcaacactagattgggtttcttcttcactatcgtagataatagtatccttctccaatagcttcacagggtcttctctgaatgacatcactgggacatcaataatatcttctgaatctgacatcgaccttttagattctgacatcacatccccttccccttctgaagaatcatcattaccttcttgttcttgttctgactctttgttttcagaaccatgaaatgaattttccccaccaatgttacccggactgtcatgtccacgaggagaaaactgagaaagctccacagccgcttgtgcagcctctgctgcatgagctgctgactcaaacgctgcttgtgcagcatcagccacatctttgtacttcttctttcctctcttgaccgaatcagataaaccataaccttctcctctgccatctttacttgttagcttagtcttactaacatctgatgttccctgcatatttgttgttccctgcaaatgttacaaatttgattagaacatgattttttcaactttttgttatcttggtggttaattgcagatttctatacctcagtggacgtagaagcttggtctagtttcagaacaatgttattctctgcagcaatctccttcaaagccttcattctaacttctttcggtggaggtcttgtcgacaacttctgaattatctatagtaacaccaaaagaaacatggaactcagtaagtattttgttctatcaagagagatatataacataacgtattgaatatagtatttgttgaatcgagaacttgcttactttgg

SEQ ID NO: 55794 - DNA, 1373 bp, Arabidopsis thaliana landsberg
aggacaaaacccataagaaagaaatgaattttcaagctgaatgatgattataaatgtttttatgggtcttaattttagttcatttcgaatacaaatcggtcttatttctcatttaatccagacaaggaaaaccatatatatatatatattggcgtaacacgtaaacaattaaaagttaaaaacacgttattttttggtccatatcgaagactttttacgtagggtcttagctaaaatagtgaaatttgcatattatttttttaagaaaatagagtatgaaatgttgttatcaaacggatcctttacaatgaatgcaatcatcgaaaaaaaaccataaaaatattcttaaaaaaattatacactatgaaaactgtgatgtctcatctctttcaagggtttaggcttaaaagcttcccttttcacttatacactgtcgttagttttaaatctcattacttatcatcaatctgttcaaaccctatctacttttaacatagaaaaagattcctttccttccctctctacccttctctctccatgcatctcttacactatttacacatcaacaatttgttaagtagcaattgaataagagagagagagatatagggagagagattgtgtgtagaactgcaagttaataaaagaatgtgggggtaaagagtacacagtagatgaagacaatgagacttagttttcaaacttcttctttgctttggcttttattggtcatatcagactctttatttatagatgatctacttagctctctgtgttgattcttagctttcaaaggtagcttttggcctcaccctatatactctatacaggttactgcacatatacattggtatggacttgccactagtgccaaaccttttgcacattaattttcacatatatataagtagatttagatggtgtatatataagacaaaacaataactgaaaatcttaggaccaagaatgaaggcataaccaaagaaggggggaaccacattgtcagtttttatggagtttttgggggaccattagtttcgtttcactctttctctttcacttatttaagcttaactttgacaaatacgtacccccacctatattactacacgaaattacaatatatttatatataaaatctcatcaatttattttcaactacatttatgtttccatgtttataaaattcagtcaattaagacggtggtttaaatgttaaaggccacaagtagatttatgtgaatgttaaaaagtcccaagtttagaaattccgtcaaatataattaatccatgcagattttgatttaccatttattggtttacactagattttcaaaaggaatatttggtgcattcacacaaggctcaagatt

SEQ ID NO: 55795 - DNA, 1179 bp, Arabidopsis thaliana landsberg
gatacaatgagtcaatagtagccacgaagccagaaaaaaaaatgtactacaaaaagataatgatagtacaaaatgatacgtcgtactgccacatgtacgacacaactcgattaccaaaaagcagagccatccaaccataaaactcaaaacacacagattccactggcgtgtgctctcctcacttcactcgtccttgaaacttgaggtactgattctatctctcatccacatcttagttcatgttcgagtttctctggtctcttactctttcacctagaaatttgtttggtctcccaacaacataaacgcatgtatacattttcatgtgtctttgtaaggatattgattcatttttttgggcaaatagataatcaattcaatgctatgttttgtctgaaatgtgcagcttcaattacaaagaatggctgcttcaagtgctgtcaccgcaaactacgtcctcaagccacctccattcgcactggtactttcttatgataaagattgatattgtcggcaaatgtcattttgttttcgttggactatagattttgcttttgaattactagatgatataacttgttgctcccacaaagccctaaaaatatcttttcatcctcgtcaaaggcgttacaaatgattttcagctattattaacggaaaaccaataccaaaaaggcgttacaaatgaactcctctaattcatatttgaagaaaataaaaatcgaatcaatctacgcattagtgtttttcccggaaattaattgtaggaacgggtcaagttgggtggtccatattgggtaaaggccgtgaatgttctagttggtacgtactatccgacatttgtcaaatgggaaatttgggtatggccataggggttaggtatgggtcaacatatctgaaatgattttgaaaccatagctttcatagaacattgattcttaattgaccctcaattgaactagtgaaaatttgttgtttttgtatacaaaaactatctcaatctgacccgttactcaaactacactaaactgtccaaatcatattactttgtaagaaaattgttatgttgtgtaatgtcaatgttagattcataaatctttaactagtatatgaccactcctagttcaaattcagatgttccttggtctgatattttcgttccttctagtggacctattg

SEQ ID NO: 55796 - DNA, 508 bp, Arabidopsis thaliana landsberg
gtacccattcgccatctctagtagggagtaaggggaagcttgactgagacaaatgtagagatgggtgatgaaaactaacatcaagttctgcatattctgcgttggactgcgaaacacgcagacttttcgactgtgtacgcggactgttcgaccatgtaggcagacagtctgtatgtgtttgttagggtttgcatggaatacggtggccctggtgcggatttcggtggttcgggtcggaaaacgggaccggtcgccgctggtccggacacttcatgctcatgtgcggacggttcgaccacgcacagatcagtggatttacccccgatctgcataggaagctatgattattcacattaccccagatcatgcgtaggaagctgtggttgttcaggatatgtgttcatcgacatcccgtaaagtggttgtgattggttgtgctaatttgcagctgatgaaccatgtgtattttctttagtttgacctcatgcgaggaaaatttagacacaga

SEQ ID NO: 55797 - DNA, 466 bp, Arabidopsis thaliana landsberg
aatgtgaaggggttaaaaatgcacggtaaaacttatcaagtctttagcatacattaataacaagatagtttaacatacactggatgaagaatctgaaaagggtgagtttagctggcgttgactattagatgaagtttcagcgtccaaactatttccgcctagctggcaagagaaactctccactctatgatccacatctgttccttctatgtcgacttcgctattcaaaccaaacatcaatccatgggtatcgtgatctacatctgtttcctttgccaggtcttcagtttttaaacctaacatcaatccctgattaacgcgctctgcatctgctcattctaaatggccagcggttcccaaaccaaatgtgagaatcgttctggactccttagcttctgttaccaaaagccaatcatattcacattgatgatcgtcagactctacagcaagagcaggctctgcacaa

SEQ ID NO: 55798 - DNA, 438 bp, Arabidopsis thaliana landsberg
atggcctgtatccagcgcattcttatcttcccaaagccgagatgatcgtactgtgcacctatgatcactttgttggcggcatggttattaatataaccgatgatattgtgcgctgttctcctgctctcggaaaaatgtatgtccagctccacaggtatggaagccgcctcatcggaaaaatattttgcatagccttttttagtgaggaacagtacgggtattttcaccgcttcgctcctgtctttgctgttgaactgcacattatccaccaggtcggagctgttgtacaggaataaagcggtggcgccttcggaagctactttgcctgttattattttgatctcttcctccacatcaaaatgcgggatggtctagatctcttccagcacttctttcaggcctttgaaccagggctgtcctgtttcgctgaacgccatg

SEQ ID NO: 55799 - DNA, 325 bp, Arabidopsis thaliana landsberg
tgacatagaagattaggcctgtttaatcatattctcctgattaacgctacatatttgaggttgctgttatttactatggtctacagattgtcagtggattcctcagataccctatgttatttatctgtattagtgttctatctagcgtatctgggatagagttgtactaccattggtgttcgcgtttcttctagtaccaccggcttctgatgatatcgaatatgtatgcataaaactctttcactcatgagcaatacgtaatcctaactaggtaaatttgtaatttacgaatccagtgcgagaccgtatctgcactatctgtgaa

SEQ ID NO: 55800 - DNA, 378 bp, Arabidopsis thaliana landsberg
gacaggggagtaaggaaagagaagcttcggtcatctctctgtccttgggctacagcaaagaaggtcagggcaggacctgggagggcgggctgagaccatgcgcgagctggacctggctaagtagggccagaggagaggcgtgtggcccagcctggaccctggccaaggccgggcggaggcaagcgctggcagccgaggggttcgccctgcccagtccggaccggcgggaggtggagatgtggggtcgattgaccaaacaggagcgccctgcgccctgctcatgcgcccccgctggggcccgagggcgggcagagctgcggcagcggagcctgccattggcatggaagggcatgccggtggccagggagcatagagccg

SEQ ID NO: 55801 - DNA, 813 bp, Arabidopsis thaliana landsberg
tttccatctctaactcgtttaaatttcttaactttttttgttgaaattgtcttttttgcttgattccaaagtttttttttttttttttgtgttgcttaggattcaatttctgatatagccggggctttggtgtttattctagggagtaaaaacagagcagtggttggtttggcagccaatgtagttattaggttgattcgtattgttcctccttctatcttgcattcatattctttggatctcgtggagtctttatcacctctgttatgttgtcaacaattcgatgtttcgcttccctgtgccgttgctttgaacgctattcttgtgaacgtgagagaaactaaggaaaaagaagtgtggaagattttagaggatgagaaaactgtggtttctgttgttggtaatttgcagatcttttctgaggggagtatgtcagtggaatggtttcaagagatggctttgcttctgagtacaattatgttgaagtggcctcagtctaggtattctgtttggaacaaccctgccttgatgggtgtattggagagtgttagtcagaagcctgatatgggtttgacagttgcaactttgaagctctattcttctctaggtacatatatgcttatcaaacttagatattatgttctctactgagctgccaactaaattggccttaacttgtcccttgggtgtttctctgtttttctgttcagctctttgtggccatggtgccgatgagcttttagacaatgggaagcctatgttagatatgatgattagctgcatgaggagtcaagctctcaaaatgctcgaatt

SEQ ID NO: 55802 - DNA, 474 bp, Arabidopsis thaliana landsberg
tgatgaattggcggaacgccccttgcgagggcgttcgccgcggaagacatcgccgatcgcgtatcgcttgaagggataccggatctcgccgtggtgcttcgccacgtaccgcgcaagcggcatcgtgagatcgaaacgcaatgcgagttccttagagtccgattccgcctcggtcgcagggttcagaagccgcagaccatagatctgcttgttgatctgaccctcagtcttcaccatcagcaccttttcccgctcgacgagcggggtcacgagcggggcgtaccccgctcgctcgtagtgtttgcgaatgatgtcgagcatccttgcaagcgcgatcgcttcgcccggcttgaagtcatcgaagccggacgcattcttttcgatcagctgtttgaggttcttttcctacgtcatcgtggactccctatgcttcccgcatgtcctcatcgaagaggacatgtgctttcagatagt

SEQ ID NO: 55803 - DNA, 402 bp, Arabidopsis thaliana landsberg
tggcaggatttaccagcttgagattcacattttgagataagccatatgcgtatatgttcttatatgagttgcaaaagtgtgacatatacacaccgtcggtcatgtgaatcatgtacacacaatatctttctagggtgaacgaagtttgcattcatggatgtttgaggctaagaggcatttgcacgagttgatccggagcatcgactaatttcgtatgtctacctgaagccctaaagtagcattgctctgcattaactttctcagatttgatgccttgagttttgttttccttgacagaatcccgtgcagacttcatctaaatggcttataaacctgcacacttcgcttccttttgggatactagagcacatggcagggtcggcttccgcttcgagaattttc

SEQ ID NO: 55804 - DNA, 942 bp, Arabidopsis thaliana landsberg
aggagcaaatacccgcatatgcactcaatggaaacaactttcttaagaggttacttgcttaaaacgaacagaactatataatttggcactcttggtctggttcatgattcaaaggtgtagaactttcatcccaaacaggtttgatgtggaggttagatcagttgtctctcacttatttcacaactgggctaagaaacaagcattccaggaaccaaagaggctgattgacaaggtgagtatcgcatacgctgcaacatttctccatcaactaatgtaagcgccagtcaattttcttacttcttacttcttacctttcatgtcaatgttttcgtacatgcaggtacggtttgtgattggtgaacgtttggccatcaagaagaacaaacacaaggttgtacgtctatagtcttattcactataacaagttctgacagtagttttcttgtttggttacttattatgaagcttaatggtaaaagtctactgagccataccgagagttgaaatatgctttggtgactaactggatactgcactattttgttaggatgtcttacgagctctcaaatcatcattgacttctgaggaagcgttccaatatgcagaacatgtaagcaatattatctgaaaaacactgttacactaatgaattgataaaaaggaaaactgagacggtgctcatgttcctgtgtacttttggggatatcaggtacttaggtgggaacaactttctgcagacacacgggctcatatagtgcgtgaaaaacaggtaatacatatagctgttttgagaaagcaagaagttataggttaactcactccataacccttgggaaaaaaaaatctgtttcatgaacatttccaaaaactgagaattgaaaactcaatgggcacttccgaagcaacgagttaacaggtaaaaactcattaagcttttacatt

SEQ ID NO: 55805 - DNA, 1146 bp, Arabidopsis thaliana landsberg
atacatttcttggagatctgtgatttggcttgatcaaaatatattttgatccacctggattagttctggttgtgctgagattatgatataatgagcgattatttccatcttatttaaacacgaactcaaatctggttagtttggatctttttggcacggattttttgtttgacaacacgtaaatttcatcccagacagaactatttcaaggctaattaaattaaataaacaaaaaacaggatatttagaccatataaagacaatcgtatttgtccacgtgattttcaccaaataaaatcttgtgactaatccgtctatagtttaaaattttgtgtagtttgtattaattgagaccttaaaactctggcaaataaaacaataatcccaacacatatcgacgaaatctcctcattacgttataaatggcaattggggatgaaccaaccaaactacagtatatgaaccaaccaaactgatgaggatcatcaatagaaagcacagtactaatacatcttcttgttccgatgttacatgacatttcgaacttttatgatttcaatttttgaaacgtttgagtactaatacaaccaaactgaacaaggttcctacgacgattacgacattgtatcaggaaccagaaccaaaaccagaactaaagctaataaaattggtgaaaggatagtgtattcttaacttctttatttttccccaacatcgtaaaaatatttcaattgtagagtaagaaacacactactaatctaaagccaaacattagacttcaaccaaaactcagcaaatacatacccaaaggcgttaattgcagatctcacagcagatatttctcaacaactgtccggccaaacttctcctgaacatcctttggtgtttcgacctgacaaaaagaaaaagacattaataaggttttaactaaaattgatttgactttttgtcatcagctcagaacactcaccgcattcaaggccttcaacactgccttaacggtgttgtatgaattccttgaaccaatcacctgaaaattcggaccacaacaatacttttaactccagcggaaaacaagatccgatgttatatcaggatgaagcaaaaaatgcacctttgatttgatatttttgaaccctgctagga

SEQ ID NO: 55806 - DNA, 593 bp, Arabidopsis thaliana landsberg
  unsure (1)..(593): unsure at all n locations
tccccctgagatctacaattccaaatcgcctaactaattatcaaaaaaaaaatcaattatgtgacgagcgcaactgtttttttaagactgttttcataaacccaatattggataccgaagcccaatacctatccaagtgggtaggacagaattgtccaaactcataaggttcattgccaatttaaataaacaaaaaagcttcgactacttcggcttgattaatacttagaaaagaaaaaatactttgnnnnnnnnnnnnnnnnnnnnnnnnnnnnnnnngcatttcatatacaccctttctagaatttatagttaagataagggtccataaatttctttggctttaaggctttaaattatattagaccaacccttggctagctagaatggaactttagatacgtgaagttgatttatgacgatagaaggcttttgtttttatttttatccgcgaatttcgggctttgtacgtgtccatggactaaggaccagagtagggtaaattagccctcatcgaacgggagagctacgtttcaaacgcccttcagactgaccacaaacgaaagcacgcttgggttgaaggcttgatgaca

SEQ ID NO: 55807 - DNA, 323 bp, Arabidopsis thaliana landsberg
ctccattccgaatcaaagtatacatgcttcttcaaggagggagtgagttttcacttttcattactcagctcatttcacttgatgtttatgtttccattggtctaagttctttgggttttcttttgactagcgggcgttccgcacatcaactggttcggcgtcgcccgccccccccccccctccgctacccgccctccttgcccccctcctccccctcccccctcccccccccctccccccccccccctctccccttcctcacccctcccccccccccccccgctcctcctccccccactcccctcccccaccccccttcctcc

SEQ ID NO: 55808 - DNA, 512 bp, Arabidopsis thaliana landsberg
tatttgacatttgaccctcaacccagttgccactaatgcattcaggatttacagaggaaaccttagtcctgacttaatggactggggggagggggcacagccttgtgtctcccactttccttgcaaatcctgttatctcaatgaggccccaggtggcagtgaggggataacctagagtcattagaactcctccaggagcataaatgggggaaatggcatttaatttgctgctccttttatgttacaaaccttttttatttagaaatgtcagagaatggaggaagttcaagttaatgcagtaactgggctggggaaccatatcttcctagagttgggaaaaaacccaatttactcatggagaaatgaaggaagccataggaatgcacgtgctttgagagggatgctgggggcagggtagtttataagttggcagtggagcagacactaggtaaactgctggcaaaaactggcatagacacaagagtgtatcctgtataattccatttatatga

SEQ ID NO: 55809 - DNA, 1046 bp, Arabidopsis thaliana landsberg
aaaagacctccgccaaacaaaaatgtgacagtcgagaaaataaaatccaatgaggtcttttaatattaaatgtttttaggctttagctatgccgttactatattcacaaatcaaaattggtccaaaattttcatattatccttttaactttataatcttaactaatttaataaattactataaatattatttttcctaccctaaatatgtccccccttgctcacaaagtcaaaagactcattaatatttaacgtgaaacaaaattgaacctcattttaattggaaattcaaatattcctaaaatagtaaagaatttcaacttctcctccgaagttttggttaaacagttcatttcaagaaaaaataataaatgaaaatcaaccaaatatctcgtcgatcacttgttttctgttttgtttttctttcctctaatacagatttgatctttctttcaatgtcttccttctcttttgcattcctttgttgatctaaccaacaaacattggttttgtaaaaaaaaaatgggaagcgaaacaatgaccaacttgtctctacaaaagaaactcaaatcaaggttttgcatcgccggatgttttcgtacgaccaatcatcaccaccacgacaacattcccgacgacctaccatcatccccggtcaccaccgagaaatctacacaaagcccacatggtggtggaatgaagaccaaatctccaagactcactaggacgttgtccaagtcacatgaaaaatgtaagagtctgatccatcgaatgggcggtggagtaggtggcgttggcggtcacgggaagcatattcgccgccatactgctgactttcattacgatccgtcgagctatgcgcttaactttgataaaggagatgaggatgacaatatcgaccgttttccgctacgtaacattctccgctaggctgcctcattcaccgccttcttcggccaaggccgcggattcttcgtataccggtcaaaaccttttgcggtaaagaatgaatcacacatttctatctaccaaataatctgatgtttt

SEQ ID NO: 55810 - DNA, 619 bp, Arabidopsis thaliana landsberg
agtattggtgttgcttttaatgttatttttccggattggttggttactgttctactcatcatcctctttcttggtaatcggttgcgtaatatacgtcctttccaccatccgcggttaattagacgtagaatcaccgttttgttatgaatgtatgtatgcaggcacgttcacaaaggcgttcttgaagggttctgagacttggaacaaggagactatagagaaaaaggtaccttgataacttcttgctaaggcatcaaatggaccacctaacacctaagaagggttgttatctcatttattgctagatagtgtcaatcttaatgaataaccaggaaactattttttttgttttgtgttacaggaggctgctaagcgtttagagtcaaatggtgagcttaatctttttttgttaagcatttttcatggaccacaacctctttttttcttttattgggaaaacattcctcacaaaatctacttttttgtctaggtgtatctggctcagaagtggaatacgtgcctcttcccgcagccccgagcacgaaccctggaaaccaaaagaaagaagaagtaaatgctattctcgttacactagtgcttggtctgtaattgcaagtta

SEQ ID NO: 55811 - DNA, 548 bp, Arabidopsis thaliana landsberg
aaaaagaaataaaaaaattgattgtcatccttcttttggcgtactgcgtattgccttgtcgatttattggtgttgaccgcctggtcctctccacggctttttgatagatcaagtcatagccttaaatcgcgtagtgtacaagaacaagtcttttcagagattaaagagatggtaattaacatgatattgccgagttacctcatattagcccctgtaatctcactggtatggcctccaatgaccctgctagatatcaaatttcgaagcccaatatgggtgcaacaaattggaaccaattttaccgagaagccaacaggctgaagcgatggataagattctggagagttttaggaaactcagggaaggcctgtttgcgacagagactctagatatttttgccgcagaaggtatttaaatacgaactatcccatatttttttttcttattaaaagaaagggcatatgtgttaccaattgcatcgatctgtacttaaagtctaccagcaatcagtcctttcaagtctctatgcacgaaacatgccagagctg

SEQ ID NO: 55812 - DNA, 1722 bp, Arabidopsis thaliana landsberg
tgagcgctgatctggaagtttgccacaccaacagtgttaccagagacctcagagtttgcttgagccaatgctttaagttcatggaagtgagtagcaaacagagttggtgctcttttcacttgaaccagatgctcacatatagcccaagctaaacctgatatattcaccacgatgatgtcaagagcactgaaatctcacatatgaccataaaaatgaatatataatagaaaacttactaaaaacatccaaatgaaagaagagaaattgcagagaaactaaccaaaaccatcataagttgatgttccacgaccaagttcatcgataattatcagtgacttatcagtagcgcctttcaatatcgatgcggtttcaagcatttcttgcataaaagttgacactccacgcagctaacacaccaaaggaaaaaaagttggaataagggtgttcaggatatcagcagtttttcgttcattgagggctaaacttaaactcacttggcaatcgcctgctcctacacgggcaaagatgcagtctcttatggaaattgatgctttatcacaaggaacaaaggaaccaacttgagccatcagcacaatcacaccaacctgggatttataatggccggaaaccgactttagtcatacgtctatgaagcaaaactgaactagaggaaatcatcatacctggcggatgaaagtggacttccctcccatgttaggccctgttactatttgaaaccaactcttccctctcatctgatttcaaagaacagtaaagggcaaacaagtatttgttcaagtcaaaagggaaacaagaaaaacaaagacgtctcagtttatttaccacattcaatacttacgagtctgcaatcatttggtatgaaattcacccaatcttgagcttctacacatggatgtctgcttccttctagtacaatatctccagcatcctacaatttattaaccgtgctctcaacattatgtcataaacttggaaagaaaaaactattcattttcagaacaaaataatcaacttgagattgtactaaccaaagaggtgatttctggcctacagtatggagtagggcaactggcagccaaatcagcaaagcttaacaaaacatccatttcagaaagtaacccagctaagtcctcaaatacctataaccatacaatatacatataaattccacatatagtttactatgattttaaacaaccaattctgtaacagtccaatgcttaatatgaataactaaacatacctcagagaagctggtaacagtctcaactacacgatcaacgagctccttttgacagctcctataatcatccacaacactttggtactggtcgcccagtttttttagctttgtgtttgtgaacttcactccgtctttgcgagtctccagcactataaactgtgtcgtcagcttcttcctgatctttggctcttccttcttcgcgatcctgaagacatgcccaaattgcgctgctttgtcaagtttaagagccttgtcgacctgaagatcaagttctatcgctgtctttttgtgcaattcgtgaatctgctgctccagcaattctttctgatctttcagagatgccaatttggtgtcgcagtttgaagatatcatgtattctccattttctagcttgtcaagatctacagagcactcaaccaaatcgatgaacctttccaggtgatcttgatctgataaag

SEQ ID NO: 55813 - DNA, 591 bp, Arabidopsis thaliana landsberg
  unsure (1)..(591): unsure at all n locations
tcctgctgctgcctgttccgcttcaattctgacagcaccctagctgcctgcatgcgcgcgcgcaagctgatgctgatctgatccaccaccaccaccacccatcacatcgtcgtccggattcaggagtgagggatctgatcttattgccatcgatcgatcggggagatgatgctcaaggatctggcagcaattcagcagcatcaccaccagcagcagctggccgcggccgccgccgacgagaacatgtctaacttgacctccgcctccggcgaccaggccagcgtctcgtcccaccccgtcccgcctcccgccaagaagaagcgcagctccccgggaatccaggtcagccgtttcccgatctgtcgattcagtaattcatgcacctaccatggtttccgtctcgaccgatgcatgttgtgtgatggactggatcgacgactgtgctcacctgaatttgtgtctgtctgtctgtctatctatctatccatctgattcggcgccgccgangacctcggacgcggaggtcatcgcgctgtcgccgcggacgctgatggctacgaactgctacgtgtgcgaggtgtcggcaagggg

SEQ ID NO: 55814 - DNA, 606 bp, Arabidopsis thaliana landsberg
  unsure (1)..(606): unsure at all n locations
tgttttctctagccgatgagccacaaaaacagcggaggaggcaaaaacagcgacagaggccatgatttgagagctttcgctttctcgtgttggtgtcattgttgtgatgaccgaggcagcggtggctatgttctctgagcggagtgccgagctccaaagagtttcgcctggtcgtcggcaaggtgtgctcccacctttcaaccttggctccaatcaagatgcccttggtcgatcggctgcgagcgctacccagccatctggagggcgtcatcgctgtaaagcccaaaaatttgatagaaaaaaagatatatcataaaataataaaataaagaaataagaatctctatgataatggttctagaatttttgaaacttttgggatttagtaggacattctctcttcataatcaattcagaatattaattagttaaggaaccaataaacaaannnnnnnnnnnnnnnnnnnnnnnnnngatgtggttatgatgctttttactgaaaacatgaatttggcgtcaatttataaatgagaaaaatagaaagtatgaacagaaattgtaatagtaaattgttacttctaaaatgagaaacatgggggaaagtaa

SEQ ID NO: 55815 - DNA, 421 bp, Arabidopsis thaliana landsberg
gggttatgataggacattattagcgggcggacgtgaaagcgagctatttttgagctttgcagatggggctagagctgatgaatcaggaggagtattcattagctgcaactcagtgaagaaccctgatacgcggggactactcaaacacttcttcatacaaagggaaacagactgagcgatataaaacagatgcgtgagtgggactaaggctacatatttgagccattggggggatataacatggaggggaacttatatgctattgcctcaactgcaggctctggaccaggcttgcttcttcttgcatgaactatcctctcttatacttgatctagctcgaattagcatgacgaaacaaagagaaagtaactcaatggatagtaactcgcacgcttattgattaagtatgaatcgaacactg

SEQ ID NO: 55816 - DNA, 1208 bp, Arabidopsis thaliana landsberg
gtaaggttaaaacgtttcgacgacaacgttataagaagaatgtaaatgcgttctttttttctatctacccttactcttttggctttggattataagtttaactcttcaatgaaattcttagcgtagagattcttgtattatgaacgaagttaatatacgtaaccctctcgtctatcaactacgtcgtttcattttggatttttaactaatttatctagttggattgaaatagacatgacttttcgttttgggccatgcgtatgttgttggagttggactattttaaattcctgcaatcaatttcaaaaaaattcaaatcatattgaccgttgattatataccgtacacgtggtacaatgtcacagatatcttattataatactatacagttcacagtcctttgttttctttattagacaatcatgagacaaagtattgtaataaacaattaatcatacatggaattgtgaagtaacttttttgttactcttttaccagaaatgatcaaattttacaaatgattattttttgttgtaaaatttattttaatgtcttagattaaggaaagtaaactagttttgtaataaataaagaaaaataattaagctcttaaatatgtataaatgattatgcatttaagtattaagaaagtgcaatagtttttattttattttattttataatcagagaatcctcgtgcaccaagaatctagttccactaattaaggtgttattcttctcctctaacaccaaattatgtttgtatctcttatttaaactaattaatgacaggtttgacattaataaataatattttaaaatataaaatacattagtaattaaaattaaaaaataaatgagaataaagagtttcatctgtatcccgacggaagttgagttctgtttccgcccatttctatctgaaagcaatgcacgtagcctccttaaattcaacaagtatttaatctcttcctttaaatataaactctcaagttcatcaaactgtttccataagaactagtttttcttttcttcagatccaattttataaagcaaacctgagatttttattaatataatatatatattgaaaaacttccaaaaatgagagttatctgggtttaatttaatttactaaacatcaagatagctgtttagaaactttttatcgccatgtgttcttcttcttctccttccttgtctctttt

SEQ ID NO: 55817 - DNA, 357 bp, Arabidopsis thaliana landsberg
cattgggggggctggagctcctcgagcccaagctcaagcagatgatggtggcaggttttttgcagttatagctgagattccaattgaaccggagggtgagtctatttgacttcctacaggcgctaccatgacagtgggcttgggtaacctcataccatgaatggtgtgtctgataccaaccggggttctgagaaacaatgatacctaacgggtggtgtacatccacaggtcgctcactagagcaaaatcgtgaccaccgcggtatttattatgcatgtaccggatgcaagactctgtggcactaacaggatagtgtatacataatgcaactagagattgaagctacagagagactgg

SEQ ID NO: 55818 - DNA, 1334 bp, Arabidopsis thaliana landsberg
aaaaaaaaatctaaaacttgtggttcatttggaaaagtttgataatatacacgaacgtaataaacacaaacaagcaattgaaacatgaatgtacaggtttagtgttattatctgaccacattgtgcgcgagtgtggaccatgttggacgttacaagtttcatcaaaccaagcatacatatatatgtgcgtcaacgtagaccctcaagttttcttgattttcactcgaatcaataccgtatactcatgttttatcgtaacatagaaaaaaaaaaaatcatggactttctcaagaatcaccaaaaaaagcatgcagcttcataatcgaagaataagattctttaaattgattgatgagcgtctgcactatgaaatgtttcgatttcaatcttctcctccaattttcttcttcattagtcctttttcgctcccaatatccttcatgaaatttctctataaatagagacataaagcattaacatgcaatgcaacaaaatttaagaatattagagtcaaataaattttaaaagaaagttgacagtaaaaaaaagccttaaagaaaaagaattagaattagaccttataaaaaaaaaaaaaaaagaattagaaagattgttctggtgagtgagtgagggatggctatagcttttcatacctttcttcttcaactgctactcttcttctttgcttcttttgcggaagcaaacgactcgcgaaaggtgagaaaaaatggacctttcttctttaactaatagcgtaatgtttttttggagatacatataacgacgaatgtttgaattttaacatagaacttcttgctttctatggtacagacataccttgtgcagatgaaagttggtggacatcgatatgggtcaagttccggtcaccaggaactactaggcgaagttcttgacgacgataggtttgattttaattatgccttattctttaagtcatataggttttgatgagatatattggttcaaatttcccaagaagccaatcctctatgttaacacatgcagcaccttagcggatgcatttatctacagctataaggagagcttcaccggtttctcggcaagtctcacaccaagagaacggcaaaagctgatgagtaagaccacaactgtttcgtcacgtttgcatttccttttttttatacaattgatcagtacaatactataacacgcaatgacgtaaaagccaaaaaatgtagaattatagcctagtgctatatagattgatatcaatgcatagtagggacgtggtaatacacacaggttatgttaatgttgattagggagaagagaagtttgggagtttacgtagc

SEQ ID NO: 55819 - DNA, 624 bp, Arabidopsis thaliana landsberg
ggattcttgaggaacaaggcttcgtgtttgctgcgcaatgaggttaccttgagccccaaggaaaattgttataagaatcgtgtgatcaaccgagccaaaacggttatgttccaaccggaccgatctaccaatggaatcagagtaaccctaaatatcctctctcgttcccaagtaattgaatcctctgaatattttgtacgtatcactatttaatatcacaaattctttaattcaagtggtatttattaaaactccaggctagtcctatccttaataggagaaggaattatgcgcttatctacaaggaaattatacaattttaaaaggtatatatatatatatatatataattttaacacatacaactgatttattgattaatagaatctgagtacaaagcacttgcaatacatggtggaattaagttttttttctttttctcataagtattattttattgatatgtctccatttgaactttctgaataaagctacaaagggcataaaagcccataacagacagccatgaaatatgcccattagagatacagttcaaggaacgtgtcagaatcataaagatgagctgaggacacgtgttacttccacaatctcttgtggatgaga

SEQ ID NO: 55820 - DNA, 613 bp, Arabidopsis thaliana landsberg
  unsure (1)..(613): unsure at all n locations
agattcgtcggctttcgtagtgcctgaaccttctcctccactccatcgacatcccaaaccatggtattcctttccaaaaccctaatgttagtggattcgtttgtctcaggtacttctcaaatgatccagttcaagttggtgtgcccgcgcaaccgagttaaccaaggtacattttgacgacttcatcaatctgtggaatgtcatgttcgttactggtctagggttcccgtgcgtattgttatttaggttaatagtccttgtttatacatgttcttgtattgttattgattggttactagtacttgttcatacgtgttcttgtattgtttgtttggtactagtcctttttcatatctgttgttgcatctagcgaatgccttctttgcttctagtcgttgttagtccactattaccattaaaacaaaaactaacaacctaactaacaaccagatagattcgccactgaaggtagctgacaaggccattggcttgatgcaagacacttccaataggatttttgctttacaatggaaaaactccatcctggatgtggctgactcctttgtagcaaccagctctgattgcattgaatgactagctanaacctggatga

SEQ ID NO: 55821 - DNA, 528 bp, Arabidopsis thaliana landsberg
ttttcaaaagtaatattcaaagattctttcgagataaaagttgagtcctaggctagctcgttcaggtttgagttttcagtacttgggagggatatttatactttaacaggtattactattactaaaaattagttttagatcgaaaaagcgatcataggaatttttatttttttaatagacgatcaattgtttttagctcgattggaaaacgcaaaattaatggcaaaacctagagttagcacttgatatgagttcgatatttatttcattgtcgatcggattctttcggttaaaaatagtactataaaataagatttgttcttgtggcttgaggctaaagggataaatggtatatgatgacgatcgtcgatcgatgctgagtttcgatctgtgtgtcacgtcaccgtttctggacctattgtgtttgtgacttttttcacaatctctttataccaaacggtccttattcttttcaactagctttttctaaattccgtaaatattttattcttctaataaatttgataa

SEQ ID NO: 55822 - DNA, 1246 bp, Arabidopsis thaliana landsberg
cacatactgatcacaaattctgggcgtgtcagaaattcttcaacttgaggtagatccgtgtaaaccagcaaaggagacccatcactatgctgtatgcttccggaaactgaagggttgggaggttttgactcgaaggctttggcctgcagtttctgttggtatttctcaaattcctaggaaatcatgacagcgaatctgttaattaacaaaaaactttgtatgaaatgagaggaaaggaagtctgctaatgaacagaaagctaaagaggacaccgaggaagtacatgaataaaataattctcaggagtttgaaaccaggctgtgagtctcgcagaccgctgtttgtcctccccaataccagatagaaaatcacgagtgcactcatcacctttttgagaatgctttataggccacattaccgaatagctggaacatataaaaccaaataaacatgaacatagaaaatatttgcatacatgacatgtgagccctgatcaagaagcgcatgtcaatccacattacacttttgaactatagcaacataacacgtgtttacagcgcatagaagttgaatttaacaaatacgtggagcagtgcaggaaattttttaaagtttgctacctcacagcagattctagtttcccagaaggcatgaaaaggaagggagctactttgaaattggattcatcactatgcctcaaagctgaacccaattcatccatcacatacctgcgaaaaagtgatatcactgcaccactcacagtcatacatatgcaaaaattatgtgcccaagaactacagacaagactatgcataaactctctgaatccccctcctaattctaacctcttaagaagtagactagcatcaaatgttcattcccaatactatagaaattttgcacatatatacaccaaaggagacctcgcccagtcaaatcaaagaaggctttagtctagagaaacaaatgcttgggtgagaatacattccacaagtgaaaatggtcattccgacatacaaagagaggtaactctttcagctttcagtgttggattagaatcgtcacaaatattaaatattggatttctctaatttgtctatttaactgaaaattgttatgatagtttaaatagtaaatataaacagccgtgagttttaattcttatccccagcaaatccaccgcactaattctaatatagcaaaaaaaagagaaacattgcataccataaagaagtttcatcaagct

SEQ ID NO: 55823 - DNA, 1069 bp, Arabidopsis thaliana landsberg
taccctcaccactccagcatcatctatccgtccccagcccgcagcagatcctgtaaatgaaaatatctctaaacatattaggctgcacctttagtagtatagttcagtaaaagtagaaagtttttctggttctccacaacattctagaaagaagcactgcaaagaatatttttcacgaaatttgcaactcataaaactctgtattcaacccaaataatgagctcttaaataataatttgtattgttaagaaggtaggacaaaaatgatgcacatgcaagatgaattgagaacagttaaaagactggaggataccggctaagaatagctggtgtgccactgttgatatatggagtggaactttacgggatgaaccttctcgggtaacaattccctacagtcaaaactcatgcataaagttaagaaaacaaaacaaatttacaaattgattaatgttgcttatcttaccaaatccttgacaaaaatatcaagagcagagtatggtgtgtaatcattatccagcatgtgcggaacacgattttcaaacatcctgcaagatgaaaaataggagccattaaaggctaataaacgcgtttctcattaaattgtaaaagtaaatatcaacaaacaagagcacagggtttcattaagacaaggctttatgcataagatagttaacatttttcagagcatcagagtgattcacttttcatcagaaatgttaagacgttgatgctcagaaatgtaacacagaattttccaaagataaaagaaaaaaaaacatattccataaaaatctacgtaatgcttaccaagatgttccaccgctgttggaaataacattgaatagctttcgagtattcagacctaaccgagctccaaatgccattgcctcggcagctgatgcgatatgaactcccgcaagcaattgattgaccatttttacaccactattgaacatcaaataaacaagttacaaagaaagtgaatgtgtccaagacagtaaataaaggatcgtgatggtaataacaaaaagtcaaaacaaattaccttcctgccccacaacctccg

SEQ ID NO: 55824 - DNA, 505 bp, Arabidopsis thaliana landsberg
  unsure (1)..(505): unsure at all n locations
tttcttctaggagaagcatcctctntctcatgtcacagttttcttcttccaacaactttattttctttctcatatctaagtgttctttaccaaaccatanaacagtttcttcanatctctagtttgtgtgagtcttcttatgtgtatttgacgtttcacaagaatctgaaagtatacaataaatattgtccataggtatcatgtgttaaatttcaaattacataaagtttctaatatcaacaatactaacctgatacgatatagcccatgaatccagtgaaagaagtcactgcanaaaaggcatgaatacgcgaattatttttaggagaatatgaggagaaaaatcccaattatggatatatatatatatatatatatagatatatcttttagatgattatggattcctaaaaaaacatagaaatgtatagttacataagagatacttatagcatccgactcanaataaattgtatatatggcatcagactcaacatagtcgatt

SEQ ID NO: 55825 - DNA, 472 bp, Arabidopsis thaliana landsberg
aattagaatataatgtaaaccgatttctcattcaacatatgttccaagcttagctatacgcaatatggagagaacgaaatgggagacggcatggtgatagcccgacctcatcacccactcttgttcggatgtcatactcctaaaatttaaactagttgaaatagttctgacttttaacatgcatttatcacacctaatttacagttagcattcaataaaaagactaacaatttacctaattaacttcatagataatgcagatgaattacctcttatatcccattggatgagtttaatcttaaagttgatgttattgttgcaggcttgcagctccgatcacaagagaaggcaatagctccatttaacctccaccaaaacgtttaaacatgtcaatatctattcactgtacatagcccaatatttatgtttatgttagatggatccaagtgtacatagcccagtatttatgttc

SEQ ID NO: 55826 - DNA, 573 bp, Arabidopsis thaliana landsberg
gaatcacagtgacttgactcctctattgtcaattacagtaagacaagggaattacaaaactagatgcaagataactgatgcagcaacaacgagctcaattcaagacataaatggcatacatgactaagacgatgaaaatgaaccatacctgcagttgtttcccaagaaactccacctacgaacagtttcctaacataaacaaagacaaaaggcaccacaagaaacctccccatcaatatcttaataaccagctccgctgagaagagattaatatcaaaagtaaatccatacaaaaagataaagcctaagaaaccacgaacccaggagaagacatggacgaagaagaatggcgatggtcaacggaatgcttcatctgaatcccacagtatcaacggctgcaccaccgttcctccggtcatcaaaggtctccacttcaaaatccgatggtggtaattgttcgtcgtgtacgtgatgatggtaagagtcatcataaccacgatctgagttataatccatcgatcactgcagctgagtcaaaacaaaaccttttaatttctccgtctgtctatgatg

SEQ ID NO: 55827 - DNA, 465 bp, Arabidopsis thaliana landsberg
tgcgttgactctatctgagctcatgtttggttgcctgcacaaggggggcgcaggctgcatgagctgatcaaaataagccattttatagctatttggttgcatccactcgtacgcagaaaaataccgtatcaggtcaaccagggtcacccgatcctgcgcgtccggatataggcatccaatcaggcgatatatacatacgtccagtctccagtcaaagtaaaccgcagctttcacttgtgtgttggttgccgttgcagggaaataaacaagagagcggacatcctcgctttggacggacgtggaaaaagtggcattattccctcggtaatccctcgtagtttattcacctctctcctctctagaggaggtgagggcaggataaaaagttgagtgcaagctaaattaaaggcgtcgcctagccccggtcatggttaagtgcctgccagtttggtgggcatttgttta

SEQ ID NO: 55828 - DNA, 1051 bp, Arabidopsis thaliana landsberg
atgtgtttggtgttgttgttgttgtggtaagctggaaaggttgctttgccgtttgtgaaactccattttgcagtttgtgaggatgtgtttggtgttgttgtgtttagctggaaaggttgctttgcggtttgtgaaactccatttgcaactggagcttgttgaaccatgaggtcgattctgacagtcgtttgtacaggtgtatctagatccattcttgacatagaacaatttgattctgcaacaaacaaacaaaaaactaggtttgaataagtgaatctttatgtttgggcatatactccattttcttgatgatataagaaatggttaccttttacttctccacaggagattattcggttaaggcagtcacggaacttggttaatactactttttcttgttctgcataaacctggtcttgcccgtttggtagctgtgacgtaggctccaccgaacaattaggtgaagctgcaaccattaacattgtgtcccgttcgtcacacatcaatgccaaagtttctggagatagtgacctccctttggagccatctgcatttgaatcctctaaaccagatttctcagctttattattgacgtgtccttgatcttgcacagaagaagctacggaagtttctttctgatttgctaaccgtttttctgttaatgtctttgcagcttccccagctacagcaaccagaacagaacatagtgctttcacatccattggtttaattatgtttgccaaaagagaccttcaaaagaaaacatattttataactcagtttctgcaagtctcaaagaaaagatttagctttgttaacacatcagaaatttacttatatacaactttggatgggcctaacgacgcattgcctccagcacgagaaccagtttgcgaagatgtggttcttccgttatttgcctgataccaataattatactataagatctctcatttctctaacaaaggaggaaatcatatagaacccgactaagcaaataaacttgcgtaaatgatttacctggccaagcctatgagtggatgaatctttg

SEQ ID NO: 55829 - DNA, 914 bp, Arabidopsis thaliana landsberg
aaaaaacgtgcagagaaaacaagcaaaacgattcgtcaattcgaatataaacatgcaattgacacgtgcatgaagcttgattccgagacttttgtcaacgttagagttcgttaagacaaagaacaaagttcataagaaaacctaaagctacttattaaatttttttgggaaactaatcaaattatggtaaaccaaatcataccctcctcctgcatcctgcaactttaaatcataatcagctcatctataactctctgttgggccacgtgtttgatccctgaaaaaaaacaatttcttttctaaattaaagttcctattaaactctttgacaaaaaaaaaaaaaaaaagttcctattaaacccaattaatattatttttaatttatcctctaccaattaatattatttagtagaaatactttatttctttaacatataattttaagaattatatgtatgaaaatttaatttagaaaatcataaactttttgttaataatcaagagtcaacgacgaaacaatggcaataagtgcaattttgaagcccaacaagttatgtccaaacacgtttgttgaaattagctataatggcacaggtccaaagcatgcaggaccagattagttcactttgctatgtttttttttctttctttctaattctgtatcttgttgttggcaagtcatttacaacttcttcagtaatcaatgtctataacgacatatatatttctgaagaacatgtgaatatatgacaaaaattgggactaccatatttctaaatgttacaaggacgctcccaaaatagatcaaatcattttggtaccaaaataagattataactttattcttgtttcgcatgatatgtgtatatattagtactagctttatttgtcttctacgtaaagataatagttct

SEQ ID NO: 55830 - DNA, 1090 bp, Arabidopsis thaliana landsberg
  unsure (1)..(1090): unsure at all n locations
caactaaagagggccccgcatatcttccatactgtaagtgctagttcgtcaatacatgtcaattttcaactcttctctctttctattgtacgttataaatcaacctattataaaacttcaaaaaaatatgtatttaagcatagtcgtagttaggaacattggaaccaaatcactaacttacaagggtttctttttcaatattaccctatttattcatccacctttcattttccaatactctttaacttctctctccaaagccatcatcttaattagttttggttagtacctgcaggttcttggtttttaaagtcaaagtctcttttgtgcttctcgtaaagagcgatcatgaaagtgcttctcggtcttttgcttctcttgtccctgaccaattcttcaagtaaagctttcttcttccctttttttttttgattaattcttattttcctattcccctaaatgatcaagaagctttatgcaaaggaatgatcttttcaatctaagcacaaccaaccgatcaccgtgctctggttttatggttcaatctaaagctatatctttctatttaggtgcaatttactgtctctgtaaagatgggataggagacacagagcttcaaacatcaatagactatgcatgtggaaccttagctgattgtaatcctatacatgataagggtacttgttatcaaccagacaccatcaaaagccactgtgattgggctgtgaatagctacttccaaaacgcagctcaagtccctggaagctgcaatttctctggcactgccactaccaatccaaacccaccttccagtaaagtcaataactcctaaaagtctaaaaccttttgatgagaaaaagtttgtgatcttgatgatgtttttttctgtgggtgcagatttggctaatggttgcatctatccgtcaagccctaggtatgtttgctgatcactttcattaacctaaaactgcttcattcacattattttactttgttccttatcttgtaacagctctactaggtctcctccatcaacaacaccaccaacgggaacaactcccacanacggaaccactncatttncgggaac

SEQ ID NO: 55831 - DNA, 445 bp, Arabidopsis thaliana landsberg
  unsure (1)..(445): unsure at all n locations
tgttgcttacaggtttcatcagcttgatcacaaagaggccaagcaactggatgagacaaccctcttttcgccaatctgtccaaaccctgtttttaagcgcttgctgtataaagaatttgcatctcaagggtgcccaggtcttccatatccttctctagggagcaaaggtgatagacctggtaaagaaagccagatatnnnnnnnnnnnnnnnnnnnnnctctgattagagagtcaccatatatgttgatcagctgtgtcaggatgaatctccatctcttcaatcagatccagaggtgcaggtattctaccaccacctgaacagacatgtctcttggatatctgaaacccatttgcggttagtgagcccttgagcaacgatcatttgtttaaagggccctttggaaatcaagtgggtcagattagggcaacatttagcatcaagtc

SEQ ID NO: 55832 - DNA, 1009 bp, Arabidopsis thaliana landsberg
ggagttccttcaccaaatgtttgatgttccattaaattaatctaccactctaataagaggtatcgtactacaaattacacttcataaacaagagaagaacataaatttgaatttttttttaaaaacatatgcgttataacaccaaacagtaacggactagctgatccttgaatttatattagttgcaaaaatttgtatatcgaaattgaaacatgaatttttaaaattattagaaaatgtatgatgttgtctaaatgtgacattacaaatacatgatgttgtttaaaaattattataaaacaaccaaagtttggcgtcattgtggtgaacacacttcatgaatttatatacagttaaagattttaacatcaaattttaaaatgacaacttaactaaaatttgtatcctaatatttttactagagaaactcacacatatttttcaaacaaattattagttacatatccttcggtaatcggtattgtgtaaaactgtgtggtttgcgcaaacgatccctcaatattctttcggctaaaatcgacttcccacagtttcgatatctcgggtttgggtgcaatagcatatgcttgtttagtatgcagataatcatatgagagagtcagagagatcattattttcatgatttggtctgagctaatcgatcatttgttatttatactcgataaagttctaatttgtatgatttttcagccttgatctatcacaacatggagataatgaaatggtcgtcataagaaaggtaatgatccccttgactatgcctgtgtttcatctccgtaagatgacttgatatgtttcgaaaccctcaagcattctacaagtataactattgtgttattaaataaatttcacagttcaaaaactaaaacataaatattaacaattgtttagaaaatacatattataacacaaaaagtaaccgatacttagcttaccctgtgatataaatcataaaactttatagtaattgtctgtgtgatccaataat

SEQ ID NO: 55833 - DNA, 1042 bp, Arabidopsis thaliana landsberg
ataatctaagaaatttattttcaaaatatttcacataacattttaatttttaacttgttaaaaaataatgtaggagtcggtaagatagtaaatctcatgcttcaaagttcaaaccattttgcttactattgcaaaatctctcaattattatcttagtattcagatatcacatttttcagtatttgcaatctatgcaatttctctaaataatactttatactatcttagatttcattagagtatgtttattagtaaaataagaaattggtgtggtcgtgtctccttccattcgacccggaaaatcctcttgacaacttgtttcccaaaggagggttccctttgataatagctctacgttgcctccattaccaatcaacaatctaattataaaattatctgttaattacaactatgaaaatatttctttcttttctaaatttttttatcctctgttaaaacaacaacaaaacttagtgctcttcctcttcttcttttttggtctgttgatctttaaccaataactcctcggagatctctcgatccttctctctctccctccctccctctctctctctcttcaaaacatttcaacatttttttttctcgtcaagagaaaatccatgcgttcaaggtttaagtcttcagatttcgttatattctctgttgtttttttgtttgtgccttacaacttttttcttgatttgttcttcgttatctttttctgcatgttaggtttacggtaacgatcgtcaaatcttgaaccacaaaggttgtatccggcgtgtggatacacattagccggaaccaaccctttatagaccaatggcgacgacaatgaagggtcttcttaagggccttcgttacattactcagatttttggtgagtctcattcattttccccataaacatgaaaaaaatgaaaaatcatttgtgtttcttgtgtcaaaagtcaaattacatggtggatgtaattattctattgcagatgaagagaaagagatggaaaagcagataggatttccgaccgatgtaaagcatgtt

SEQ ID NO: 55834 - DNA, 535 bp, Arabidopsis thaliana landsberg
atgcaatgggtacgggattcgtccctgccacttcaattctccaaacttgatgtaataatgtaaggaccttaaggactgatttggtgacaaggggatcacgggatgatcggagatgattgagaagaaatgaactaatttccctatcaatccccttcaatccacctgtgatccctgctcaccaaatcagccctaaagggtttggctacttgcatcctcattccttaaactccattagtgagttaaatttgtctttgggttcaaattgttttcatttactttaaaaaaaggcttacagtagatcacagtgatccatctgttgagtgttgatttttattaggaaaaaaactcagatacactgcatattttgatttcatattatcgcgcagatgcaggagggagaacgataagcattacatgaggtcagcctcgaaaaagtactatcacatttcatgccatttccaaaattgtactcgacagacaagagaagaaccagagattgtgcttgttgggggcttgtctcaaatgctatgagtta

SEQ ID NO: 55835 - DNA, 232 bp, Arabidopsis thaliana landsberg
tattagaactatatctttttttttactttttaatactaagaatccgtactgttcagaaatagtttatcatatgaaactcttaaattatatatcatataattaaaaactttcataaaattcacaagactagattatacgatgaaaaaagcgatctcaagtttgttagagaaataagagagctcaaaataaacattagttcatcaatatgagatacatgcttatcatcacgcat

SEQ ID NO: 55836 - DNA, 393 bp, Arabidopsis thaliana landsberg
tgaataataaaagttattagctgatcttttatagtcttgcgaccatcaaaagaaaaatcattataatagatacccgcgagccgagcaagcttattcacatcaaacttagagaatgattccgtgggtcaagacaagaaagacacacaagcaactctgaaggtagggcatgaaagcgatgatcgaactctgaggtgatagaatctatagcatcagaggaaggatcagcatgatagaaatgttctgtggtaatattgattgtcccaccgggtcgtgtatcgaccaaaacgtggtacaacatgacgcatatttggtattggtatatcattagcaagtcagaatgttttgacgtcttccagcaatggctgccagacatcatttctcagatgaatcaaa

SEQ ID NO: 55837 - DNA, 1285 bp, Arabidopsis thaliana landsberg
acatgacttatatactagatttgttgtacatgtttattggttcttttatgatttattacgtaattttgtatactgtaatatctaactactgtcactactaacctctaaattgttctgaacaaaggcaaaatcgtatcaaaattcgtctttaaagatatttgtggatgcgttatgttcatgccgttggtaggatttcatgcatggacttttctaatccgacgggttatcttacttctagatcatcaaattaataaacatgaactaaactgtaccttccgttaattaaagcacatttccaagatgattttttttccttctgtaattacaaacgaaatcgatataaccgttttgcgtatttttaaaacagtgattttaggctatcgtacaactcatttgagtcatgtgcatatcattttgttcaatgaatcatgtgatgtgttgtttggcgcaagttctaaattttccaatattatatgtacacgtacggtcggacattattttgatgtaccaaatcatatgtttgaacgcatgacatcactcattttggtgtgccggtataatgatgagttcagcattatatttttctcttctgaaaaatataaggtgttattacatttgaggaaaaaagggtgttattacattttttatttataataacataataactaattgacaaactgaaatgaatctataaaaagtatctccaagacgtatttttttttttttttgtcaaaggtaatgagacgtaattaaaatgcaatttctctacgacaaaaaaatgaaaaaaaaatgcaatttaattctctacgttagctgttgaacaaacgcagcaaccacgcgtagcatgcatatatttaaagaaaaatactaacctaactaatgactgcaaaagtgaaatgaacttgtacaaactttttcggtgagaattgagattgtatcttgcatacgtccaagtaatctctaatagttttcttttgttaaagagaaatgcttctaagtttgagcaaacttttaaaggcaaaatagattagtctatgtttaaattagcacgttaaagctagcgtttgatacgtttaaagaaaggtgaatacatctaaagcaaataaataaaatgttagaatgttgtcgtttaccaaaatatatgactcagaactgacgcatttccttatatgtgtgtctcttcgttgttttcaaatctcatcttctttgtctttttctacccatttgccttctatgttgcaatcaatctcagtgccgatttctcaatccaacatgcatcttaata

SEQ ID NO: 55838 - DNA, 288 bp, Arabidopsis thaliana landsberg
  unsure (1)..(288): unsure at all n locations
gaggctaggtaagccgttaaaacnnaactgcatccaagttctgcaactcgctcattatcgacgatgacgattggagtctaccaccgatcagcctggagacgaactggagagaacatgactccctcttcattgatgagagagcggacaggaacatgaaaagagagcgggagatgccgacagagagctcggtcgcctcaaagtcatccaaccactgcttgaggccaacaagaagctcgaaagcctctatcatgaccttcctccaaaaggaaaagtactctttgatctgaa

SEQ ID NO: 55839 - DNA, 1044 bp, Arabidopsis thaliana landsberg
aaaaagcgcttacttgtttagtatctcgatgaagagggtaacataccctgtactaccccgagctgtgttggccgcttggggagccgaatttgcaattttaagcgctcgtttcagacaaagtagaaccctgatttcaagtaagaaacctaatgagctattttaaacgcactgtgttctatcgcacagaagaaagtattacctttctccatcttgtatggtctcacgatcttccagccagaacaaatgagaacaggcataaacagctcgacattgatcaggtttctttagaagtttcgctgcatactgcaagagtataagttttcccttgtcagcctttaagcagagacaattgaatatggtaagagactaattatcatatcatgatgaaatacccccgtagccttgtgcgttaatgtatctctattctcaacaccaaatacttgcatcctctgcagagttccaattataagttgtaacgcagtcacctgggcctttgagtcctgttcaaaaggcaagtttttgacgcacgagagagagttaaactcacctacttgctttggtttagacacgagacatatgaacgtccgcgaaaacataactaaccgaaatttcttcttcgtataagatgtatgcctgggtgaaaaattcgtatgcaattggttcttcatcacacttatccgcagcctgatgaaataggaaagatctgtgagcattttaccgagcaagtgcatactaaataaacaggtaattagttttacctcagcacattgcaagtacaaccggaatgccaggtcaggtgatggaacattaggtagcgcttcgataatctgcaacaagcaaaaaaatccaacaataaatacaagaactgatgactgtagtggagacagagcaataacagcagtctctttagctaatatctacaaactgttgattgagaattttcaacgttgtcaatcagcttgtatgaactaactttggctaagttttaaaaaagtaatgttgctctgaaacacattgttctacctaaaaacagatctgaacaca

SEQ ID NO: 55840 - DNA, 542 bp, Arabidopsis thaliana landsberg
tcatagtgcgccaccctacgacttggttaaaacattccttcgatgtgccccacccagtcctaggttacgtcttgcacgccaccctccgactgggtcgttgcagagtgggcggtgacggcccgctagtggggggcagggttcaggtatttattggtcgggatcatgttccggtctcttcttaatataatactagttcattgcccgtgctttgcgacggcacacaacgcacacagtcatagcaatagagagctatattttttagaaacgacgtacataatcgtgatggaaatgaaaaaaagcaatgacaaatattatgtgagtacacattgcatgattctatctcacaaatatatatataattagaagtagagattgggattgaaaatattagcgaaatagtttgtctttattaataattcagaccctgcttgccaacattacatgtagcccactccctatttcaaaattcgacaactccgaactcgaattatccgtaaaaaagagtagcaagacactggttccaccaggacagctctgacatg

SEQ ID NO: 55841 - DNA, 834 bp, Arabidopsis thaliana landsberg
ccaattttttagcatgattttttatttacgattagatatatttcttaaaaaaaaacatgaacatgcatatgagtgaaagtatattgacttgttagaatcgtcaatatttagttctaataattatatccattgctttaatcactttctatgttgatattattgtttgatcaaaaccatcagtataacctattatacaatagttttgattcgttttgatctcttaggtttctttttagctattagaaacaaattcatagagactatagacattagacaatgataatgtagaacaacaattaatgttcctcaaatatcccataaaacctattgaatcaactggtccaaaaccaatacaacgagaacttattgtctacgtttatatgacccaacgactctaatcagtcggcctcaattagaggcggatttaaagacatcacggtatcataatatccatgttactttttctgttctcttttttacttacccgtccatttctttcttttggcaaaataattttgctaaattacagcgaagaggatcacatgcatcagcactatttacaacaatcctttagggtatatgttagtcaaccccgtaacaccattcgtacccattaatcatgaccatttcgcaaagttttcccaccaaaaacggcgtcggataaggtttttggcattttgtgtttcttcttttgtgtgcatagcataatttcattttaaccgtactattcgaagatttttaaattggataaagatgattcattcattacatagtcgctttgttgttactagtgataaattcatgttaatgattctatgattttcggccagctac

SEQ ID NO: 55842 - DNA, 637 bp, Arabidopsis thaliana landsberg
gagccttacattacctgtccaacagggtgcccactgtaaaaaggagccattaagcaaagaacgtattatcttttatcttagagctgcaagaccatcaaagaatctcaaatttaccttgaccaataacaactgcacgcctttcaccagctgtagctttgagcaaagtattcagatcataagatgtgtatggtccatcagtcaatctaccaggtctggtaagaaaacatcacattacagtaaatcagtaaaccatatgttgcctgcgttttggagtattaagagcaaaaaaagtgggtaactcttttgttcgaaacctgataatggtgaatggaagaccagagtcacgaagaaaatcttcccccatcttcttgtacttaagaactccaaaaaggttcatgatgctgtcaaacaaaacatacattcagcaaataaactacacgtagagacaatcagactaaagtaaattagcggagatactctagtctcacctccagggtagctcattagacttggtcacacctactgatgaaaccaaaacaactctcttcaccgatgatggcaatgctgaaatgagattcttcacaccttcccaatctttttgaacacaaaaaaaaccacttagtccctaaaaaggaaa

SEQ ID NO: 55843 - DNA, 792 bp, Arabidopsis thaliana landsberg
tcacttatgttcttacatctgccttggtgactttgatgaaatttccttctgtaagagaaacatggaaatgaaactaaattgttacagtacttggaaaagattacaattaatataagattattaaatgatctatatataaacccgtatgtatgcatcgctacataccaattatattatactaattaacatcatgattatagttgtgattacctggccagaggtataagaaaatgatgaaacaaagacatatttgtgctttagccatgtttgacgtctgaaagctcgtctacagctttgctataaaactaggttaaaccgatctatatatacagggagagagagagagagagagagagagagagagaaataatatagatattacaaaataaaaagcattatgtgattgaatatttatatttagtatctgatatatttatttgtcaaattttgcaaaagttcattattattattaaaagaaattgtatcaacaaattacatatacagtagaatggatatttctcaaaattcttaaaagatttcttactataagagataaaaatgtatttattaagtgataaaagaaaacgattccctactatggatcataaacgaaagagatttcctactataagttaaatctgggtgatttagaaaacctctcactttgaaatcagacataccaattttgaaacaattgggccttttatatatatttttgggcttaattatgtttgggatttgtgatattaagggctagtgtgacctgtgaccctaaggcaaaagtatatatat

SEQ ID NO: 55844 - DNA, 1875 bp, Arabidopsis thaliana landsberg
tcgtatttcagattaagtggcttacttgtcacaaaggttcattgttgagttttaagtctgatctgagattcatttgcttttcttgtgttaaatgatgtcttattcttgcttgtgatcttcactattgaccaggagaaagcaattagtcaacgttgttggaaggagcttcagaatgagaagcttgctaagttgcgggagaagcttcagctacaagtggagaaattgcagcaaagtctgaacatacgcccttaagtaattcgtctttcgccttcgtaacaataagtctaaatagacctacttcatgatgatgcaggcaaaaacacatttcggagtctatctcgcaatctgaaagagagatatggcattattgaatcaactaacgttgctgtaatgtgatactttcttttttcatttgctgctttttctctcttaaaaagggatttgtatgatattaattttgctatggttaatgtaaatagtctcattttttgcagttagaggagagccgtgttcaccaactagagaaccactattcagatactattggcaatcactacttggtatatgtaagatctatatctcattatactttaactctatgactatgcttgaactagatcttttactaggactcatatactcatttctgtgtctcacttttttaaaaaatccaatctcatatgtacagatcgatctaacttcggaacgcctttataaacaggctttggttatgaaacagatatgcaaattattccctttatcccgggtaaggacatccaactttaggttcttatctcttcaattattaaaatacaggtttcatagttaatgtatagagtctatgccaaaaagaagttggtaaacacatcttctttcttccagaggccatcttggaatttctcttcagactgctgtgttattgtacacatcttctaggatggttttactgaatctaactatgttcaggtgacagtagaggggcagaacaaagatgggtctagtgtacaatatgatcaaatctgcaatgctctcttaccacaaggtctcaacccactctctgttccgccaaaagagctcgcagcctcattagggtaacatgtccccgtctttttacagtaattttgctgtacagaaataatttaagatatatgtagactgtagatcaatctcctaagtgcatcttctactcctgcagatcattttactcataatcatctattatatttgatgaattaacattcccatggttggtggttggatcaggtacatggtgcagcttctgaatcttgttgtccataagctctcagtgcctgcacttcataacttgggtttcgcggtagatgccaactcattttcactcaattttatgctgaaaacagttgcctcagtaactaagtctgagaaaatcgcacatacatacacaaactccctgcatgcaatctttgcataggaaataaaattgagagataatttgttaatattgacaacatattacttttcatctggaaattgattgattgactacaaaaaaaaatctgtattgttttgtctcagggttcttgttcaagaatatgggagcgagattcttattggaactcttatccatcttctccaaggtaaaccatatttgactgataagcacttataatagtataaaaaaatacacaggaaggataagatattagagatctttggccattttttagtggatatttgggagctttttgtcttaggtagggactcgactttgttcattgagtaataaagatacataggatcactgatcttaacattgacatgacaggaactgtttgtgtctccattagagaaaaaaatttaaacgatctttttgttttgtttttctgccagcaatgg

SEQ ID NO: 55845 - DNA, 164 bp, Arabidopsis thaliana landsberg
  unsure (1)..(164): unsure at all n locations
aaaaaaaaaaaaaaaaaannnnnaaaaaaaagggggaggggggggggggggnggaggggaggggggggggggggggggggggggggggggggggaggggggggggggaggggggggggggggggggggggggggagggggggagaggggggggggggggggggg

SEQ ID NO: 55846 - DNA, 1081 bp, Arabidopsis thaliana landsberg
taacatatacattaagaatgggttcaaaaatgtcaagcaatacttttctcctatctttgttccttttacttctttgtttcttttcggaaactggagggagagagaccagtcactggagattaggtcagtgcctcttgtatatgttctattctcttgttttatatttcactcaaggctatagctcaagctttactgaattcattttcacatgtaaagaagttgatcccttcaagtcgtacgtggaccctatttttttttttcatgacatttttagtattgttattcaattgaaatttccataactgtttctaaaactttcattgataaaaataacaatatgaattaaatgagcattttaaattgttttaatgtggtaagagcagagaaaactctgtcattatatattgaggattaattttactagaaatgataaataccaagcttttttgccattaacttataatatttatgtttaaatttggatagtgatgacaataacacaaactacaaagcatgctaatgatatatataattgttttttacacaaaaagaaatcattagttaattagatttttctccagagtttctacgttattttggtcactcccatattgtattaaagttgatattattctcatcatttctaacctaaatttcctcattgatccttaggagaagtacctattagagagctaactgtaggtccatcttgttcatgcggaggcaaaggacagagtcctcgagaaggcgatccaagtccatgcccacgtccacgtccttgcccttgaaaaagaagtacagaataagaaaaagaaaagatattagaataatttgtgtgtgcatacaatatgttgtttaatataaaattaaacagtgtttatcataaaccatggtattctttaatattcattacagaaaagtaatataactcctcagtccaagcaagataaaagaaaagaaataaaactcctaacaatataagggaaattttacaccgtttactgttatctatactgaagtatgtatcctgagatttcgatcctcatcattttggaaaatatcaataaactctacatgagca

SEQ ID NO: 55847 - DNA, 676 bp, Arabidopsis thaliana landsberg
gctcatgtgggtggatttgtaacggggtttctcctcggtttcattctgttggctcgtccccagtttaagtggttagcaagagagcatatgccacaaggcacacctctgagatacaagtacaagacttaccaatacctattgtggctcctatctttggttctattgattgccgggtaaattttgcattcccacaaattactctgtcatttcaatattaaacttcaaagtgtgacattaagtgaatgttgtgcaggtttgtggtggcgctgttgatgctatttcgaggagaaaacggcaatgatcactgccgttggtgtcactacctgcgctgtgttcccacctcaagttggaggtgtgatgatgtctgataagtaaagcaacaagttttactttgtaaatccatctataggttatatttatcgtgttattttttagtgtttcagtgtaattgtgtgattgcttatgtgtgtgactcttattgggcttttataccggaaagaaaaagaagaagatattagtttaatatgaaaggttatatcaatcaattttcattgctttaagtggtgattcccacgtcttgacttgacatcacttcaaattattgaagttttttcatcagacaagaatggacccttgttggatacagcaattagaaaatagtcacaacacagattga

SEQ ID NO: 55848 - DNA, 1238 bp, Arabidopsis thaliana landsberg
aacgattgactgagtgggcattgtagcggtgtcgcaaaagtttcacagcatatcactagtattacggaatataaaattgtaatgggttcgaattgaagattcaaaagaactaaaaaacgcctttttcttttcgtattcaacctgtaattgaaagaagaagaaaaaatgaagaatggatcactacgccactaaaaggggtctctctctctctctctctctaccttaaaccatctagtgaaagtaccttttaccttaaaataaacacaaaacgcttaaactgtaattgtccaaagaattttcaagacaaaagttgcaagacatagaagccgaagatattcagacgattgcgaataaacatagcaatgatttgagaaaaacacaaacacaactcgatcaagtcctctctccaaaatgcctcttttcttttagtttagagacaaactctttttttctggcatataccttttgacatttaatggtgagattttgcatgagtccaaggactaagcgattctcctttggaagaaatgtatgaaatcacaaccacaccctcgcatgcgtattgttgagaatcatttcttgttcatcgacaactttaaacaagtactagtaggagagagcccttaagcattggagattaacacatgaatcattaacttatacttaacaaaataatgaaattgttaattatgataacaaaggcatttgctaaatatatgccttggcttggctttaacaactgcaccaaaactaatcagaaatgttcttcttctataggtgaaaacctattctgctactatctctcttttctcctacataaaaatatatatatatcttcaacaagaatgtaatcttccctcttcacaagctactagatctcaacttcatgaatcgctgctgctgtaaccttctgattctctgtcgtaattgtttgctgcattattagcaggtacatcatcatcttcagagctctcactcatttctgcgtcatcttctccttcgacccgcccaacccccacaacttcttcttcctcgtcttcctctattgccacatttaggttactattccaatctaacccccacttgtttctctgactataatccacaaactgaccaccaccatcttcatcctctgattcaactcctacactgttgtcactttcatcatccacttgcatcggcgtcatcattctgtttggtgtttaattggcccagtcctcctccatctctctaggagt

SEQ ID NO: 55849 - DNA, 359 bp, Arabidopsis thaliana landsberg
  unsure (1)..(359): unsure at all n locations
aaccgcctcagattcttggggggatatttcctcatgcggcggcaacaaaaaagggtattaccaagtcactcaaaaccctccaaaaaactaacattacttctcttatcatcactcattcgcannnnnnnnnnnnnnnnnnnnnnnnnnnnnnnnnnnnnnnnnnnnnnnnnnnnnnnnnnnnnnnnnnnnnnnnnnnnnnnnnnnnnnnnnnnnnnnnnnnnnnnnnnnnnnnnnnnnnnnnnnnnnnnnnnnnnnnnnnnnnnnnnnnnnnnnnnnnnnnnnnnnnnnnnnnnnnnnnnnnnnnnnnnnnnnnnnnnnnnnnnnnnnnnnnnnnnnnnnnnnnnnnnnnnnnnnnnnnn

SEQ ID NO: 55850 - DNA, 477 bp, Arabidopsis thaliana landsberg
actaccaccaactaagagatgagaaatgatgcaatcaaaattgatgatacaagtctttttttttgctaagtactaaagatggtcttaaaaaataataaccttaagatatttagttaaatagtttttaaaatatatatatattaggtcaagtcgtcttcacaagtctcacaagttgttttttcttcttcaagatgagctgtaaagaaagagcttttttaattgttataatttgtgaaggtctttgttttaaacctagttatttttaattttttttttataaagttgtttatacatagttaaatattttatcttttttaccaaaataaaattaaaataacaatatttttccttaatagttaattttaataaaaatgagagtttaggtgacaatagttaggagttaggacccacgagccggcagatgccatgacgcgttacgaacgcagaaatctcgactaaaccattgcttcacactgt

SEQ ID NO: 55851 - DNA, 1322 bp, Arabidopsis thaliana landsberg
ttggggtactctccagaggcggtaaatcttggtattacattagctggtatgggtgctagagttggtatctttgaggttgatgtctatgttccgaggcatcccgccatggcatatcataagagaccgtatattggaaatggaaatattctctgcctctcctagtggtatcagtaccgcactaaggactaatgcctttcgagttgagtatatgttcaataggttccgtagagtgaggccatcattccacatgaattcatgggggtcaagctagtctcatttgagatttgcaggacaagggcgtgccattatgagaggtcctatggtgtctggtgttataaaccacactccttacaacaactgaatggtttgttcatttccataaaatcattgacttcatgttttttccagaaacatttataaatctttttgaggaatttgatgcaggggagagctggactatcttgttatcgacatgcctcctggaactggtgatatacaactgaccttatgccaggttcggttttgaatattatacaaccatttctactttacttttagttcgttcgcatatgtagggaatgaaagtaatgcaaatatatatgtgccaatgctttttcccttgcatgtaacaactgaataactttgctagcaactgaaatatgatgaatattattaaattcttctgttagatgctatgactataatgttcttggtatcaggttgcgccattgacagcagcggtaattgtcaccacccctcaaaagttggcgtttattgatgttgcaaaaggtgtaaggatgttctcaaaacttaaggttatttccctgttccagactttgatcataaactctcctttttcttttatatggagcttgtgaacttgtttttcttctcaactctgcaacaaacagatatgaacttccgagatttatttcctgtttggttttacggagtaggtgccttgcgttgctgttgtggagaatatgtgccactttgacgctgatgggaaacgttattacccttttgggaaaggttcaggttctgaggtagctgactttatactgtctcttagttttacttcaagaaaccaaaatgaatatttcaacagcgacatgtacgttaaacacatttagataacttctgacaatacatctttggctgcaggtggtcaagcaattcggcatacctcacctctttgacctccccattagaccaacggtatgtatataagttatatatgatgtaagagttctatgaaacaacacagttgaatatttagcttttgactttaggaatgaaaagctattttgatgtccttggaa

SEQ ID NO: 55852 - DNA, 392 bp, Arabidopsis thaliana landsberg
tggggtatatgggcggtccccgtcgtcctaaaaaaggcaaataaagcatgtttttaatatatgcagatcgaaaaatcctatcagatgggcgaaaacaccgtgcaggctctgcgcggggtttccctgcgcatcgaagagggggatttcgtcgccatcatggggccttcggggtcgggcaagtcgaccttgatgcatattctcggtctgttggatgtccccaccagcggttcctatcaggtcgacggtcgcgaggtcgcccatctcagcgaagacgatctggcggttttacgccgtgaagtcatcggttttatttttcagcagttcaatctgttgccgcgcatgtcggctttggaaaatgtttcgttgcccttgctttacttccaaaaggaaat

SEQ ID NO: 55853 - DNA, 453 bp, Arabidopsis thaliana landsberg
agcccctttcacacaggccgaaagggtatcattgggtctcggccatccgatcttccccggacggtgcagattagatcagtgcaccccgaaccggtacgcagtcccgcggttggatctaaattctagggccgagatcacaagaagccccgatctcgtctgagccgcacgatggtcgatcagcgccccagattttgatgtgccgcgatcattccaacgcgtgcgatcacgatccgatggcgcggcgtacgctgtccttaatccacgctatccattgcaatcggacggcgcacgcacaatcccccaacgacggagcatggaggcgagcagagctcaccgtgcggcggcggacctcacgcttctctctcgccgcgctattgttcgatagcggcggactactcccctgttcaccacacggcggcactcgtcggtgaatgacgcacccgacgccgcaga

SEQ ID NO: 55854 - DNA, 423 bp, Arabidopsis thaliana landsberg
cagataacaatccagggacacaaaggaagaggcaagggtttaaacttaccgcgaggaagaaccgaaggaggaggacaaggatgcacatagcgcacagagccggacgacaacctctgcaagtgaaggacaaaggacagggaacccggaccggacactggtacagacccagcaagcgacaaagagcgcgaagaagccaccaccatgagcatcccctaaaaacagatcaacgaaaagaagaagagaggcaacacaaaaggactcaaacacaaagaacacaaacccatcatgtccacaataattgccaaacgcaaacgacgcacaagagcgagatattaagcaaaaaacagcacgatgagcagacaggaaccggagtgacacaaaacccaacaatgtggcacccaaaggagcaagcaaaacatacct

SEQ ID NO: 55855 - DNA, 1603 bp, Arabidopsis thaliana landsberg
gatttacaataatctatttcacatttttcactcagctctattgtctgagatattttataccacatttattacaactatatatatttatcaacttaaatctaaaatctatacatcaatgttgtccggaatataacatatacataatacatgatgaattatagtattatactatagttgtttgttatgcatgtattattcaaagattcgaaattagtgatactatatatatgtacatcagtacatggtcgagagtttgttagatgatattcactgcaaatctacactaaatattcatgtgaaaataattttacaaaacgcaggtagagtgttacatgttaaacgagtacgcttaaactagtgcgtacattgccgagtaaagaagttggacaaaaactgcatagcataaaggaagcaaataaaaaatgaagggaaagacaagacataacaaacgggtacatggttcacataccctgcgatcagattgtttcgttctttggtaatgtagcatgggcttccaatatcttctctatgcaaattatattattatatcagtacgtttttaaacatttctataatcaaaactcaaaaataataattcaatatatatgaaaactagttgtacgaaatacaaagtgttacccgatcgtgtcaaaatcaaaaacatttcaatcaggattaggaaacttaactcaaccatacgttacataggaaagtagatgctgcatagttgaccattggtcaaagtgtttaacacttttaaagatttttaacttaatagagaaagtaaatttttattctctaattaattagaaatgccaaatatgcttgtctttaaaaattgtcagtaaattaaagtcactctgttattatacattttatagtcacataaaatctgcaagcaaataacagaaaattatcaagtactcctaatcataattaagaagtagtaatacaatgattccaaaaaaaattactgtacttttttttaatgtgtgtgtgtggcgcaacgtcctagattgttgtctgccacgttagccagcaccagctgtaataactaaaaagtggcaaggttatgactggtaaaggttaaaacagtaaagaactacgagccgtaacggtctcttgtctttcttctttttcacaacgcaacttgcttaggtgaaagtacgatactatccctgtggtgaaaaagagaacttcgcacggaggttatgagattaatcacctgctgttaattataaattattggttctggtcaaaagtaagactggaccgtgtctccggtgtcacgtgacctgaatctccaattacgaggaaattttaaaaaatgattatagaagtaattagtattagtaatacgtgtttttttctctttgtcagctgccccatggaaaggcacgtcccagccgttggattggacccaattctgtaattacacgtgtcgatatctcaatcgtttgacttatgcggcattttggttttgccaagctcgttttttccggctataattagtttttgctaaaaaacagtcaaaaattaagatttcattctaattttaaaaagacaaatttccttggtcggcacgtaatatctgatatcgacc

SEQ ID NO: 55856 - DNA, 885 bp, Arabidopsis thaliana landsberg
aacgaccaagcacaaagataaagtaaggagttggttaatctcttagccttaggaagatctagatggaagaaatcaacttcatataccacgatcgttatttcggttctgcggctgctttggctgcaatgttagtgagtaattgaaactggtgtacaatagaaacaaaaactctcggaaggaattaaactctcacatatttgaaacatcttacaagtaaaaaagaggtataattgtataatcaaaactttaacttagaaacaaaattcttctaagacggttgtgaactcttttgtcttgcattacgattcaatatcagaatcagaatcagaagaagaggagagaaaatcaccttcctgaagactaggaataggatcatcatcagattcccctaaggactctatcttcttaccaattgatgcttcctccatcagactgtctttaaccgctaaatcctctccctcttgagtcccactcaccacttcttcatacccatctttgggagccgtaacatctttgtctgtaaccggtcctagagattcctcaggaaccttctcaggcacatcagcttgttgaccattctctgatgcaactatatctgtatgatcttggacactcaaagacacgacagtagctaaatcattcccaactttcaatctgttgctctcttggagaggtaaagtcgtgtctaaggttctctgaatcgcattgttagaaggaacatccgcctttgcctgccatctattgcctagatcatcaccatcatgagcaataacattcaacttattaagattaggtgtgttgtgtttttggctgccaaaagaattgctctcagcaaatcggttgctaagtgtcgggaggccatcgagtggaagtgccctcggatgt

SEQ ID NO: 55857 - DNA, 1334 bp, Arabidopsis thaliana landsberg
ttttgtaccacgtactcgcaaagcaaaagcgacctgagtttagaatcaatacctgctctagtgtatgttgagcaaattcagtcgtagacaacataacgccagccacaaatgatcccaactcaagactaagacccagcttgtcactgcactgaaaaagttttgcaaggaaccaacactctaagttaaaaattggaaattacatcaatatgctattatacttaaatacttcagtgtctattgtaatcatcatttttttcttctgtagtctattagtaagatgcaagctcaggtaacaatttactcagatgttataatacaccaaaagggatcagaaagctaagcaagcaccagtatgcaaagaaatgacagaattagacttacccatgcagatagtaagcagaatgccacagcagctaactggtaaagttcatttgtctgcattatataatgagagacattggcaataatttggatcccactttaagaaagaaataaagatagacaagtagtgtatatgaagatatgacgtctaaaacgtacttgagatgataattgaatcattagcttcagaaaacgaggtacaaatgaccacgttaatagagatgccacagtgagatatatggacaatatcagtagcctaaattagaagaagaaaatgttttatgtcagagacggtaatgaggatatataagaggttcctggacaaacttcttactagggaaccacttacagctttcccattgatataattccttgtagtaaaccactgttaccacccaaaactggaagcaaggcgaatagtaaaccaacaacacagtcctgaaaattcaagattaagctaaaggaaacaaaaacttcgtaaaacgaaatattcaatttgtaaatatagagtgatgtgagtgaaacctgaaagataagtatccctatagtaacttgaccatgaagagaacttgtactgttccgttctaccaaaaactttaccacctggtcaaattgacatgtggattagaaacagaaactctgagatgaaaccggaaagagagtagcttttgtattaaacttgagaagacaaaagaaaagaaaaataccactgcagttgatgacatagataaaaaggcaccaacaaaaataccctctgacaaccttgctccacacaactgcacatgtcatcagatatcaattctaaaaataatttcaagattgccgtatatgcacacatactgaaatctttggccataccaaggcagttacaccacacaaaaacatgagtaagacaatttgaagaagccctccaaggacagaaactgggccaacgactttcagctgtagcatta

SEQ ID NO: 55858 - DNA, 384 bp, Arabidopsis thaliana landsberg
atttatttctttcacattacctgttcacctatggattcaatctcttatcatcaaagatattttagttccctgtcaagttcagcagagcttgggtactgtgagagctctggatgctgtccctctctttgctttcatatacaaaacatttccaaagttcatagtctctacatatcattctacagaaacagctggagttgcagaacttatcttcttcctcctctccatgaaacttccaccacatgaagagaaaccaggacgacatctatgatgatgccaggtagactccttcttttattccttttcgatggcggtgtcattgaattcgcgtgagttagcacctgatagataaggagtgcttataggtgacgatgaaccgctttcttc

SEQ ID NO: 55859 - DNA, 663 bp, Arabidopsis thaliana landsberg
aatatgagaagacatcgaatcattttagaaaagaaaattaaaaggaaaatttcattctctttcatacgcattctagtttgtgtctttgcctcctctcgtttggtttctgactttctgtcagtgtccactttatttatttagtaaccatcaaccatgtgcttaattacattttaaatccatatatcttctaaacatcacatttttatactattgtagtgattgaattatcaaataaatgagatatttggtgaaatcatggacaaacacatgaactctacaacagaattccaaatgaaactagataaaggaatattatacaaatccaaaattttcttcaaaacaaaaacttgtttgaaaaagacttccggtacaaattgaaagctctcctgaagatgatacgaagcattttttttttcgagaagagttagaattttaaattctacaacaacaactgatatgagattggatgtacacaaacaatgtataaggagcttaattcttaatcatgaagcagagctttactctttatcactttggtcttgaaggagctttgttcttgatcatgtggcttaaacccctcgctttttttggtccatagccgcctgttgaagagagtaaaatatgagcgttcttgagaaaaaaaacacaaacgaatgaatcaac

SEQ ID NO: 55860 - DNA, 585 bp, Arabidopsis thaliana landsberg
gcgatgccgcccggctcgcggccggcgagcggcgagggcacgcccggcatcagccggaccgggcgcaggttgacatactggtcgaactcgcggcggaactgcagcagcgatccccaaagcgagacgtggtcggggatcgtcgccggccagccgaccgcgccgaagaagatcgcgtcgtgaccttcgatcctggacttccagtcctccggcatcatccggccatgcctggcatagtagtcgcacgaggcgaagtcgaagtggtcgaaccgcaggccgatgccgaagcgcttggccgcgacctccagcacgcgcagcccttcggggacgacttccttgccgatcccgtccccggggatgaccgctatcttgagttcgttggctgccatgctgttcctcggctggtggaatgcgggcgagtgccccggacggtcgcgcgacgggttcgggttcgctgacgggcggcgacgctcagccgccgaaaaactctatcttctggcgcaggcgctcgccgttgagccccatgccgagcagcaccgccacaagcacgcaggccttcggggccgtgaggtcgccggcaaagatcac

SEQ ID NO: 55861 - DNA, 593 bp, Arabidopsis thaliana landsberg
atattaaccaatcaaagattgacacgtgtttagaagatacgtgtgccgttgaagcggataactcgaggcgagctgtcacggtagcgtagccgtggggcctaaaagaatcaaattctatttctcaaaggctctcaactgctccactacatgacaaaattgggcctccccgtgactcactcatgactcatgtgcaccatttgtcaaaaatcaacaaataaaatgtatcaaaattataaccaatcactattgaccagtgtgtaattatttattccaaatcttttttgttcaaccataagtcgtatttaaaattctgagattttggactagtttggtaccatgaaccttaaagaataaaaatacctttaaacaatatgatttacttttcacattagtgatatctctctaggaacactggtctctctctctatctatacatcagctggagcatgccttcttcttttccacgaaattgctaaaaacaatcagagagcttctgataagaaattcccacccaacttgacaatatgatgaaaaaagaatatattccaacaagaaaagataagatgagaaaacgaattcgaatccaacttctg

SEQ ID NO: 55862 - DNA, 956 bp, Arabidopsis thaliana landsberg
cagcaaatgccttcccattaactcaactactatacatttataggaaacaattatttacattttattctaaagaaactccttttttatcaaaaaaaattactaacttagtgagtctccatactccaatgaccaattttgtcacacatattcaattttgcaaatgttacaaaatcctatcaaaaatttttggcaaatcaatgagcttcttcataagcaaaaatgaatcactaatcaaaaaatttgatgaagaaaacttgcagagaaacaatcttctaaaccatcttacactctgtttcactgtaatctaaagtcatctgattgttaccagtagtcaccacaagaacatttgccatcctgaaaatgatggtaacggatcggatctcgtataacgatactgcggttttcaagcttcgatgcgagcttgcaaaacacatgacaatccccacatattctcagattctttctgatcctaatgactttctcaataggtaatgtcatcaagccaaaggctaaagccagtttctcactatgatgtctaagtgaatcttccatttgttcaccttcaagatcttgtagcacaaagtttgtttcaggaacataaccaataccaatgagtctatggatcagttggttcagtttcttactgacttcaactatctgtgggtgagaattgtctccaattataaaagcatgaatctgtttgtttacttcgatccagctgcatccaggttctttcttgattcctctgtctctcattcgtgtccgaatttcttcaacactgtcccatttctgagagtttgcgtatatgttagacaatagtgtgtaagttcctgcatcctcgggatcgagtgctatgacctttttagctgcatactccgctagcaccatgtttctttgaaccctacaagcgccaagcaaagttctccatgtcacagcatctgcctcacactccattt

SEQ ID NO: 55863 - DNA, 678 bp, Arabidopsis thaliana landsberg
atgaaaggcatttgttttaccacttatgaaaaggtgagggtttttgaattcatattaaagttgaggattttttgtatggttttaaggagagatgaaggttattctacctatttttcctaagaagtgctgacataactatatttgtttgtcatttgtctaatttgtttttttgaaaattagaataattaatcattgtcttagaaaataatttgagcgtcgcatcctttatcattctaaatataccaaaaaaatatttatgggagttacatttttattataaattttcaacacatatatatatttctaccttatgtgttcatttaacactcatgtattttcaaccctatttttgttttgatatattatcttcatttctacatattagttgttcaatggatccattttacaaaaaataatttgcaaatatttaagaagttactaaaacatatattattgtaagattaaaaaaaggttcttagaattaaatatttacaaaaaaatattttattttttaaagtacagttttagtcactattttaaacaataattttgaaccgtaaattattttgttataactatttgttgtttcatttttttgttcacttattaatgcttttattatcttgaaaaagtactttacaagattatactttcaaacataattattttaaatttttt

SEQ ID NO: 55864 - DNA, 491 bp, Arabidopsis thaliana landsberg
tgattttatgcatgttgatgttatttatgacttatgataatgttactctcaagtctcaccgtttctccattcatcgatatgcttcttctctttattggtcttggtcaacaataaaacatgttctaatatgatagctacaagctacaaaagaaaaattattgtttgtcaacttcttgataacagttaattacaaattcatttaatacatatcataagtaaaaacaagttcttgatgaccacctagttgaccttgagtccttgacgatgaatgtaaatcaactttccaactagcgtcaaacttaaaaaaaacaaatattgcttattacattgatattcgtccaccaatatttctgaaatttttttattgagttggcatatttacctaatacctgaaaaaagcaaaagcaagagatgtggaggtggttaagtggttctgaggtaacttaagtataactaaagaagaagacgacaagtttaaccactcattaccc

SEQ ID NO: 55865 - DNA, 571 bp, Arabidopsis thaliana landsberg
cgacttaattatctttagctaggtttatagcgtcacgacctatgtgcaaggaacagttgacctggacaaaagaatctccgctatttatgcaagttgatgtcatgggctcatgtgaaagcagtattagactttccatcaatactaaaaacgcatcggccggttcccgtcaaatatgaaattcggtcttctatcaaatttattttttaacatcttagcaacatgcgggacattcacccagctttcatgacgcactgagaatagaacatttagaactactaagactgacttgtgaatctaataatcaggtatgaaaactggcctggaccagcggctggtgactccgtgtttcttcatgaatcatgttcatacacacaaatagctccgtttcaaagagaaaaaaataccaatatttgaccaatatggctgtagatttagtagttgctgtatgggacattacatcaggaaaaaacttaaaaaaaagtgatcctacaatgtatcaaggacggtcaagtcgtattatattgaagacaaatctaaacagggaacaaaccttacggcaataatgttgcat

SEQ ID NO: 55866 - DNA, 1420 bp, Arabidopsis thaliana landsberg
gcctacccaaaacaaacaaaagaaaaacaaatgtttgattttgtttaacagaattttgtcacttcattcatgtcattttctcaacatcaataggacgtgtatatggaatctcacaattggaatacttagatccaatgtaatctgatgagaacatcaacaccatgtgtagtgtagcggcgtaataaatatcgtaccaagttttccatcagtggttatattacaaacacatggacacgtttcttgtctcaagccttctgaaagaaacatctacgatagatatttactaacctttgttaaagctttttggtagaaccaaagtttaggaaaaaagaaaagaaaaaaaagaaagaaccaaatttaggcatacgttaagacaaacaaaatataagatttttttgtaacgtgatttatgggggcaaagactatagtctatataaaataaatgagaacctaaagccattaatttgactattaaaaactctgaaatggtcaatgatcaataatagtgttcaaaacatttgaagagttataaattcaatccgttgtattggcaaaagccaaaaagaactgtaaaagatctcattttctcactatattcctctatatcgccaatggctaataaacttttgtattgtgtaatttttttcatgtttttgttgcttacaatgttacgagtttggcgagaaactatgaatggaccgcatggtttgtataacaagtttatatagttcgattctatttttgtatagatttatcgtttgttaagacttaaagagtatatagataatatctgatacaatagctcttatgttttgcaacagtttacagccgaaaagaatggattgaaaggcttttcgaatccggatttacttgtcttcgtgtgggatttcatgaagatcaaaagtactttaggtctcattttctacaatagctaattagtacatatactaatcaatgaagataatatgtatacatgacttgcgtgacaatgatttattacttgtgtttttggttgttctggcttccttcaaatgaagataaccatattcttaaataattcatggaaaagggtctttttatgcagatccgggtcgatcagaagtctcatgtcttggagtccaacatatagagcctagcccccatatttaactcaaatttactaattaagagaactttttttgtgtaaaaatttcaaatttaattaactaactaagaaactttgaacatcataaatttaatgatatcgtttttcctttaatgtaatgatatcataatttaatgatatcggagttggaaaagattaaattctagatttgaaccaaagttttagactttcgttgtagcccctatcacccgttagtcgtatattatgatatcgttatatataacctttaaatataaaacgaatagctaggattta

SEQ ID NO: 55867 - DNA, 584 bp, Arabidopsis thaliana landsberg
ccgagaaactataaatagcctcagtagtactgagaaaatagcctcagcagttatttcagatttcatataaacacaagtacacggacttagccatttagagccacaatgtacacagattgctagtacctcattcacagaaagcagttttttcttaaacatatgctttttagccacaacaggcacaagtacatagatttagctcggtagtacaagtgcaatgcattacctcatcactactacacttaatacaaaaggaacttacagtgtgtacgcagtaccacacagttcactaaatacaaaaggaactgcattaccaaacagttcactgaatacaaaagtaactgcattaccaaacacacagtacaacacttaatgcaaccaaccaaaagtaatacaaacagacaacatccacgacgcaacccgccttgtgcgcacgaacgacgacaagctacatagccgcgacgaccttcttctcagcgaccatagctgcgttgccggcttcctccgcagcaaaattgttactaagattgtgtttccaagagtgaatgctgttattctcaagtattattgcattttacaaaatg

SEQ ID NO: 55868 - DNA, 590 bp, Arabidopsis thaliana landsberg
cctgagagccattaagaagaagtttgagatgcctggcgagatcacaacagacattgaccagaacggatgtgaatttgttctagtatttggatatgaccgaaatcaatgagctagatgagaacggggagaagaagaaggttccttgcacctattacctaaagtattgataatttgatatggtttgattttcttataaagtagtgatagctttcaaacaaattttttatttttagctcttttgctttgtaatttttaataaacttgaatcatgttaaagaaaattacataatcataaatacagtggatcatcatcatatgataataataattgatctttaacatacttgaattataaaaagaattatgtaggcagccccaactaaaaggggtagagcagaggtgggcaggaggtccatacgttttgtaaaaaccaatcgatctggaaaactattttttgtttatttcataagacaagaataatgacaacaattattgagaatttattgttgtatgaaaattgagaatcatgaaaaaaaacattgttagaaaaagaaactctaaaatcaggagagagcactagtgttgtttta

SEQ ID NO: 55869 - DNA, 586 bp, Arabidopsis thaliana landsberg
  unsure (1)..(586): unsure at all n locations
cacttaacatgtttaattactgcttttctatctatttcaattcccgtgtgcttctcaaatttttagagttgatgacagcgcatcggcttctccctcctctgttgctagtcgatatagatgtgatagcttctttagggcagccagagtggatttgggtttgcaccccaccattcccgctcaaaatttggtttcgtggtcctttcctgaattcgagcgacgatttggtattcaacctcgatttcatcccaaaccttcctttggggtgtgaatctaaacttgtagagaggcgaaccttcagcctctcctaatctccagtttttagtttcttagtgctcaatggcaaaatcttcagttgttaatgcggttgtagttggtttgaaggtaagaagattcaagcccaccatctctcgcggcttttgtgccatcagagtagtgatcctgaggcctgaaatgccaagtaatatactgttaccgttccttttctttgctttttcaggcatcagatatactcctacatcacccctatgttccaaattcgctttatcntggccccgatcttatgaaacatagtagatctgctactgtg

SEQ ID NO: 55870 - DNA, 418 bp, Arabidopsis thaliana landsberg
gtcgatataaatttgctttctaaacaagtttatatccataaaaattaatattgtttctctataatttgacatgtattatctatatttgatttcaaatatattatatgtacgtaattatacgtacaactgattgagtgtattgatatataaaaatgtatttattttaatttttagtgcatatgaagtgtacagcattagaaaaatatatatatttctatatatgtttatatggctatacacttgtacaattaatatgctgtactaataataccagatacatttttatacgaatgtacatgtccatgagcgatgcatatatatatatctagatttgaaattccatatacataatgctattcgatgttgtgagtaaaatattgattgtagttttatatttgtctaaaagctggtgtccatt

SEQ ID NO: 55871 - DNA, 1533 bp, Arabidopsis thaliana landsberg
gaggtatcacatctcacaataaaaaggttactttcatatgtaattttttgtcccaagaacatgcatagcatgacacatgtttgaatttgggtggttatacatcaattgcactagtacgaacctctaaacacacatcatgatcatttttaagaagtaccactattgttcccttaaattatagcacctacaaggtttggtccaacgtaacattattgtgaattcgttcataagaaatatcatttcaaaatttggatttatgtggtatttcatatgttacatagatttttctaatcaggaggacgtaccaaaataaggagaagattctcgaacgatggaaatgatccaatgactttggtttagtaaagacaccgacatctacccattcattattcgtgggaccttcttcattttgggctatgaattttttctttaagatattcaagtaagcttacgtgacgtcttattatgatgttcgatgaaaactccaaatattcgttgacgttaactaaacaagcgacgcgtggtctcatctttgtgaatactatttatcagataatgacattttatctaccaattattcctattggtgaaacgttttaaatccaaagagataaaactgagattttggaattgacaagacgtaattgtgaagatagtgaaatgcaaataaggaaaccaatcgcattctatctactgcaaagacttgattcattgtagtgttagaccactataaggaggagccgagtcggggtattaaaaatggataaaaatcgattagataaaaaaagtgttacacgggtttatcctatcagattgtgggtacaaaacattatagtcaacaatttaaatatggatttgatcagttacataaaagcaatggcggatttcgttttcaagatctccatgaaaacaaacttgagtagtcatgtagactaatcaatccataatctaaacgattgaagttcaatcggttttatgaccgataacacttggaattttaaaatacttttaatattctaaattttaaagtctaaactgtattttaatattaatataaaactaatttatggtttcgaatggtgatcgaaccgcacaatggaatacagtttatatagtaacaaattatatatatatatatatatattcgttattatttaaaccgtatcattcagttgaaccgtatgtatttactcgtattttatatattagaaaagaaaattgcataaacaatacatgagaataataaaataaataaaaaaatagagaaaaaggttgtttttagtctgtcgtggggatcttctgagaaaacaaatagagacctttctttaacacagagaaagagcctgagagacaagtgagaaacgcaacaacaccaccgaaagagaaagtccacattcgaaagaaacaaagaatcaaattccttctttcttccttttttggtcttcaattattactttaatcttctttcccgctctctattcttcttcttgtttaggatcaatcaccgtttagctttcttgccatacgttttct

SEQ ID NO: 55872 - DNA, 932 bp, Arabidopsis thaliana landsberg
gaaaaagatttcaaaagaaaaagaatctctgtggagaaatagttaatcaacttataaaagaaaaatttgtaatcacaatatttcttttatgaatatgtggttttatacttattagtgtcgttgtctttacggttttttgcaaaaactttcgtttggtatattgttcaacaaaattcatcttattgattggagaaatgtactcataagtatatcaatgagacatataatagaaatctgaataattgtaaacattttaaaatgtcgatctgaacacctagtttagatgatgaagcctacatatgatacaataccactatctcgagtggtgtttttgtattttgaatattgtatgtaatttttgcaggaggattatggtgtcttcacgaagtagattgctgcttcacgtagttgtggaaaggagaaatgatattcttctttttggtgttaaaagtcttttgtaataggtttgattgacttatgtgtgcttaccttggtttgtgaaacagtaacctatgttaggaattgttttgttgttatgggaaaaacgttagctataagccttatgtttttatgccttaatttgagtatatcaaatttagatgctctattgttatgggaaaaacgttagctataagcctcatcaaaaaatggtgtgttttataaaatgtatgccatttttttttctttggaaacatgcgttttgtactccggctcttttatcatcgacgtttgtcattgtcacgtcatcgatacatgcggagtttatttagcgggttacttttgttttttggtttttggcagaaaaccctattataaaacatgcgcggataaaattttaacatcttatattatattatattagagattttcgaaatcaaaagaagatactctaaagttttcactataaagcttccatctcttccttgaactta

SEQ ID NO: 55873 - DNA, 548 bp, Arabidopsis thaliana landsberg
tttcctgataccatgaatgttaacccttgtagccaaatcccttttcacctgtgcatagagcactaaagttctccacagtttggggaacatcatcaccatacaatccaataacaatcctgccagctaacttccccactggattgccaacacttatatcgaaatacaccttgtgtgttattttcgattgcggttcagtcaccacctggaatacaaaatccacatcatattatgattccatagcttttagtaaatctaatggaaaaaaaaaactaagagtaagctgaataaaacaaccaattccatcaaatgacatcagtgactaacacgatatgagagaatccctaacctcatcattggattgaacagagaaacagcggtggtttcttttggtataagacgtgtgaaggaggagcgatgaggctgagaaggtagtcgaagactagaacgagattgaatcgaatgaagatctggtgcgcaatcggcaagaggcagatgtgaaagcggaggtattgataggagaaagtcttcgaggaggagctgagagcgac

SEQ ID NO: 55874 - DNA, 458 bp, Arabidopsis thaliana landsberg
  unsure (1)..(458): unsure at all n locations
ggactctagaggtcgccgccgccagtaagttccctctctgcgcgatccttacagtcccagccctgtgttgcgccgggtgaatccatgcaatgggtgtctggccgcttgatctgggtccgcgtcggcgaactctcgccatggggcgcactagccggccggcccagcgctggttggggaagaagcccacaaccgtccgatcggttgtagacaacaaagattagatctgagcttgctacgatggtggccgtagatcaagtaatgggcagtccagattagtttgatcataccgctttggcgtggggcactcctgaccgtttgatctgatcggacagctgttatcgcgtacctgtttggagtcatggcgatatcatcttggccgttggttctgatctggcggtcnnnnnnnnnnnnnnnnnnnnnnnnnnnnnagttgcaaaagagtcctgcagaatcatgta

SEQ ID NO: 55875 - DNA, 513 bp, Arabidopsis thaliana landsberg
taagtttaggtaattaacaacagctcagctctgtctttgagtttgagctgtatgtgggtctgtttactttaatgcacaaagttcacgatggcttcaagggagaatggttccgtgcgcgtctgtttctgtctgtgataaaaataaacaagattcttaaggaaatggttaattatcgcaaaacctaaagtgtgtagcaatcgctattgtcaatgggacatcgagacggatgctaattctagttggtccgcactccacattaatgaaattgtataagaaataaaagagaagtacttactattgtcctgtattggggtatgtagaactatgattattttgaacactaacattattaagcgtcatacaagttgtctattacaaggattaaagaaagacatgactaaaatatgagtgagacggacatgataaacaaagatgtctgcgtgaccgataaaacttctgagaaattactttcacaagagatagaaaaagaaaacttttaaggaattagcatga

SEQ ID NO: 55876 - DNA, 611 bp, Arabidopsis thaliana landsberg
  unsure (1)..(611): unsure at all n locations
cccccccccctccccccccccccccccccccccccccccccccccccccccgggggggggaatttgattgaaaacacaggcttcccctcccgggggagaaaacacccccccccccccgaggaagacgacagcgccctttttcccccccccgagtccaagcccccccccacccaacaaccccccnnnccccccccccccncnncccgccccnccccccccccccccccccccccccccccccccccccccccccccccccccccccccccccccccccccccccccccccccccccccccaccggccccccccccttctttccccccgctcgttcgccccccccccccccccgccgtccacaaacccacccacccccccttcccccccccccccccgctcccccactaactcccccccccccccccccccccaccccacccccccccccccccccccccccccccccctcccccccccacccacgcccccccgcccccccccccccccccccccccccccccccccccccccccccctccagacccttcccccgccctccccccccccccccccccccccccccccacctccccgcccccccccgcccaccc

SEQ ID NO: 55877 - DNA, 528 bp, Arabidopsis thaliana landsberg
atgtcttagttttaccagttgaacaaagatcttaacctagatttaagacgattatcgttatgattaaacaatattgaactagctggacaagactcaagagatcatacatttcattaaacaataaggattttgaaaccaagaaaatgtattttaataatcatatgcgactgtaaagtctgcaaaagaaagtaagatcatcgagtccattttttccaaatttctctcacttttctttttgctttaacaatttttttccaaaagaaagtaatcataagtgttcaattttttatatttaaagatattttcatataaaataaaataaacatgtcttaaaaggaatcatttataccccactggcctctctgtctctccggaacaaatgataatggagaagcaaccagataacgggtcccactctcccctatctattaatactctcgagagaatcgcgtttaccacacgcgccttctaatttccagcctctttaatactacacgagctttaaaggcgcgtggatatagtggattt

SEQ ID NO: 55878 - DNA, 1060 bp, Arabidopsis thaliana landsberg
ttcgcagttagaagacgttggtaaagaagtgaaacaagttttacctcaagggactttccgtaagcacaaaagaacagacagcaacggaagtaacactacaacctcatcacgaagcaataccctccataatgataagatggcacggtcaaattcacaaagagctcgtagtcagcttttcgagacacatcttgcaaaactgttcaagcaaaaagtagaaatattcaccaaggttgaatttacccaggtaaaaacgaaagaggttcccttatagttatatcaaacacgcactgccacacgctcatcatctcctgatctgttttcgtgctaaatatttgtaggaatccgttgttacaacaacagtaaaactttgtctgaagagtttgcaagaatatgtccgtctccaaacgtttaaccggagcgggttccagcagattcagctagacattcagttcttaaaagctccattgaaggaagcagttgaggacgaagctgcaatagacttcttgctcgacgaggtggttacacctaaagctccttcctttacttttcttcttattaccatcaagcagaggcgctatgtctatcttttgcaactgaccattgattctccgaccatgatgtgtgtttgtattgacaggtgatcgttgcggcttcggagagatgtcttgatgtgattccattggagccaccgatcttggacaaactcatacaagctaaactcgctaaatcaaaggagcacaaccacaacacagtttcttcttaaaagttttcataactcaaacaaagtatacatgatttttgccaatttatttccgcttcttgttatcatccgtagtgtaaatcaaaaccattgaattgtactctctagcattgaaccagtaaaatctacaccgtaacttcttctttacttttgtgaacaaatctttgaaatttttttttagcaacatgcaatttgacttaaaagatatgtaaaaccctaaaactaaactacataaattcctaattacactaaaaccctaaaattgagtgccgaaacaatagaaaaaatattcatagtcac

SEQ ID NO: 55879 - DNA, 456 bp, Arabidopsis thaliana landsberg
tgtataaaactacgtttaaacaaagtttaaacgtttaaaagtcaaaatttcacccatgagcatcccaacgttttatcgttttaataaccttggctccagtcggtggcgggggagcaacggagccggatggagtggggaagccggggggtggcgcccgcgagtgctgcaaggagcggatgggaggcgggtgggggagaggacgccggtgttgcgcggcgaggaggtggctcgtgccagcagcggtagtgaggccgcctgtgaccgcgctcgtggcaatagagaagtcggggaggccgagcccgtcgtaggggaggtcgctggcggcgtcggggaggagcagagcctccgtggtcgccggggttggatccatggcgatgggggcgcgtccaggctgcatgtggaggcggtgcgtccagtcaggagacgcccagacggcggtgcggctaggctgcaggg

SEQ ID NO: 55880 - DNA, 577 bp, Arabidopsis thaliana landsberg
cagaggccgatgcccaggatgaagccgaagtcgcccacgcggttgatcaggaacgccttcaggttggcgttgatggccttgggcttggtgaaccagaagccgatcagcaggtacgacaccaggcccaccgcctcccagccgaagaacagctggagcatgttgttggacatgaccagcatcagcatcgagaacgtgaacagcgagatgtacgcgaagaagcggttgtagcccgggtcgtcggccatgtagccgatggtgtagatgtgcaccatgagcgacacgaacgtgaccaccgtcatcatcagcgccgacagcgggtcgatgaggaagccgatgttgagcttggtgccgccgatcagggtccaggtgtagaccgcgccgtcgaacgagtgcccgcccagcacttgggacaggaccgcgagcgaccccaggaatgaaatgaacacgcacaggatggtgacgcggtgcgtggacttgcgccccagctggctgcccaggaaccccgtgccgaaaaacccggccaggatggcccacaccaatggagccagcgcgatgacgagataaagcgtagtggaac

SEQ ID NO: 55881 - DNA, 138 bp, Arabidopsis thaliana landsberg
tttggttaaagttgttgattcaaagcattcatatatcattaaattatacagtttttttttttttttcatctttataaagttaaataatttctgtaaatgttgtgagacacgtataaaaagggggtgatatatgtcacc

SEQ ID NO: 55882 - DNA, 1885 bp, Arabidopsis thaliana landsberg
  unsure (1)..(1885): unsure at all n locations
tttggtgtttgtgaatattgccccggtaaacttactttacaaagaaagaagagcgttttccaagtggatatcaatacattttgcggtttatatattataggaacgactattgatttgtttttttggttgtagcaccgtcacgagtctaaagttgatgaaaggagagggtgaagcaaatgagaatgttctgaaagattgcgtcacaggctttgcgattgcacaattacgacttcaaggagccaacatcgatttgataacccttaattacgataaagcgtacgaattggtgaaaactgcgttaaactatcctcggacttgcgaagaaaatctccaaaaactcaagttcaaagattcatctgatgtttatgacgatatcttggcatatagccaactcacctctgttgctaagacgttgatccaccgtctctagatcaatatatatgtcgatctggttatcaaaaatatatttatgtcgatcgtttgctaccactaataaaataaaactccattatgtatgtcacgcgtgatttaatttcactcatcaacaaataaaataaaataaaataaaatgtttagaaagtttatttatttaatttagtaaaaagaatctggagataaatcttcaatcatgttgaaaagtatgattagggggaaaagagaaaaagaaaaaagagtatggttaggacttaggagagtatataccatatgcattaacgtacatacacacgaatatcaacatcattggagacacatcaaataaaactatataataacgaaagttatgttttgtatatttgatattataatacgaaattttacatattatctgcatgtattataataattattctaattatatttatctttctttttgtttatgtggaacttgtcttgcgacttatgttatgtaatagtgggaaaccactcggcgtagacttgttattatctgtttttttttctttcttggattggatttgatagacaacatataaccatgtgaccatgccctagaaatatagcgttagaaattcacactcgattttgaacttcaaagattttttatttgtttttacgtaagaaatgttgtctatttggagtgttacttttttcatgtagcagaaaaacattttcgtgtatgattggcctattgaatattttgaatgttgttctattttcttggctatgtgccctttcacactacctattgaagacaagtatattgaattgtgcaagctgttttcgatttataaaatcgatcgattgcttattacgtgagcaccatgaaccataagtgttatcacatcaaatttttgtaactagtatcactaaatcctttgatcagcaaaattctcagaagaaaaaaaaatgtcaccgtacgtgtaagcattgactagcgttacttaaatcgatattatgttgtccgtacatatataatcggttttgaccaagttcattttacgtcatcggttataggtaaaccaaatgtttttacacgagaaattcgttaacttgaatctcatagatcatatctaaactatagccctgcatatgaaaggcataatactagtataaattccaagattctattgagaaatataaaagatgtttaattaaaacttacaagttgaagcaaacaaactctaattaatgtttctatatggattatatatgtatctgataagaatttgaatctgaacaaaaaaagaaaaggatatatacactatgacatggtcaatttgatgtatataaactaaagatgactcacgaaatgacatccattttattttattttcaataattttgtaacataagaagatgtccacacataaattgtatataaatatctttgtttacttgacaattngccacgagaaaacaaacaata

SEQ ID NO: 55883 - DNA, 1125 bp, Arabidopsis thaliana landsberg
  unsure (1)..(1125): unsure at all n locations
tggtactaaggatgcatattcacaattatttacattgagatgttcacacatcatgttacgttttgagaggcatgtacggaagaacttatggaagaaagattttttaaaaacgcgatgagcaaaactggagagcacaatagtttttgttatcgaacaaagtaggatacctgtgagaaatggagactgaactatctcttgttacatgccaaatttaacaacagaggtaaatcatgaatgcaaagaaaaagacagacaatttggactattatcaccttaatggttttatctgcaaaccctgcaaagagcttgccttcccaatataacaaagatgtgattactgatgaacctgggattgaaccaacgtgagcacagtttactgatatctcatctcctgacaattcctacaaaccggtgttcggtaacagattattaggaggaaaatccgtcatcaagtaatggataaagtattgattttctttttacacttccgataaagattattcgtcactagctttgtcaagaaactagtggattacctgtacattgatggttttgtcccaacctccagtgaatagccatttaccattcacggcaatgctgaggattgcgccattctgtattttcattgacttcatcaatgtatcatccctccatatctggaaaaggaatcagaagggttcaggtttagagactggcaatacgattgaaatgaagcacatcaagtaaattgtttttaaggaaacatatagacctgtatatctccgttttgataagctgcaactagagtttgatcgtctgcagctagagacagaatagatcttacaatacctggagtctcttcccccaacactgtcaacaaactgttgtcacttagactccacaaacgaacggttccatcccaacttccactgtatagtactccatttaccacaacaagcgttgagactacagatttatgaccactcatagtgcaaagcaggcttccatcctgggaaaataatcatcatcagataatatgaggaagaaatattcttgtccgcatgacaggtgtccaggnaaattaaannncaaacagtgaccaagctttgatagtgttatctccnctgccagtgtgcacatgcccat

SEQ ID NO: 55884 - DNA, 613 bp, Arabidopsis thaliana landsberg
  unsure (1)..(613): unsure at all n locations
cccccccctccatcccccccncccccncccccnnccccccccccccccccccccccccaatgcactccccccccccgggctggccataaccccgaccccaccccccccccccccccccccccccccgcccgcccctttcccccccctgggttcgggccccccccaccaaaccccccccccccccccccccccccccccccccccccccctctcccccccccccccccccctcccccccccccccccccccctccccccccccccccccccccctcccccccccccccccccccccctttttcccccccccccggtgtgcgccaccccccccccccccccccccccctcaaccaccaacacccccccccccccccccccccccccccctccctccccctccctccccccccccccctccctcccccctccccccccccccccccccccccccccccccccccccccttctccccccccctccccccccctccccgcccccccccccccccccctccctttccccctcctccccccccccctccccccttccccccccccccccccccccccccccccccccccccccccccccccccccccccccccccctccc

SEQ ID NO: 55885 - DNA, 659 bp, Arabidopsis thaliana landsberg
tgttaaaattgcgttcctcaatccaagaagtccacgtgttgggattttgtaccgcagaaaggttgttccttccgacctgtcattcaggattcacatgcatggtcagattgatcttaaaagctgcatactgtatatttaccaagtagcttatctgaaaacataaaccctcaggcgtctcacacacaaaaaaaaaggagagaaattaacatgacatcatgtattgttgttcttgtataaatgcagtaaaagtggacagatagagaaaagcctttgcatggccccgcttgagaaaatgaccaaacggttctcaaagcagtaacaagtcttgtgtatattcatatgatggttacagtcatctaatatcaccaaactgctgctacaaacaatccaaaaaaataaccgctatatatcttaatcagtttactcccaacacgattaaactgttaccattataacgagcagtattacacaatatcacactaagaggtagaagaattatgtacacccatcaccttgcatataaaataaaggaatggcaagagaacaatacatcccaacaccctgcatacaaacatctgtcacgcgtttggcaagagtcacacaggcccatgtacctctggactcacagttgtactgatggtggatgagtaatggggctt

SEQ ID NO: 55886 - DNA, 587 bp, Arabidopsis thaliana landsberg
  unsure (1)..(587): unsure at all n locations
tggacgaagttttttgtttaactgtacaagannnnnnnnnnnnnnnnnnnnnnnnnnnnnnnnnnnnnnnnnnnnnnnnnnnnnnnnnnnnnnnncatggatcaatcgtacacggtaaggttggaaagattaggtcctcacattttattttatttttttgataaaaggttaaattagatcatcacatatttttatagaagagaaaagtccaactgaataaaaaaattttaagagaaaaacaatattttcattaataaaccttaaaccgttcttaaaaccttctaaaaattactttaacaacagaacaagaccacctaaaaatgacgcatcattatttttttatttaactttctcattgactgttcatattacatatgtagaggatgcttaattttctaaacacaagttacgtcgttttatatcacatcgaacaatattaatatgtagcaaaaatccacgtctaatgtttttggaaaactaatacgacaatacaagtaaacagtcaactttattctttaatcacattatcagtcaacttggccattattattagtcaaaagttttaaattcacatgtttaatcaatat

SEQ ID NO: 55887 - DNA, 700 bp, Arabidopsis thaliana landsberg
tgctaggtcattctttacaagccagacctgctccttcttagtctatacctcgggcctactcacttaatagctcatggatgccaataacacatggaactttaaaatgttgtgtactgtgtacatgcattagcctctgggattcactgataagaccaaaaccaaacaatatgtcttttatgtcgagaccaaacaagcctctcggacataaaacatatataaggtctacacttcacgcaaatttaaaacactttggtttcgttcaaagtagatgtgatctctccttccttataaagtttcaggaaaaatatattgtctatcttctactcttcgtatatagctgacattactctcaaaatctcgactcaaatattatttgaagacgatcatttccagctagctctaggtatcatatggtggacctaaaaaaactacactcttccttggcatatatatgtaattattttcccgccaatgtaactatgttgcaaacgtttacattacgcagaaatggctgactctaacccttgtctcatactagttgactcaaagaaaagtttggacgacaattcctgtctctaacccattttacatatcttccttatataaagtggtctttattcgaccaccgagcttgtggtacttggcgttcaaatttagaattttgtgtcgtcttaattaccggcaaagtgcttccacaatc

SEQ ID NO: 55888 - DNA, 531 bp, Arabidopsis thaliana landsberg
ggcgaagctcgacggccggggacggttctatttgttcgagccggaaatggatcgccgcgtgcagatgcggtgcacgcttggactcgagctgcgcaaggcctacagcaacggcgagttcgagctttattaccagccggtggtcaatctctcgcgcgacgaaagcagggggttggaggcgctactgcgctggcgccatccggaacgcggaatgtggtcgacagcggacttgatgccgctggacgaggagatacgactgactgtgccgatcggggaatgtgtgctgcgtgaggcctgcaccgaagcaataaggtggccgggccacatcacggtcgcggtcaacctgtctacgatacagtttcacatcaaggcgctgattcaggctgtgatgaccgtgctcgtctattcacggctgacggcgcaccggcttgagctcgacagcacggagtgcgtgctggttgaggatacggatactaatctcgcgaccctgcatcagaggcgcgaactcggcgtgcatagtctcgatgacgactt

SEQ ID NO: 55889 - DNA, 120 bp, Arabidopsis thaliana landsberg
cgcttcctttgataattgtcatgctatgaatatcactgttacaaaatcatacctttgcgacagaatgagaggacagtgcagattgggtggtgagccgctagacaatgaactaaaagaaac

SEQ ID NO: 55890 - DNA, 1124 bp, Arabidopsis thaliana landsberg
gaacaaattaaagtattgtatcaaatctcaatcaatattataacaaaagtgattttaaagagatcaaagatctaagcatccaattaaaatggaacatgaaatgaacatataccttaaatgatatttcaagttctatcattttttcagtccacacagctaagattttccttagcacttctacttctcgaggattcttcaaatctaaactcacagataaagatgcaggtgatgttgcatagttggtatcccacttcaccatcccgttgctttcttgcttctatatttaaatacacaattaacaaacatgtcaaactaaatataaatgtttatatccttaagtgtaatttcttgtacctgagggggacatgagatgttgatgctagtatgaggcaagagtcttcctgctacccaatagtttctaccaaactggagtctaggaatttcgagaacgacgttatcactctcacatgggatatattctatggagagaatatcaagacgagctgcacgcacttcaatgctatcaatttggttgcatgacatggacaagatccttaacgttttatgatcaatcttcaaatgaccactggggttgaagaaaatgatttgtaggataagaacctcgagggaggggcaagacgagatgactttgttgaaaacatcaacctcagcaaagatttgaaacaggtcaaggtacttgagatttttacaattgttaaaagcttgtgcatcttgtaatatgtattgatatagcgagagtgttcttaggcttggatggttgaatgtctctgtggacagcttgagcacattgtcttcacctgttggtgcgaagcgaccattaaaatttgcaaggataagatttttggtgtgtttcatactagtcagtgattggatccaagaagcaagcatcccgtcttccaattggtatgaataatgtgatattatgcaagtctgtaaatggccattgtgcttgtttataacctgaaaaatgcaaaaatgattaagatttaaataaggactaacaattatgaagagtctatgcattcaataaacgcgtgcctcttatacactatatatatgcggaattctatagaacacatgttcacatgtagttttacatatgc

SEQ ID NO: 55891 - DNA, 167 bp, Arabidopsis thaliana landsberg
ctgagagcgtgctggcttacactccttcgacggattgcgaagatttacttggattggaagcctatgttgcttattcgaaatcaatgttaggtctagagtcgaatgatgtgaagctgctaccctctctcctggtcaacctattgactgaagactctgctttctcaaat

SEQ ID NO: 55892 - DNA, 1420 bp, Arabidopsis thaliana landsberg
gatggaggaggtcaagatactcttggatgactgtagaagaaacctttcagttctgcaatcaataacatatagtgagaatggtcaggtaaaataacatctctcccaatacatagatgaagatatcataccttatatttatccccagtgtgaaaaatgaagatccataggctcgcactcgtaagacctctggctctactcgctctttagagtctaccatgttatctccctaaaagaatggcgaaagagaaaatgatccaattaaattcaattagttgttgagacagcaagagaaatatggcctaactatactagctccccagccaaaagaagctaggcaataggccatgtgaactgaaaaaattaaactactttttcgaaaaaatataaattatcgaaacctaggttcggccatctctgaaatttaaatttgcgattattaatgcttaatctcatggtctatagcatgaaagctatgcattatttagcaagggctatgtgtcataaacagaaatctatctattgacatgcaagtgacatactaaatgtccaactagtgtaagtagctctgacctgggaaaaagtcctacaactttcaaggaacaaaatattcaacattaagccgaaaacaactctttctttacctcaataccaggctcattcaggagggcttgaaggatcacatcacttggagttcgacaaatacgagtattcctcaaaagctctttctgaatttcaagaagacgggtatatctattacagcatatagctttaagcagaagcttctccacgtcaatgcagctctggtcgagagaaaactcagcttccttgccagtaagtgggtcaattacaaatgtgctgtgagaacatttaatctggagatctgaccctggttcaattttaataaatgggccagaatttttatcagaatctgaccagtaaaaaagtttcattcctggcgttcgaagactaacagaatctgcctctccttcttggttcgctggtgtggtaccagtatctgaaattaagtcgaagcgaattgcatctttccatctcccctgcagaagagctcggacctgtcttatgactgtgtccatgacaatggcaacgcacagctcatggagcaccgcatataaaattgtgaatggattttctgccacggacattcgacgctctaaatcatctccaaggatatgccgtcttgtcacttcaagtttaatggggccacttctttcaccaacaagtagatccaaatgcaatatccgccacatggataggtgccctcggtaaccaagagtaacaagaactttaaattccccatcgacagataaggtaactgtacctttagaaattttcacctctgttatttcttttggaagtgtgatttcaagcagtttggaacgtacaagtacctccagctttc

SEQ ID NO: 55893 - DNA, 499 bp, Arabidopsis thaliana landsberg
ggcagcacaattaccaacaagaacaccgctgacagcatttctcctttctagactttctggtgagtcggctgacattgtaaagaaaagagaaacgacgaagaacaagaagaagttgtggtgcttgcaacaaagtgccagtctgatttagaccaactgcacagtggccgagagtttcatctcgagagttattgcccactgccactgtagtgttcatagtgaaggagaatggggcagattcttagtgaaaaaaaataaaaattccaaaagtagcaataatgatgaaattttgcggcaaagtaaagcagtgcacattcactcaaattgaaagtaaagtggctcgtcagttgttgttctctggtgatcgatgtgcactgaagaagtagaggaagaagaatggcggcgacaacaatgaccactaccacagtgtgtgaccgtcacatcgccactggtgggcgacagtttagtcgcattgtcgccatgtagacgtgatagtttattt

SEQ ID NO: 55894 - DNA, 548 bp, Arabidopsis thaliana landsberg
gaaacttctcgttttacttggtgtcattggtgccagtatcattttctgaattcttataggtaaaacttcaaaatgaaatgaaccttcgaaagaaagcggagtcttctgctgcaacagctgaggaaaaagctaaacttttggaggataaactaactcacctatctggaagtgtggacagggagaagaaacgtctcaacaatgatattgctcaactgggtaaagaagcaaagctttctgtggctaggattggtgcagatgtaagtatcgattaagaaacttgatagcttgactgaagttttgtttttggtttctcatgcaattatcgaatttgcacctgttttcctttgcttttagcttgaaaggatgcaatgtagggcacaaaatgctgagacggactcaaatcttttaagatcacaactggagcatcttaaactgatattagacgaggtaagctatgtttgacgtgcatcttagataataataacaccagtcataagtcatcattcgctctggtaatttatcttgctttctcatatgattccttttat

SEQ ID NO: 55895 - DNA, 425 bp, Arabidopsis thaliana landsberg
  unsure (1)..(425): unsure at all n locations
nnnnnnnnnnnnnnnnnnnnnnnnnnnnnnnnnnnnnnnnnnnnnnnnnnnnnnnnnnnnnnnnnnnnnnnnnnnnnnnnnnnnnnnnnnnnnnnnnnnnnnnnnnnnnnnnnnnnnnnnnnnnnnnnnnnnnnnnnnnnnnnnnnnnnnnnnnnnnnnnnnnnnnnnnnnnnnnnnnnnnnnnnnnnnnnnnnnnnnnnnnnnnnnnnnnnnnnnnnnnnnnnnnnnnnnnnnnnnnnnnnnnnnnnnnnnnnnnnnagtcggcagcatgtcgtttgaagcgtgcgcggtgttaagcgatctgacgtcggcaggctgtctgcgggcgtgcccgctgagggatctaccagtcgggattggtgtcagggtctctgcgttatggagtcgtgcagtgcgcaccggagaggcggagggctgtatttggc

SEQ ID NO: 55896 - DNA, 507 bp, Arabidopsis thaliana landsberg
  unsure (1)..(507): unsure at all n locations
aagtaaatgatcgacctcaatgccagtggcgccggcctcgatggctacagcctactttccgcgctagtgcaggcactgttcgccgacgagcgtgatttcatcgccaatgccgcgcagttctcggcttttctgtatagccaggtcgatgacctgaactgggcggtgttctacctcaatcgcaacgaagagctggtgctcggcccattccaggggcaagtagcttgcgtgcgcatcccgttcggcaagggtgtttgtggcgcagctgccggcagtcggcagacccaacgggtcgaggatgtgcatgcgttcccggggcatatcgcttgcgacagcgcctcgaacagcgaattggtgattccgctggtgaaggagggtaggttgattggtgtgctcgatctggacagcccgaagcttgctcgcttcagtgaggccgatcaggtggngttggagcggttggcggcgatcttcttggagctgactgactgatgattgctgcgtgatcttacc

SEQ ID NO: 55897 - DNA, 1246 bp, Arabidopsis thaliana landsberg
  unsure (1)..(1246): unsure at all n locations
ctactgccaaccatttcacaggacctgtgtaccctgtagtacagagaggcatgtatgaatatttccatctctcttccacacacatattgtcttatcagcagatccgctaaaaacaagactccctgccacttctaggcaaagaacagcaagcttgtggcccttgagaataccaccgtagttcaactgtttctccctctcccaaaaattgaccaaaccatcactcgaaccaaagtacactgccgcaccattcttgcttacagccaaagctgtgactgcgctttcttgctttgttaatgtttgcattagtgtatgctttgtgtattttccttgttggtctctcttccatgccttgactgtcccatcggctgatccagagaaaacaatcgcttccgttgttgataccaccgagtttacagcatcatcatgagctgggattgattctagacattttgaatcagcaatcctccacaccttaatggtccggtcccatgaagcagaatacaacaacccttgctcatcatttaggcttaaacatgaaacagcatcggcgtgtttgatccagagagcagtgcggtgtttcttcacctcaacatagtttcttggtttgagagatgccttgaatatatctttcaaagttggtaatgttccagaacgtttgtgcaagctctggttcttaggggagactttccaaactcgaatctttccgtcttggtgacctgtgaaaatcttctcccctgaaatcacaatggccttaaccaatccactgttacatttgaatgcactgaactcctttagattcttccacacacgtatgtttttgctatcagagccagtataaagaagatcttttgtggccgctaatgaatagatgtgaccttcttcacggacaagcgagccaataaggccattttggggtaggttttcttctacagtagaccattgtgtttgagtaaatggagttgcttggttccnnnnnnnnnnnnnnnnnngagaaccttcacaactcattctatcatacatccccgtgccaaccgcagatgcactgctattgcgtataccatactcttcctctgtttgttgggtcatcgtggaggaaagattcggatcagaatgcatcatgttggcatattttaccctaggaatgctatcagcttccgtaaacattttgaaataatactaccaccttcttgttctcctcanaaaattaacaactctaaattgagtaatttgtgaggagagaaaaaaa

SEQ ID NO: 55898 - DNA, 1621 bp, Arabidopsis thaliana landsberg
  unsure (1)..(1621): unsure at all n locations
cagtcatagactttcagattcatgtctacaagttcaaagcatatgcacaaatgactttgatgtaagaagtagtcgtatatccgaacgatatggttcttatcctcaggatcatgcatcttgtttagctccacacccaagcgaagagtcagagacagaccccactagcgattttctccgcctagaatatgaatacaaaagatcgttcaaatcttgaataattacatgccgttgtcccaatagatacttcagccaatgcctgctgatagtatgcaagctggttttttattccttttgcagcagcagagctgtttgtctcaggaacccagcatttagcaacctgaccaaaagtcccatggccaagaagatctttgacaatgtatctaagagaacgagtgaagcttattagcttaatcaaatagacgtctattgtggatagaaaagtggttcaaattttatgcgtctgacagcacaacaaaaggaggatcattattggtataataaaaattgaaaataaataagacaatagcaaacctctgccgtgaatctgaactgcaaaaatcatcatttacagccagaattagatcgtagttgacattatcaaagccatcattgttcacaccaactgatggagtagtcaagtaccgcttgggattcaactctcctctatatttgaactgtgggtcacatattttgtacgtctcaaccaagtccctagttagtctcaccaccacctgcaaaacatacaaatatatcaaagttaatctgagctctgaaaagtactgcaacagagacaaacacttcaactgttaccatccttgagtgaaatacatttctgcgggttttgtgataatagtgatacagttcaagaaaaaaaaagatacaaagagtataaataataaggataacctcgcttaaagtcaaggcaagaagacaccaacagttatcagtaaattccaaaaccatgcccaactattacagcagaatggcgccaaataacagcggctagaaaactaatggagagacttgctataactctgccagagtccagacagatacacaacaaggttcagattggtcatcttaatgccaattgaactctggtatgcattcaaattatccaaaaaatctaccagccaattttcttagcagataaactagtgtgcacaaacattcccaatgcaaacccaaagatcatgacagacttcaaccacgtaatcatccactgcctgtgttgcaactaagattaaagcaataacatgctcacttgtttattagagttaaaaaaaaactgattttggttaaaatttaaccaggaccctcaagaaccaacaatatgaaatggctaaaatttgaaatgaattcagaaatgagctgattttggttggatgatgacaccgaaaaaggaccaacagatatctctaccttgacgttgcattaccagtgatatttgtgttggactatataaccttaaactaaagttgcatggtaaatgcattaagctatatgtactaggtaatttaaatatgtctaatgtagatagatactgatatataacatcagttttcaaacaagctgagatacgatataatacaaattttacacataatntatgtaaaccttc

SEQ ID NO: 55899 - DNA, 919 bp, Arabidopsis thaliana landsberg
acttgatttgcataatgaatcattaagagggatttgatggatcaataaagcaaatcatttgcaatcgtccaatagacgtttcaagccaggaggtttgtaagtgatacagatttgcagtcccaagtatgataaggtaagagacttgatattacaaccgttgcaaagcaaacctggtcgcttattcttctgtaaattgacttgtgatgttgtttgtttgcgctcctcaagagatctctatatgttgttcatgatttgatgttgtcttttgcgcctccatcgtcctttaaattggtactatccacagctgatgcgcaggcttggtcatccggagcttcgttgttatcaatctcagtgtctgatttcaaagagatacgttgaatgaatgacttgagtaatataatatgtcaatggaatcaagaaaaacaaagctatagattcatatctaattaccttcagtttcgcctgaagaataagccattcgtcttgctcttggttgctgttgcggggttggctgtaacacgaacagatattaatgtcaaagacacaaacaagaaacaaatgaacaaacaaagaaaggtagagttttcactttacctgcagttttgggcggagagcttccaaaggccctttcggcttctgtcctttttgctgatgaaaatgtcaaattcatgtctttagttacttaagagccctttatatattccacaccacaaacaaagacagtagcaggaagaacggatagttacaaaggttggtaatgcaaaagactaaccttgcctaaagcccaatcagctgagtcaaaaaacgcacgttcatggtccttaaacgaaaaataaacacagctgaatcagcttctaagttattacatctcattctaacaatggcaaaaacaaagctaccttagatatcaaaggaatct

SEQ ID NO: 55900 - DNA, 584 bp, Arabidopsis thaliana landsberg
agaaaggctcgatctcccacggtgagaccttgtttggtctccgtatagaagatggctcgtcccattggatctaaacatatgaagaagagattttacagaaagtatgcaacaagaatgatatgatatatatcatctctagaaaatgattccaattcactaaacctgcaatgacctccatttggaagctggccattgagaagatagatctccactgccaataatggtacctgtaaatctgaagaagaaaccattctaaaatttcagacaacaacattcaagagaggactcataaaaaaaaaatcaacaagtgaacaaagcaaaaaatgagaaactacattctctcaggagactcttctccttcgaatctcatcctataccgcataccgagagaaaacccggtcttcatcgccatcatatacttgttcacactaattataaactggcttatcctgaacaaaaaacagacaatgtcaagcttaaagcccttccactagcaacctatacaagatggagaaagtttaaaacttaaccttggtttatagaagacaacaaatatagttgttgtggtaacagcatgagaagct

SEQ ID NO: 55901 - DNA, 961 bp, Arabidopsis thaliana landsberg
acttggattactcggaagcttgaagggaataacatttgatgatgtagtttcaccgtgtcttctgaaactgtgtgaggcaggggaagtagttaagcttgacaaaggtgaacaactatctcaattcgcggcgcatttcatcagcgatactgatcaacctcagacttgcaattttgcaaacttttttccacttagtgaaggaacacctcttcaggtgccaattattatctttgcatagttctaaacctaaccaaaattgataaccattacacattttgatatgaggttgtgctggttttgtaatcttgaataagcgagcggagtggatcaaattccttggagcgtttacaaatcttgaaactaaagccaatcaagtctatgactcggttagtgactatttgtgattctcttagcaaaatctgcctacatggtctattcttgctgtttataaagtatgttatggaaactttaaggttaaagcaagctatacttgcttgtctcaaatggctgccaacaagacaaaatccttcaagccgattgtagcctggatgggatatgatcaaaatgtaagaaaactttcttcttcttcttttttgtcaagggttgtctctagctattttaactgctttgtttcttaaaatacgaagataaatgtctgtttatggtttcaaactcataacgcataattgttttttcaagggaggcatgtggagttttactaaggaatcacacaagctaaaggtacgcatttcaatatttgacactttcaattattcccttaaatgcttgggaaaagctttggaactgaacatgacaaacccatacacaacagtttgtagaagatgctggtggtgaaaatatcgacaagtctattagcaaggtctcttacaatgtctctgatcctgatgatttggaagcactccatgccattttatgtggtaactgagcatacttgttttgcttt

SEQ ID NO: 55902 - DNA, 484 bp, Arabidopsis thaliana landsberg
tacgattggcccttacaacacatcatttcgtcaaaccccgactttctttacctgcctttgaatgtttagactacggatcggtttctcaatcagttgttaacacaaacagactttaaaggaaccctggctgggggagaccgctgtgaagtctgttcgatctttcagacttcgattctttccaaatttacaactctcgaattagcggtcgaaacgcataactcgtgtatatccaggacagcgttacaaaagcagtttgagcaaatgtacacagcaagatttggcaaatctccgacctatctagacgcatatcttgcattcgatacgatgctaattgttggaaaagcatttgaaggaccgcggccgcaagaccataaatctttagcggataaaataagacatcggtttctggacgaaggcgtaaccggaacaatcgagtctgacggcaaacaggatcctaagaacaaacagctatatttgacccact

SEQ ID NO: 55903 - DNA, 1070 bp, Arabidopsis thaliana landsberg
  unsure (1)..(1070): unsure at all n locations
gaaaagacttaaattacccaaaatgtaaacctcttcataagttggtaggattagacaagtaacaaagatgaagggcctaaaaggcggctgcagaatatacatactgaaatgagctcaagtagaaaagaatttgatcacaaaactaaagacaagacctgagaacatatcttcagaatttgggccaactacataagggtgaaccatatgtgtatgtgaatttttaaacaaacacttgcaaatacgcgactttagggcaagtaaaaaatccaaacaaacctgtaattgttaagttggagaagaatccctaagcctaaaagcaactgcagcccgagaaatccaatcccttgaaatggtgtcaaaagaccactggcgataggtcttagttttgtacgatcaacctggatataaaagaaatttgtaagacaacataatctaaaacaaaacaaccatacaaaatcttgagctttacatacaagcaacccatctttgtttatggaagaatgaatccagttacatgaatgctgtgtatctaccctaactactaaacacatatttcaatcgaaaaacatattccaccttcaccatatctaacacctgaagtctttcactttttgaacgaagtcatcagaacatgcagataagctattacccaaaacagagatatgactggaaatgttgtcgtaaattgatccaacatagaaaaatcaagaccagttccagatgtcaaagcaataacactttcccaccatggttacagaaaccatagttacacaaaacatgtttcctaaaccaacatactaaagggatatataaatttgacatcactttatcaccataccataagatagcttaaaaacaaactgacctttgtatctatgtcctgatcaagcagatcatttatagtacaaccagcacctctaagaagtaatgctccgcaaccaaataaagccatatatttaaaacttggaaggcttccaggatcagcagcccacgcaatcgncctatgcaaaaaagtggaaaatcagagtatcgatctatatacatagctctggaactaggtccatgacgaa

SEQ ID NO: 55904 - DNA, 481 bp, Arabidopsis thaliana landsberg
  unsure (1)..(481): unsure at all n locations
ccccccccccccccccctcccccccccccccccctntcccctcccccccntcccccccccccccccccccccctccccccctncccccnccccttccctcttccccnccccccccccccccccctctttctcccccccccgcctttgttttgcccccccccccccccgcccgccccccccccccaccctccacccaaacccnccccccccccccccgccccccccccccccccccccnccnccccctttttcccccccctccccctctntcgctccgctntcccccccccccccccccgccccccccccccccccgccccccccccccccccntccccccccccccnccccgcccccgcccccccccccccccctccgcccctcccctcccccccccccccccccccccccccccncctcttccccccccccccccccccccccccccccgccccctccccccccgtcccccccccccccc

SEQ ID NO: 55905 - DNA, 467 bp, Arabidopsis thaliana landsberg
ggatgtgaatctggccggaacgaattccgttttgaccagagtgtcttccgtatagcccgattgaaacataaacttgagttccttccccaggcggtggcattcggtcgtgagctcgctaccccgcatgtggggcattactacgtgggtgattaccaggtgaatttcgccggcgtaaccttggatcagatccagggcttcaatcccgttggcggccgttaaaatctggtagccttgccgcttgagcgatcggcagataactttctgtaaaaccatttcgtcttcgaccacgagaatcgtttcggtgcccgaaagcttctgcggcacgggagcgggagcgcgcgcctcttacggggcttcctcgacctggggaaagtaaatgcggaacgtagtgccctgacccaggggactcttcacgaaaatcagcccgcggttatgcttcacgatgccgtagatcgtgcacaggccca

SEQ ID NO: 55906 - DNA, 594 bp, Arabidopsis thaliana landsberg
  unsure (1)..(594): unsure at all n locations
tttttatattagaaacattttatgcaactaatatttttataattggttttgctttaaacgcgtacttattttggaaagaaggatagtttcacatgaattaaaatggaatactaaaaaccccgtcttaaccgtaaaagacggtttaaaatatatagacggttcgcgaattatatttttaaactgcttgtacgtattcgtttttaatttcatgcaagatatagtaaagaaatttgggatacatgaactattttaaaattctggttttagaaatagatagtctaaaacttcatatatgattttttatcgcaagcaaaagaattattttgttaacaatcatatttctgaaagctttaaactatctatttctgaaaccaaaatttaaaaacagttcattcacaccaaatttatttttttactctatcttgcatggaataaaaaaaggatacgtgcaaacacttaatatatataaactgggaaccgngtatatatatatatatatattaaaccgccttttatgttcaagagagctttntaaggatttcattttaactaatgtgaaactctccttctgtccaaattagaccaccttcttta

SEQ ID NO: 55907 - DNA, 1124 bp, Arabidopsis thaliana landsberg
atcgctatcgcatattaatttgatatacactaaatttcccaacaaagcttggatggttcttcgtttccaatttcaaaactctactctttaggttatattattggattctatatactgtaatacctgtgttctttattgttgatgctcgcttgcctacgtataacttttaatttaacaataggccttaaccagagggagattttaccttaatagtgcagataaagaactgacttccatttgtattagggccagcatttgccatacttagaactcctggtccgacatgggatactgcagcgtatagcacattattactttcatgaattttataaaactgaaggtttggtatatattatactcagctcagctaaaaagagaatgcagaaatgtttagttaaaatgcattaccactgataaatatgaatgctaaagcacagctggggagaatgaagaagaaggaaacaagtgaaaaaggatagacttacacttgaaattctcatccttgaatgtacggccatatacacttttacctccagttccctgctcaacaattagacttctgtatcattattatggaattctcctagcagttactagaagaatcttcggtaactgagatgggcagaaacagaaaataacaatatatttctaccgagctacagctagttgcatacccacgaaccagtatataagttccctacagcccaggtattatctatatagaaaagaacaaaagtctaagattaacaggggttgttcttctaaagccactgatctacaaatcagagagccagctatcagaaagattgtctgtagaaagctctccaaaggtcaggctttttcctattaatgtacccaaacatgtgctttcaagagcgactctaaatccgtacaagtaagaacttaagcatccttccttatcgagaaagatttgacttatactatgtaccacatccaagaaattaataaacatcctgccatcctgatatgagacagcttactttactttgtgatttggcagaaaataagatgaaccaaagtaaatcaaaagaaacataatatggaccgcaagtcagctaacaagaaactggtgctgccaaggaattcagccagaaaaactcaca

SEQ ID NO: 55908 - DNA, 2008 bp, Arabidopsis thaliana landsberg
  unsure (1)..(2008): unsure at all n locations
tccaatatataggagcactagacctccaacataagaatgcttttcattctttaagctcattgaaaccacatgggtacggagaaatttactagaacccgagatattttccatcatccaacatctacgatcatcgaccaaattttcttcgacattaatcgaaagctatattttgtcacttatagaaatttccaaatttattaaaatccctaatttcttttcgtcgtttgaaattaaaatccctaatttcttgtaggtggaatcccccatattcgtcttatcatcgaagatgatcattagaccaactatttccgatgttagtcgacccgccattgtccaccaattgaaaccactttatcgtgacaacatgaattcacaacttccggtaacatccaagatatcggatcgttgacctaaacttttcaaacgagttgaattcttttgcgagttgaaaccaaattgttatggagacatgtactagatagaaccccgagatatttgccatcaacattcattgaccaacatttcttcgacatgaatcgaaagctatactttgtcattttctagaaatctccctaatttattaaaatcccaaagcaaattataatgcgggaacaacacatacaaagtagcgcacatataaatacattacaggaaagtagataaaagtaggtgaacatatatcaagacactaacgagttttgtttccgcgattttaaggttctccattagcacgcatcgttacgttcaatttattgaacttgagaacgtgagaagaaatctgcgtcgcttacacatcacattgtagtgttatatcctttaaccgacaagattgatcgtatgatcccccggattcaacgagatcacaacacgatcacaccacgttggggatgccacgatttgaggaattggttggaaactaagagctagatattcataggatgcattgagaaccatatgcgcggaagatgattgccactaaccaccaagtatccggaaaattgaacgatatggcctctaaccacaaactatcccggaaaattgaacgagatgcaacctacaccgggatctgcatttagtggaaagacaagggtctcgagtgcagagagaggtcccctctgcatcttgagccctgatgtttcgttgatagaaaaagtatacttgcaacccatccttctttgttgtagagacatgggtcttcaatcttgaccggattgggtaaatcgatgattcaacacttctacacaagtcatatttaccctaaagtaccacaatgcaacctagattcttttttttttgtcaacaacacgcaacatgcgagttcgaatatgggtggtgacaaagtgagtacactagcgcncccccaaaaaaagcgcgagcactgagtacttaaagatgttttatttttgaggccgattacaataaagcgcacggcgagtaatattttgcataagacctcactagttttcaatctatgtgtttaagtttacatgggaaaacattgtaaaataaaaaaaaaatcacatttaaaaagaaaccattgtaacttgttagataaactagttttgtgaaatatacccatcgaacggagacaaacgcatttgtgcaaacaaataaacaagcattgaaagcttaaataaaaatagcttatcaataggtcggataaccggccattagatatttccccttgttattgtaattaggtagagatgggcatttaagtttttgatttatgatttataattttataaatgaaaacaaaatattaacctaattgaaaccaaaattttatccaatatttggatcgaaatattttggttcaatagaaaagaaaatccaaataataaaaatatgtaatcaaatcatgtgctgctaactatttaaagtctaaatgtaaattagaattggggaggaaaaacatatatttttgtcatttttaggttgatttccatctcgtcattgatatggaggtttctcaacacgattttaaaaacaacaaaaataattgagt

SEQ ID NO: 55909 - DNA, 1059 bp, Arabidopsis thaliana landsberg
agaaagcattccattcatcatttctagaacaactgtagaatctgtcctcattcaagctacaggataatagtcagagattacaacaacattgctaaagttgcagatgataaatgtaaagttgcaagacagctcaacaatatttgcggatatatttacatcctgaatcaatcaaatccaatgaaagcattctcaaatactcacaccagaaggtacaaaatgtgttgccattccaattgctacaagttctttgccgttcaatcttgccccagttaaagccaagaactctcctgcaaaactcaagtacattagagattagccaatgcatagctggaaccaatatttggtgttaccggtttagcagtaacctaaatgaccaggaagacgtgaatggatgtaggagaacccgcaatcagtgtgaaacccgaaacttgcttctggagtcgcaaaaacctatcaatgaaagaaatagttaaagctgtacttgtttctttgccattatacgcaaataaaatgtgaagcagactaaacttctaactcacagttttctctgtcacaactgaaaacttcatagggaccatcaatgctgcacctccacccatcgatattccattaaccagagacacctatacaattatattctgttgaatactcctcaagaagacactttcatacaataaaatatggagctatactaaaatccacctgcgtcttcttgtatgtgtggatatgataacacagccagtacatccggtaaacaacctcaaggcaagaatcctctgttaaaaacgacatatcatcattaagttacgacaaaatctctttgaatgtgttcttttgacaaaacatgttgattctgttagcgtcttacttgattcctgtccgtgataaaacacctttagatcaccaccggcggagaaagctctacctgtaccctgcacaaataagctatgttatgaaatatatctacagtagtagaaaatcataaacagaccaaggaccaaagaatcaaaccttgatcaatataagctttgtttggtcatccttctcccacaattcaag

SEQ ID NO: 55910 - DNA, 962 bp, Arabidopsis thaliana landsberg
ccggggtgaaaattctgggattagcgtcccctcactgaaatcattagtgctagactcgtttcaggacgcggggggattatctgatgtactcttggatcttccaagcctatttttatttccatctgaacgagattcctttctaacatcagcctcataaatctggtgccctccatcatgtaaagatgatttactaaattcctcagccatctgtgcttgtgactgcttatcagtgctcactttagggggtaactgcgccactgcgttttcttttgctccagtagaagaaccctttttcagagattttttgtactccttcttttgatagttccttcctttcgtccacatgttttcaaggttttcaggtctaagaacctctgttctcctttgcgtcgcaacctctagcgaccgagcccaatcagcagagtgctgttgaacgtgtagatctgggtgtctgtcatttatgtttggtgatttctgctcaatagcttttgtcaaattcatattttttgcttgactatcgaaggctgacaatggggcagaatttacattctgctcttccgccgtaaactgctcaaagtttccttctttaataagattgataatgatctcaaacacttcattgatacgcctggtgcagacaagaaaaaaaaaaagaacttactatagtttagattttatcaacagaaattctaaaatcaaaagttgtccctagctagtttgcattatacacattggtgaaggaattttgatagcaaaaaccactttctggaagacagtggcaggtagagaactcactcggggcatgctacattcaaaagaggctgtattaccaagcaagtaacaattgctatagctattgctcaaacaagagggcactgagcttctcgtggtctgagaaccacagattatatgccagcaactattttatgatgaagctgtaaaaaaaaaaccaaagagcgttt

SEQ ID NO: 55911 - DNA, 1300 bp, Arabidopsis thaliana landsberg
  unsure (1)..(1300): unsure at all n locations
ttgatgactgatcttcatgaagcaccaacgatataagtgtggtcaggtctttattaaacgaatcaaattatcttcctcactcgttgtttcatgtcttagagccgtcgtttcagatttcttcttccagagagagttaaanagagtaacggtgaggtttggatctaatcgaatcaacgatggaggttgcttttccatcttcgccgccggtgaaatgcatcgccgatgaaagattaacagagatctccatggatttcaccaaattaggattcccagaagaagatgaagaaattaaaaaattggagagatcgtggagtaagctcgaagaatccgtcgaatttaacgaagacgatgaagaagaagatgaagaagaagagttttcgtttgcttgtgtaaacggagaaggatctccaattaccgctgatgaagcttttgaagatggtcagatccgtcctgtgtttcctctgtttaaccgtgatcttctcttcgagtacgaaaacgaagatgacaaaaacgacaacgtttcggtcaccgacgagaacagaccgcgtcttagaaaattatttgttgaggatcgtaacggtaacggtgacggagaggagacggaggattctgagaaagaaccgttgggaccgtattgttcgtggacaggaggaacggttgcggaagcgtcgccggagacttgccggaaaagtaattcgacgggattctcaaagctttggagatttagagatcttgttttgagaagtaacagtgatggaagagacgcgtttgttttcttgaataatagtaatgacaagactcggactcggtcttcttcgtcgtcgtcgtctacggcggcggaggagaatgataagaaggtaataacagagaagaaaaaggggaaggagaaaacttcgacgtcgtcggagacgaagaagaagacgacgacgactaaatcggcgcatgagaagctatacatgagaaacagagcgatgaaggaagaagtgaaacacagatcgtatcttccgtacaaacaagtcgggttcttcactaatgtgaatggtcttagcagaaatattcatcctttctgacaaaaataaaaattaagtttggtttttgggtgattttttttgttttttggttatgtaaaaaaaaaattaatttagtactcttctttggggtcacttctgcttggtagattgaaattttaaatgattgcagaaaggtgtactgttttttttcactattttctggtgtcactgtccagagtttggcttgtgtactaccccattttgtaagtaaaaaagtatataaaatagat

SEQ ID NO: 55912 - DNA, 839 bp, Arabidopsis thaliana landsberg
ttccgtaaacactattctagctatcaaccattcaacccttaaacgatcttcatttgacgctacttactaagcatagtcgcatatgcaagctacgtataaaatatggaacttgatttgccaagatcaatattagatcaatccttaaagatgctaaaacgagatattatagtttattaatccttagaaagtacccaaaaattaatatcccacacgaaccaagaaaattatgacctaaaatcttgaaaatcttcctcgtttgtatgctttcggattccgtaattttcttcttggactttggaaattgtcaaccttgcagttatcttcaattgacgttacttttctttgtttcacttacaagctaataatcacatatgaaacctctgttgtcaatataaaccttaataatcacatggtaatacaatttcgtagcaaatactcaacgtccaaatatttcatgatatcaagaaaatagttgtctaagattttgtaccgctagctatcttttactctaacctctttagctaaaatccatacaccatatgcaatatgcggtttacacgtttaaaaaaaaaaactactcttcacaaacatttccaagcaaagatagattaagaacaatataatttccgtaacgcctagaaatataaccacccaaaaaaaagccggggagattgtttttactcttatgaatgtttatcatttaagtatctctcagccacggcggcatgaaccgcggctccaacgggtaaactatcttcatcgatcatgaaatgtggtgaatgagcaatgtggactgatccgagttcttcatttcttatgccaatgaagtagaaagcggc

SEQ ID NO: 55913 - DNA, 591 bp, Arabidopsis thaliana landsberg
ctgatcaagggttgaagctattgtgcaactcgtgcctttcagatctgaggaagcttatagaggctcatttcaaagaagtgggcagcaaacagcagcagcagcagttcatcttccttctccttggggtatgtcattcggctctatccatgtcatgctttcacccaagtgctctgtgctacgtgcttctcatcacaatggcgctcatctatgaccatgtactatcttggggaaatggaacccatgtaacaatagactaatgaacgtcttgccaacgatttttaaataaaaacatatataagtaacttgggaagaaacaaatccagccaaatgtatataataaaatcaaccgcaacatcccatctcggtgccccataagcaacgaatcaatggaataggcgccgtaaaaaacatgaaccccctggatgttttgaaaagcatgtgcccacggttcaattcacagagctctacagtgacagatgggcagctcaaaggataagaatgacggacctgaacacacttgaagtagctcacagtgacgccgccagagttggtcagtatgtcggggaggatgaggacacatttctttgacag

SEQ ID NO: 55914 - DNA, 577 bp, Arabidopsis thaliana landsberg
atatgactatcgaaatgaaaatgataacattcacaatctaaaaactgaaacagtggctttggttttttcattaaaaaacttatatatgatactataataattccataatacaatatttattaatccatcgagtattgacttatagagattttactgtcgctcccaatttgacttatggattgtcatctgccgatttactgtatttaaggaaaaaaagttctacatccaaaatatagaaaaagtacttttttcttcacaaaaaaaagtacttgaatatgatattttaaaaatacaacataacaattatttggtgtgagaaaaaaacaatcatttgatatgataaatgtcagaatcaaaatatctatttgatacaaaaaaaagttctagacaaactctaacaaaaatttaatatttaaaaaccctaaaccattatatatattatcttatcatgcccaaattaacaaaactcgataacattataatccgtctagcttttgcaatctatgtaacaatatggtcactataacatcataaattatattaacgtgaggcaagaccaagataatttattatttta

SEQ ID NO: 55915 - DNA, 1368 bp, Arabidopsis thaliana landsberg
tggagatttactcagacactgacatgagtactccagtttcaagatcacagagcaagagacaataatttatcaatctgcgtaagctttcaacgcgtttcatgattatgagctattctttgaacttgttcttatgcattttctgtttgtttgtttttttttggttttgaattgagatgagtagagaccatagaggattgtttgtacatatgaactggatttgtgtttagagctcctacatcaaaataatatattggtgtgtacagtactattgcatcagctgttcagatctctaccacataccatacaacaacaaagtaacatagaaaccactgaaagcaaattagctcactaaccaaaatataacagtaacaatcaacactagtcaatgagaagactaaaatcccaataacactagcatcgatggagactagtatttttatgttgaacgtgcaaaatcattgagaataacaaactctcatcgaaaaatccttagacatgccaagttgttgtaaataacaaatccaatatttcataatttgagaaagagatgtaagatataaagaaattagctcttattggtgtaaataatatattgtatatttgttcattttaatcattaatctcatatttattttgaagtttataaaacactcataatatggccatctcgggtgttgtaaagtccatttcctgtaccagtctaatgattgcatgttcaaaacttggattcagtgtcagattcaccaaaagtctcgtgaaaggacaatattatcgatggagtatcaaatgcttctgatgaaattttgtttgatttgtgtgaacaaattaacaagtaaccttcgtcaagtagaagatcatatggtttcaattttcaagtgaagttttatttaataataatgttttaatcttgaagacttaaaatttgtactgatttgagtatttatgagtttttttctatagagtttattgtgatcaaatactctatcaaaataatgaatgtacatttaaaaaaaataaaagtaatattagactaaaaactcccaaattctcttcaaaattccgtttttcctcgtatgttttttttttttaaaattcataccataacaaatacacatagttaacaaacatcactgaaagcccataaggcccgtcgataccatcacaaggtaaaaaaagagttatctctacccaaaacgtatcgagagatattggagtataacaatgccaagtgttgcacaagaaagtgatatgcttttccatcatcctctgccacttggactctgattccggtgaataaaatcaataccggagaaacacgacacaaaaagaaaatattgaaaccagccaccgtctatgaaaaccgactga

SEQ ID NO: 55916 - DNA, 929 bp, Arabidopsis thaliana landsberg
tcagtactattttcaagtgaatgatcaaatatgtgttaaacaatttgaaggtttttctctttatatgggtagatagggtatgtatgttagtcgttttgtgctctttgccaagtgggcatttctttctataaaattcactgtctctagattagcatttgtgttgttgacaagtatgcagtgtccttgttctaccctgaatcatttaggtttgcttcagaagatttaaattagttgcttggtttttgctagtgatgctgctgaaagtaatgtttctgttctaaactacttaaagttacctggtcaggtagttataattgtaaacttccaagttttattcggatatgacacctgaagatttcattgttcattacattgatttgtctttagaggctaagttcctgaattgagctgataattttattattattggtatatgagcaggtacattatcttgtaaggtacttcttagcaccttccttatgctcaattcactacaacattttgctatttaatgtcttttggacaatttttaggaagtggtttcccacagagtaattcatttccaatgtaaatggatggatcttgaaacttgagaagcttaggtatgctcccctccagtttattgaacgaaagattcagcctttgcagagaagatattgctgcgaagctctgaggtatggctccagaaaacttgttttttgatagatcaagcgtctccaagcgactcagttctgatattttctcgggaatgcttcctgccatggagtttcttgataaattcaggattcggagatacaagaggcctaagatttctcttgggatctctccgcttatgttgttccctgaaagatttatgctattggctatggctctcgtattcacgagctctggtcacaatgaagactagattctggaacacctcattgttt

SEQ ID NO: 55917 - DNA, 599 bp, Arabidopsis thaliana landsberg
ttcattttatacatcggtcgctaatcagaaataaacaaagaatttgcattcatcctcaatatatggtggtttcaatcattgttcatatatatagaaaaatgtattttctttcattacttttttttctcacttgttacttgttagtattgcgccaacccaagatcttcccttgatttgtctttgtatttgatatagtattggactatgggttatgacatgtttctgaggtatcaactattggttatgacattgttacaacttacaacttgtcaattttaatgggtaggtagaaaagaaaccaaaatgtacaatcactttatcaaaattacatttcagaaagaaagaaaaattatgatctatataaacatatatataagactttctaatataatacatatttagaatgtgattggctagggcttatctataaataacacacacacacatatgcacataaataattaagattatttcttttagaaaagaaaagaaaacatatgaactaatgagttacgctctcgctggaaaaatagttctcgtctattctatcactagatacatagaaatcatcactagatttttcagcatatcgctcattc

SEQ ID NO: 55918 - DNA, 586 bp, Arabidopsis thaliana landsberg
ccgttcgcgccgccgctgccgcctcccggcagcccccgtccgcccgctcgctaacgtgcagttgttgtggcttgcaggggaagggtacgggcagcttcggcaagcgccggaacaagacgcacacgctctgcatccgctgcggccgccgcagcttccacctccagaagagcacctgctgctcctgcggttaccccgccgcccgcatcggcaattgttagatccgcctccccgctttcttcttctccctctctcttcgcccgtctgccccgctgctagatctagtcaatttaagtgtttaccctttgcagtttagcccttgtttgtaacaagttgctccgtggcatgtatctagatggacaaacagtgtgttttgatatgttttatcatgaacataaaactggactagtttttgaacgctgtcacatatgtagtaggtttcgtgcttctagctttgtaatgtgtgtattattatgctattggtttatgtgctttctgcttattgtgctgctgaatttgtccatgctggaaacgatgaagaaaacatcggtcagtgtttctgattatacttgattgacaagtgacaaca

SEQ ID NO: 55919 - DNA, 128 bp, Arabidopsis thaliana landsberg
gaaaacatgtaggactagtaggatcataactgcctgcgagaaagattatatcccttgccttgagttagactcaccagacttcatgttgcttgtgaaagctatcatgcatgtagccaaattacttatga

SEQ ID NO: 55920 - DNA, 542 bp, Arabidopsis thaliana landsberg
ttatcaagtaaagctttagtcctctctttatagatatttgtgttcttgtaggccttttgcattattttgttaaggtaattcaactggacgcaccaaccgcctttttgaaacggattttatgtcatcgatcaataattttgtagctcaacaagttttgtgttcaatttcaaccggaaaatggcaagcctttccatagacaagattgaaaggtgcgtagaattgtatacatatgagacatactacaagaatggaaaatccactatccatgagtttttagaatatgcagctcttagattatatgattagttatatgattttgatttggaaattttggttcaggttcagtcggtttggttctttgaacaagaaatcggtctagaacagaaatatttttgagttttttttttcaattctaaccaaaaatattttgggtattgtcaagttatttggggtattttggatatttttgggttcttcggctatgtttgggtattttggatattcactgcatatttttgcttcagttatttgagttttttttt

SEQ ID NO: 55921 - DNA, 534 bp, Arabidopsis thaliana landsberg
acccgcgagccgagcgccgcggagactgaaagcacgcgttccagatcgtcgtgccgaccgtctcttatcttcagcttcacgaccctgaacccggcctgcagcgccgcctcggcggagcgcaccatctctgccggggcggccgcgctcacggtcatgtcggtcgcgacccgcgtgagcgctggcgcctggagtccgatccgttcggccagcaggtggctgagcggcagcgctcgcagccgcgcgtgaagatcgtgcaaggcgatgtcaactgccgccgcggcgctcggatcgcttcctgccgcggcgtgatgcagcgcttgcagcgcggtatccaaccggcctgcgtcgaccccgatgaccgctggctgcagccgcgtcaggatcgccgtctgctcggactcgagcgttttcccggtgacggcagtgaccggagttgcctggcccacaccgctgcggccgtcggccgtgcggatctgtacccgcagcgactccacgacgttggtgcggcgcatcgccgtcgcgaactgcatacgc

SEQ ID NO: 55922 - DNA, 660 bp, Arabidopsis thaliana landsberg
aatcagcgattaaatcttcaaaatcataagaagatattgttaatcacaagtacttaccccattatatcgattcaaagcttcaaggctacgttctttgactagttgaacgagttcgtccactccaatcccaaaccctccggatgttgaagcttctgtgcaaacaaaacccagaaagaaaaaacgttttaagatctttcggtttagttcggtttgagtaacgggtttagtaaaaaaatccggtaaaaacggaggaaacaaggaaattacgataagagaaacaaaaaaaaatagtaatataccatttgatgattgttctgtttcttggtgatcatcatgtacaagctttattacaaggaaaatcaaaaaggttagagaaaagtccgtcgtcaaaaacagatctttatttatatctactaaactgtgaaaactaatatgcttactgcttggtcaggtacggttcctgttctgttcctcctcaacatctggcaaattaccacttgataaaatgccactgatgctctcttcaacttcctctgtgaaagaccaagtaaatgagacatgtgagataaacggtatcattcaacgtgtgagtaaaagtatatataatagctcaccaccctcctccagcgatgggtagtaacgtgaccggcctccaaatag

SEQ ID NO: 55923 - DNA, 427 bp, Arabidopsis thaliana landsberg
cccctacccggtgaagcgactgtgcgagctcgccgaggtgacgcgctcatcggtctacgcctggcaggcttgcgcacccgtccgggcgaagaaagcggtcgaagatgcgcagttggagacgcggatccggaaggttcacgaggccgacaacaccgtgtgcgcgccacgggtcactgctgaactcaacgatggggtgtccgaagcctagcggatgaatcacaagcgattctcgcggatgatgcgtgcctccaggatcgccggttacgtcaagagacgccgggtgcgcaccacggtgccggaaccgggccatcagaaggctccagatctgctggggctggacttcaccgccgatgagcccaacctacgctatgtcgtggatattacctacctgccgctgtctgacggtacgaacctgctcctggtgacc

SEQ ID NO: 55924 - DNA, 467 bp, Arabidopsis thaliana landsberg
aggacgaggtagcctcttgccaatttcctatcagacatgagttttctcattaagcgaaaaacgcatatacttcgtattaatccatctttctgcatgcaaaactattatcctccacaaactacaagaaattaaatctcatatctagctgcatatcactgcctatcactttgccatcctccaattccaaagcaatgaaagaaacggataataagagctcactgaatgcagaggacaagaaaaacgatcatcaatcagaggcacgaaagaagtgcacacctcaaacagttgatttatgttatcggctgacctggctgacgtctcaatgaagaacatgccgatcttctctgcaagctccattccatcctgttaagaaattgaaaaggtgataccactgaagaagcaaggacaatgaaagtgacaacacaatgcgctacggaatctagatgaagacgtttacgcaaactcac

SEQ ID NO: 55925 - DNA, 258 bp, Arabidopsis thaliana landsberg
ctgctttttcttactacgtttcatagcttcttcataagacttaggctcttctatttccaagtcttcttctgttgccaatgcataagctacaaaatctccgtctttaaatctggaaggaggccttatattacttcttcgtttcctctccctcgctaataagtaatcatcaagagactgctcattttcagatccatcaacttcctcattcgtttctgattcctctaagttttctgaactttctgatgaagatgaggaggt

SEQ ID NO: 55926 - DNA, 1125 bp, Arabidopsis thaliana landsberg
cagatccccaattattggtagtagtgtcatattttccatttttcgtttgtgcaggaaagtgaaagaacattttttttaaaacacttgtagttctttgtaaacttttccatcactactttaatggggaggtggaaatacataaataaactgttccatcaaaattcaaatcaagatatgtaataaactagtatccgtttatagataattgatcgctttttacaacaatggaatttatagtacggattcatctaaagaaatgtcaacaagaatgatgataacgataaacaatcaatgtttaacctgaaaataatttggcggcaggcccgactctatggggcggaagtccagggtccatgtgaaattttgttctaattcagatttgttttggaaatagtcggatcatcaactaaagccgtgaaacgttgacttttttcgggaaagagattggtataaatgacgagagctagtcatcatatccgttacgtcgttcatgttctaaatagaaacaattttggtagtatatattgttcacgaaagaaaataatacaactatcgtatatttttctgaattggttggaactctaaattgagtagggtttttacggctcaagtggaaataataaacaaaaaatgagctcacttaccttttaagatccaacgtgagtccaattttgttgcacacagccttcaaagccacttgccatttctccatctcttcaagacttgcttcttcatcgcaactccaaaacatatggccgaaatctcccgtttgtttctccacgtcttccgttctcactttatagaagattgggatgacaatcatttgccctttttcttcttggtccatgattgtcgtcagttcttccaaacaccattttgattccccatacctaatcagaatagttttcaggttaataatatatattgagcaatgagcataaccggaacattaccttggggataagatgaccagcgcgatcgtggcctcttcaatccgtttaaagaggtggttcaggtctcttcccttttgttcatgtgtatcgatgaagaagttgatattttttcttttcaaggcaaatttaaggaaactgacaaagccgtggcgaatatcctttccccggaagt

SEQ ID NO: 55927 - DNA, 999 bp, Arabidopsis thaliana landsberg
  unsure (1)..(999): unsure at all n locations
caacgtaatgactttcttaaacaggcgaaaaatcatctgctaattagagtatagtgttacagaatagtttgacaccgtgaatacaactttcatacagatatatatactaatacacggacgacactatatactaatatcttcatgtaatacgtctcaatttttttttctaatttctagggtccaattctttaaggttacgaaaaccttatattgaacaattcaagcattgaccttatagctggttattcctttaataatagaaagataaagaaagctgcaagcaaagcttacagaaaagtagaaatgacatgtttttgaattataaataaagaaggaaatgaagttacttgacgcgatggctaacgagatgtataaagtgtaaacacatctgaaaacatctaccgatcacttcaataacaatccaatattcttcaccaaacttttactctttaaacaagaagatgaaactttttggtctctttcttagttttactctcttgtttctttgtccgttcatatctcaagccgatgtgccggaacttagccgccagccgcctcgtcccatcgtatttgtccataatgaccgctccaaatccgatccgcaacaggttctttcatttaactctctttctcaacagcttcttataattttcatttaagtcaaaattgttccttgtgtttttagttcctagtattatcatcttctgtttgttacggaatgtgaaatgtatggtccttaattaaggacaatgtatttgcatccttggttgtgttcttaaatctatcacgtaatcatgttatatattttgctacttataataatgacataaaatccattttttcttgactctatcatggcttggtttttttttttcacanatctacattatatatcactacttgttgcgaattttattttcttgtatatcatctttgtgccagaaaagaccgtacttatttttaagttttctattcagtcaaaactattattcatttttt

SEQ ID NO: 55928 - DNA, 614 bp, Arabidopsis thaliana landsberg
caacaaccagcaatgacaagaagtttcccatcaaccacaacaaccttaaaccctgtttttgcaggaccaggcatcggtggaagagatgatagcttctgtcccaaacagtccatcacctcccatcggttatctttcccaccagcattcatcgttaagacataaagccactcctcaagcataccagcgagtcttctcacagtaataaactctttgctctggacaacaaacctccatttcttgcatacacttcccatggatgggaacctagcacgcggaacaagcgctagacactgcttagcgacatcatcaggcaatcccgggatcaaaggatcatccataaaattctcagacaagcgtgaaccgagatcaagatttcctttggaaaaacacatgccgtgattcacaatccttttcttcccacttaaagcaaaagcttgcatctttagaccaatcttttgaacagagagatagctaaatctccctaagaacaaatctctagactatttgtgtcttgtgtatggaaatgttattaaagactttcgtgaacccgtcacgtatagtgattttcacagagagacgaataacaatgtagcgagaagaatggaattgcagtg

SEQ ID NO: 55929 - DNA, 1362 bp, Arabidopsis thaliana landsberg
tgtatcatgtagctctctattaattggaagaggtcctagctaatttccctaatcactatacgaccctttaccattaaaatacacacaaatccacccccaaccaattaaaccatctatatttgatttaaatcaacttatccgtggcctccgatctaatgtgttcgattctccggcgtaaccttctccggtgatcgtgaattttccacagcccatgccctaatatgaccgccgagtatataccatgcgtcatcatcggtgctaatatattatccgtctgaaaatttgaataaattttgaattaatcaagcggtttggtttttcagcaaattattgcataccaaaccgaacaaaaacaaaaaccgaaccgagaatttacctgaacccattcaataccgagatagagggctaagagtccttcaaggagtggagagtaaatcttcttcatctgtctcttctcataccaagctgcacaaagcaaatgacaaagaggatttcatgagcaacagaacaaaccggttgatatttccttggtctctaagctattctattagtttatctttcatattctttctcaaaacaaatatgatcagaccaagaagagaacaagttcctgacaaaagcttcttaaaatcatctcgccgtgaccttaaaccggggcaactatgtatgtcgggtctgaaaacgaaaacaagaatcagaaagaatgtaatcaactaagacactaggcaattaacagatcaagtacatgatcaaatcctaaccttttggagacgcagcaagaaagtagagagagcctgtgagagtcgcggtgattacagctgcaaagacttcagcaaatgggacaaatggaggaaacactccggtctagaggtaacaacaacaaacaatatcaagtctatgagaagatatgggagaatctaaacatagaataaatgtgaagggtagagattaaatttaccagagatgccatgcctctagaatctgtcatcaactgtgttcctttcaagaatatatcagacagagcaccctgtgagaatcagacattacaagagatcaatcagtgataactcaatcaaagattctatactttgcgaagttaaataaaaccaaacctgtacagcaacacggtaaaagagctcttctcctattgaactcgccactacaatgagtataaactgtagaaaataactaaaacctcaaaaccaacgttcaataccgataggtttcaaaaacaaacaagaaactaaaatgagcacctgccatgtggacattccaaagaaaaaccttcttaactcttcatcttccacatctctaatgccccaacatgctgtgatagctttacaacttcattctaatacacaa

SEQ ID NO: 55930 - DNA, 523 bp, Arabidopsis thaliana landsberg
ctctcctctgagacctgcagtgacaatcaccattccccaagaagccgatacattccctgagtttccatttgacgacgacatatccgtactcagacgattcccacttctgttccttgcaaacaacagtttctcttcaggccaagtcgctgacattctatcgaaaaagtatccgtttgttgcgctcgatatgatcccattccgtggactgtttaatcgctccacagtccccagctggtctaccggtgtaggcggatggttagctgtggagatattgtccaagttattggtgcttccgttaaaccccgctctgttttgggttcccagttttctgttgaggccattccaggccatgagatggctgcagagacgtcttggctatggaaatgctcgtaagagtttgtgactgtcacgttcttggtgttggacttctgcttggtcgagaagcaggggattcgtacttccatatgtacacgtgtgaatcctcgcttgctgaaactacgtatttcccatctgctgtgattga

SEQ ID NO: 55931 - DNA, 956 bp, Arabidopsis thaliana landsberg
taaaacatgaaaagaattagagattgatcgaatatataccgaccccttcccaagagcagacctagaacagtaactggttctggaattaaggtagccaaaaaaaagattgaaactttacctcgaaaaacaaacaggaagaagagcccttaagctcgatgagctcattaagagtggcacctctactgctcttagcttctaccttactatccttcttacagtgaggtaaaagtgacaccatgttcaacatcaaatgtcgataccttccaacgaattaacaaagttactccatgattcataaccattaaaccgaatcaaacccaatgtaaatttcaacaccattcacctgaaattgatccgacgggaacaagtaacgagaaccttctctttattcctgaatacagacgcatacgcaggtttagagttctcagcatcttccttcttatctttccaacccaaaagagtcctttgaggtctctccggagcagaatccttcaccggtgccgccgtaacagtctcgctgtgctttctcttcctccccattttttgtgtctattgaagaagaaacaacgctaaattctctgatttagggttttagtacaaaactcaacaacctaaagaaagagacaagctgctttaactaaaaatgtcacaacgaaaacgacaacgtttctcacttttatacaaggaatttcaatgggccggatcaagcttacatgggccttaatgacacgcaaaagaaactacattgcaaaagaattttccttttttggtttctctctttctatttccaatcaataaacatatctctctgttcgcgtgtctgtaactctacaatgatctgcataggttctttctctctttttttctctccattttcctggaaacaaatctgttacaaagaagaataggaaccaaaaaaagcttcacttacaataattcaaacctcactcgatttt

SEQ ID NO: 55932 - DNA, 1749 bp, Arabidopsis thaliana landsberg
tcagtgcccaaggggcatgggaccttcgcaaccacacaaaatatctatccacatttatttttcaattcaataaaagtccatacataaaaatgtttttttgttaaaggattttcttgaatatgataaaataatgttttacaaaagggagaatttatttttcaacgtcaaatttatttaaaaaacaaaatatcaaaaagccaaaactcaaaagttttgtatttatatatatatatataagtatatattcgattgtgactatctgtatacgtttttaatttgtacattcatatgctgttttaattttttttgttcgacatcaaatttatcacaatcctcgatacagtttgagaaatttaattatcgaccgagcgacttccacctatacgaaattagatatcagcatatatacattgaccaaaacatgatctaatacttcgagaaataattggtcccatcactttgtttcccattctatcgagttggaacatgtctggaaatttagattattgtttgatctatttgtattttggtacatttacgatacatacaagcacattaacagtatgtaagtgaattttattgtttgtactttgactaaacataaataaataaaatgagagaagttttctttttttgttctttttgtcatcaatgcatgtggccttatcttcggtgcaataacattgaacatataagttttaaaaacaaaaatgtgttgcttcgatcatcaacccaaaaaaaaatacaactcccgaaattcccgccgggcatgtaacacattggattcacccatttaatttctctacaagaatgattacaatatcaccaatttttataattttttagtcggtacattacttttggtttgtaaatgacacatatggcgacaaaaaaagaagattaatatacgtatgcgtatttctgcaagcggcactgcattaaaattacacacttatctcgagtcgaccacatacacacaccatacataaaatactaacaaaaaggtttgcggttatgtattgcagtgtacctagacagaaccttttttttggtctagacacattaaactatttattatcgggtcgcattaaattattaatacataagccatgatatttttcgtattctatttgcggtagtcggtttaataaatcatgattttacgcacacaaaaatatgcttttcaaaacaatctttgaaccgcataattttttttatttattcatttgttaaaaaaaaagaaaaaaaaactaatgctataaaatggattttttctataaaatattatattgtatggtgcatcgccgttctgataaatttataatgattgatattaaacaacatgtacaacttcgtaaacatcacgtttgtatggagttggttgggacttgagaaaactaaaaacagacccaacgataacacattttctaatgatgttcttaatcctttaattcacaaatagatacgtaatgcgaacggtacaaatgacacataaatgatagtaatgataatttcgaatatggaaataagtaatcgacatggtctgttacttattttctatttttaaaataaatggtatccatcaatgatcaatcacacccaattctcctttagttttttgttaagtcgcaaccaaaatttaatacaactcaactataccgacaatgaagtatttcctttcattattggttttggaccatagcctacaattatttaaatacaagtcttacataaatccattaatgatag

SEQ ID NO: 55933 - DNA, 597 bp, Arabidopsis thaliana landsberg
tagttggttaaaaggctaagtccagtgaagctttcctccttgccttaagtcctacccacagaccgctgtaaaagtgtgtggaggcctgtgttccaactggtgaaagcctctccccagtctctagccttgatctgaaccagagccgagcacgctagccctctgcgtggtgactattgtccacatcaccgtggtgaccatgctctaaatcgattagtgaagctcacaccatttactacttaaactctaccactgtctattgttgggaacttggtgtaaaatttgctcaaaaataggctgtcgggtttttggatcccagacttagtgcagaaggctaaactaggttttagtgtgttgagctcaactttggagctctattgtgcccattctatttggttttgggccaaagttctgtagcaagtttgatgaacaaaattactaaagggagatgggcttggtggacacaaaattgggagtgaacatgtccaaatctcgtttgtcagatttaatgaatgttgattcagaacactagaaatcgggttgaagtggttttggtctactatggtggttcataaaattgtctgaatgtttcacctaggg

SEQ ID NO: 55934 - DNA, 1225 bp, Arabidopsis thaliana landsberg
aaacaaaaatccaagaaatttttttagaagccgtgaattttctggctttcttctacttgacaataccttaggtctctggctcttctctgaaattttttaactaacaactgaagaaatctccttttggatcattccaaaagtttcacaaaatccagaagaaaaaaagaagaagattatatagaaaatttcaattgtgaaattatcaaaattccctctagaaactccatttccagaccttgacactaagatcagacttacacttagtttttttagaagtagctacaattggagttttaccttttggtatagttccttcaaatccttcacatgtcactttgatctctactccttcactcttcagcttccccattatcatcttcactttagttctcatctcgatctcatatcctacacgcgcgcgcgtcagatctgatctcagatgcttagcttcatccggatctaactcacgcgccgctgtagacgtagcgatcacgccgtgaaacgaagttttgttaccgttatcgctgaagaaagcaggaacagttccgttaccgagcatcgtaccggatttagctgaattaacggtgacggtgaaaggatcgtaagagaaagagaggtgttggtttggattctctgagattagagtgaagttgaagaaggaagagagatgagagacggaggaatcagaggaggttgttaggttcacgcggatgattcttattgacgggacgaagaacgacggcggacgagggtggtagatcacgtacatcgcggtggcggcgattgcagtcatgagagctaagatcagaattatcagaatcgaccagaaacagcaacaacagcaaattcgtcggcagcttggtcgagattggtggtgatgacggcgactgtaaggctgtggacggtaaaccggacggttagctggaatgtagacttgaggtttctgattagccattccgtttgttgttccgttgctggttacagtcgccggagctggaggaggtggtatggaaccaactggtggagctccattagtggcggttggtggtttggaagctgggaagactcggtcagtcatcttcttcttctccggttgtttctttctctctggtcagatctgagctcacaaaagagagagagatagtgagagagaaagagacaatacagagtttttgtggaatcttaatagcttctttttctgagcttatttattttatttgctttt

SEQ ID NO: 55935 - DNA, 827 bp, Arabidopsis thaliana landsberg
caaggctcctctatttctaacagtatttaaatagaaaaattcttttttttaaatgtaaagaaatataaaactccctgatatccacatgattttcccaaaaccccccaacaaaatacagataaagaacatagaaaaactctatcggatatatgtgtttatataatcaatccttcttcttctttttttttgttctgcttcgctctgctctgcttccggatgatgtatagattcttcacctctgttgtttaatcatttcacagaagcttccattctgcgaatagacatgtcaaacacaaacattattgcaagaacatgaaactaatacaaacataggtttaatttcagacaacaaaagtaatgtgaaaaagaatgatggaacaaagattatctcatatgatccacgaggaaacaaaagaacaatatcgtttcagtcaaaaaacagaacaaacatcggtgtgcttttcaataaaaccctaattcgaacctccatttctaacaagataacgaaagaaccaaaacccagtggaatcatttctagatgatcaataaggaaactttggttaaaatctaaacagatccgagacgaaagtagaaagcttgaatcattgaaaccagttttgcaattttaaccctaaaaattcaacaaaattaccagaaatctcctttccggagggagaaggtggcgtcaagacgtaacagagaatcgaccttccgaccatagaaatggcagaaacgatgcctgcgacatagaaaaccaaaatcagagcaagaacccaaggcatcaagagaaacccgatgaagaaagtcacagatccacatagcataag

SEQ ID NO: 55936 - DNA, 617 bp, Arabidopsis thaliana landsberg
tatatatatatatatacataacataacattcaacacaataacatgatattcattaattaacaataatgcaacatcacaaatttaaataaacaatatttgcaacattttcagaacatccaatttgcaacaaataacaatattacataaagtgtaatcgcattacagttaactcccgtcagccatataaaccgacgaaaataaacaatattataagttaaagctaatcaataaacaattaacaattttaaactaactctaatcacatgaaagttaactcccgtcggccatcaaaaaaccgacgaaaataaacatctacacacatatttaactattataatcacactcgtattcacaattaaggatgtatacctcaacgacaaggcggcaacggcgctcggggaggcggtcgggaccggcagcggcactcgaggaggcgatcggaggcgacggcgcacttggggctgcggcggtgctcggagacgcggtcggggcgattggcggcggtggaggaggccggcgggggaggcgtcggctggcggctggggtctggcagggcggcgcggtggcggccgcggtttggggtgcgcggggtggttgggaggccgacgcgcggtgga

SEQ ID NO: 55937 - DNA, 362 bp, Arabidopsis thaliana landsberg
attagcacttcaaaatacaatgcgacagtacatattaaacttttgaagtcattaagaacgataatttctacttactacgggaggaataatgtcaccgataaaatcgattttagttacggacccatttatccgtcggatccgcttctagagcatagctcacaggtggggaaaacaaataagatatcgaaatgtgttcactctttactagaccccgaggaactaaaggtctatttttacatccaaaagaattcatcttggggaatccagtcaatggagcctgacgatggggagaaacaggtcctgaaaccatatattcttgtttggggcctgctatataaaaggggattgagaggagataaata

SEQ ID NO: 55938 - DNA, 451 bp, Arabidopsis thaliana landsberg
tctattcgatcttatattaagacttaaaatttaaggcagtgatatcttgaaagactaagaagtggcaacatatgatgtatatttttaacatctttaatatgatagtttaacgtactataaaaggtctttacatacattcaagacagaggctcataataagaacaaccccattttatcgattctcaaaagagaaattagacataatggtaaaagcataatgagattggaaactggagaccccaacagtgcagccctctagaggaccctgctcttatggactcactcagcctgatgctctacctgtattccaaacaccaaaattaaggttaagtgaccgtaaatacattacttcatccaattcgattaaatacttatcagaaaaagctatgttctctccaattcgtattaaaccttacttgaaaaagatgtgctatctttagtctatttgatt

SEQ ID NO: 55939 - DNA, 1101 bp, Arabidopsis thaliana landsberg
tgagataaaaacactaactaatcaaaacttgttttaaggtgaaacgtttgcacatgaattagatatttgcaagtatgaaagggcgataaaaatatgatgtttaggttttggccggtaatctacacaacgacttggattgttttatggttgtgtgtatgtttgttttttctcatcaaagtcatgtacaatgtattatttgattctccgtcttcaaaaattcttcacaaaagaaaaattacagatttgggtaaaactcaagtcggtaacaaaacacagttcttcaatatagcttaattgatcccttttctaaacaaaacttcttctgcagccaaaataagactgagcctatttccacctgaaaatgaacattctgctagttctgatactaactctaatctgagaataatgccttacttagacgtccctcacaagttttacatatagcattccttcatgtactcaaactaggcatgattcgcaaccaaaacatgccacataaaaccagtttacggttatgaacttatatgatacaaaagattatataccgaaagcgtaatatgcaccaaaatacataaacggattccatctaacattgattccacaaacgaatcaaaattaggtcagtttccactaggcataaacattagctagcaatacatacaacataaaggactaagggaaccacaaaacaaaagatacaaagctttacttttcaccaagtagccttgagtttataatatacaacatttgtctacttgcttctcttcgcatcatatctttaatcatcatcagaaattgcaatatatatgtcaacatcatcgtttcttggagtagccttcaaatttgattgctgatcagatgaactttgccctgtgcagacggaaagatgtgagattggcgaccaattagaggtgttaggatgacttgttaatcctacagggaacatagccccaagaaccaaagtaaacgccttcaccattactctccacaggtggcgtttgcgttttaaccgcttcaaacgctttcctacacatctgacacctcaatgtgcattcctcgtaaccctttgggtactcagaaagtggaaagcagtatggacaa

SEQ ID NO: 55940 - DNA, 886 bp, Arabidopsis thaliana landsberg
acagattttgaatgtaatgcggtaccttgctgggtagctttttcatccgtggtacgagttgctgctttgtgctctcatctttcttaacattagggccttccaactcaaccagaaaaccatagggggaaccatcaactatacctagcctacgtttcaatttaattccatcgctcaagttagcagcatgtagtgctgagccgaggacaatagcctcatcagcgtctagatgtttgtctaactgttgtttcccaataaattcctggattgtgctctgtaattaaaacaaaaattatatcttagcttcatttgaaaagaaaaaaaaaagtgaaagtcccccagttttggatgagaatgccaaattgattggctttgagagcatgaaaacctacctgtagtttgggaactctagtagctcctcctattagttccactgcagatatatcatcaatcttcaaacctgaatgcttgagcacatcttttaaaggtgtaagagatctctcccacagatctttacacagttcctcaaacttctcacgggtaattgtgctcctgaaaaaagataagtaggttagaatatcacgcacatcacaaaaattagaccaatcatgatgcaatttagagcatgagacatcattataacacttttgcagccaattttcgatgtgctggggaaatagagaaacccaaatattgtagttatacctgaagtcacgatcatcatgaagagattccacagatattggagccgcagtgtttgcactcaaaatttcctttgtacgcttgacttgttttttcaatttagccattgctttggggaacttcctcacatcaactccattaccgagctgtttattaaactcatctgcaaagtgctctaccaagcgca

SEQ ID NO: 55941 - DNA, 551 bp, Arabidopsis thaliana landsberg
  unsure (1)..(551): unsure at all n locations
tgcgaacacaattcaggtaggagaatatcttgtctgataacacgtttgagatttggaagacaagacaacactaattgatttgcttgtgttgtgtttcaggtccttcaccactacttcgatcctccaattcctgaattcgtatacttgactcacctgactattcagagtgacaaagaactagggtgggatgcgattccagagctgcttagtaaatgtccacatttggaaaccctcgtcttggaggtaagaaaccaagctgcttagtgaatcgattttatggttaaaagcaaaacatatgcgttactgtatgtctttatgtttcaggggcttttcacctagccacagatgtgtgtggtgatgtgtgtcctgcaggaggaacatggagcaggcaatctcttgcctagtaaaatctcctgttactcacctagagatatacgaaggagttgttgggaaaaagagaggagaagttactgaggatgcagcccgatttggtgagcaagtacggtggtttttgatgagaatgctacatntccannncaagtgaaatatat

SEQ ID NO: 55942 - DNA, 1610 bp, Arabidopsis thaliana landsberg
cgtcctcgtttagtgctaaagaagaaaaaaaaaagttgtagtataataggtctgggccagccttataaaagcccgaaaccttttctgcaaaaccatatttaagcccaaatgtttctcctttgatttaagcccaaaagcccgggcttttatttattttagcggacccgggccgactctaaatgtttagcccattttaacatccgtactttttatggtgatcttgtaatattataaaaactggaaattattttctacatgtatagcgatgttgctcacgtaacatatatagttgctgatgtaattgggtgttttaaaatctatttaggatattttggatgaatgatgattaattttttagtcaattagatagtggtcactgatcagcatccatagagcatattccaactaaagatttcaacagttggtgaccggtccctctgtgttttgcaatatatttaacacaactttacataattttataaccaatattgtttaagattttgaattatagctaaaaagagagaaaaaaacaatattgattcgggccatcaatttttttggaccaacctttgctaggaacacgaagatacacatcataaggtgacgtatagaacaaaacgaacagacaaataaagcataacagatgtagtttgtaaagaataaatggtgtagaacgaatagaacaaaagctgaatagatatcttaaattagtttggtgcgagtaacggataaatgagttatcaaattttgactaatgttttgaagtttcgaaatatatatatgattgtgttaatcggtatttaacgcttatgatttttcagcatatacttgattcaccctacttattgaggttggtgtgttgtcctaatatgattcacaaagacatgaccaagagtaaaatcaaaccgcgccgtattagtttattatgcttcatgacaccattcataaccaaagtctttttagttttccccatacacaccaataaagatactaaagaaataggtaataagtaatttaagaactatgaatcgtagcggtaactttaactatacaagaatagctgtataatcgtgacagcccttgactttgggagatattgtccaatactccagttaagagaaagaagtgggaatgtgggttacatcgacaaaggctttgctccaagttaattaatggctataattggcggaatatattagtggaaaagataaaggtgtgaaaatgatttctacatgctttttagcaattaagagaaatagtggaaaacaaaaattgttcattaaaaaaaaaagtctatattatatgtaatagcacaacagaaaaaaaaaaaaaagtttaaagaagatttcccctttgaaataagtggagtttcattgaaaattcaaatattctttcgtttttttataggaatatattcaaaagtttattagactccatctgaccatttgttaccagcagctatttaaacatacgacaaaggattattgcatatttgctaacgattagtttggtggtttcccaaaaccaagtaagttaagaaaaaacaactttatgagtgttttgaattaagtgttcagaatataaaatcttaaaaagtggatatattcaga

SEQ ID NO: 55943 - DNA, 1056 bp, Arabidopsis thaliana landsberg
taaaaagtcttagctttacatgctcgttcgatttcacctgtttccaatctttattctctggaattaggatcatgccctcgtcgtcgtattcaagaacgattcaaatcggaacaaggcggcggaggaggaggaggagatgattttccggttccggtgactcgtcggaagttaagagcagagccgaattgtcctcgttgctcaaagcaaatggatcttctcttctcaaatcgtcaatttccatcttctaatcttcttcaacgtcctgatgattctgattcctccggtgccggagataaaacgaacttccagtctgttaatttctgtccgacttgtaaaactgcttatggattcaaccctcgtggagtctctcctcttcaagggacattgattgagatcggtcgtgttcaatctccaaccactactaccaccaatgctactacttccaaatccaccaggaaacaacaacaacattcaaaggatccaaatcaaggattcaattacaggaacaagcttagatcttccttttgggatacacttagatcttacggtgctgagccacctgaggattggtctcctcctcctcctcattctcctttgaactcttctcctcctaataccattcctgtgaacgcttctcctagtgccgtggatacttctcctttacctgatgcagttaatgacgttagtcgatggggtggtgctggccttggcagagactttcctactccaaaggagatttgtaaatggcttgacaagttcgtcattggccaaagccgggctaaaaaggttctgccttttcacttaacatctaagtattctgatcatggtcctgtgcttcatttgttacttatgacatggttgtcttgactttgatcctaggtgctctctgtcgctgtgtataatcattacaagagaatttatcatacctctatgaagaaagggttggttctctcactcatccattgtttattttcctggctttagttacatgatttagacgcattatcaccgttcaatccgttatggtttactctgacattgtggaccttgaatcct

SEQ ID NO: 55944 - DNA, 1073 bp, Arabidopsis thaliana landsberg
aatgttgtggagttgttttcccacattttagcctgaactcacattgctttatattgtccatgttatagcaagtcggcgaatgtattggctgttttgggtgctgtagcaagcgaagcccttgatttgactggattatatttcagcggcaagcctaaaattgttaagaagaaggctagccaacttagtcatgctaacactgcaaggtaattgtgttgatgatatggtctgctacttatattcaaccagaaatttggttttgttttgtaacctgctatatattattttacacactggagctatttgttacctttctcgctgtaatagagataagtactgcagggaaccttctctgcgtgatctaagagcttactctgcggaactttcaaggggtgagagtgcaaatgatatacttagtgctcttgctaatcgagagaaagagatgaagctaacccaacaaaaaaaagacgagggaactaattcttcagctcctcgttaccaaagtggtgttctgcgtactaactgtatcgattgcttggatcgaacaaatgtagcacagtatgcatatggtttggctgctttaggccggcagctgcatgcaatgggtttgagcgatacacctaagatcgaccctgacagtagcatagctgctgcacttatggatatgtaccagagcatgggagatgcccttgcacaacaatatggcggctcagctgctcataacactgtaataatactatttatcaccttcgaccacctcttaacaaaacaatatttgcaatgcttattcagtaacgttgtttaatggattataggttttcccagaaaggcaggggaaatggaaggccacgacacagtctagagagtttctcaagtctatcaaacgatactacagcaatacctacactgatggcgaaaagcaagacgccataaacttgtaataaacctccctttcttgcccaagtcacttcagtttcttgctaagtctttactatttgtagtttgccagtgatgtagcaatagtacgaaggcttttagaataagtttctgagttctaggttcatttctgataagag

SEQ ID NO: 55945 - DNA, 1627 bp, Arabidopsis thaliana landsberg
  unsure (1)..(1627): unsure at all n locations
tgtccaaaatgaagatgaagctgatgagcatgatcatgacatggtcatgcccggatttagattccattctaccgaagaagaactcatagagttttaccttggccgaaaagtcgaaggcaaacgctttaatgtagaactcatcactttcctcgatctttatcgctatgatccttgggaacttcctggtaaatatacattcacataaacacacatatatatatactaatacacacataaatcatgtcaaactattaggaaagcttaatttctattcatatattaagatctttcttctctcttatcactttatctctctatttctgtttttaacctatatatgtacctacctccttatgaagatattactatgtcgatcgatcgttaacaattctcaatatctttaaacgcttctccctctttagtttctttcttaaattaacctaattaaacaacctacatatatatcataagatatacaaatatgtgtatgttttcataattagcttatgtatgtttaattatagatatatgtatatgcagctatggcggcgataggagagaaagagtggtacttctatgtgccaagagatcggaaatatagaaatggagatagaccgaaccgagtaacgacttcaggatattggaaagccaccggagctgataggatgatcagatcggagacttctcggcctatcggattaaagaaaaccctagttttctactctggtaaagcccctaaaggcactcgtactagttggatcatgaacgagtatcgtcttcctcaccatgaaaccgagaagtaccaaaaggtattaattctactaactctatatatatcctattcatacgtacatagatataaccctagctaggtggtgaggcctttaaaattgaaattaatccctagacagtttgaattttttctttttttgactagttttatttatttattttggaattgattcgataagatcaaaaatacttgtgaatggactaaatgtcaggcggcgtttgcgcttaaatccagaaaaaatgttcatgtcatatgcgtgaactctttaaattgctagacatggcccatatgttatagtagaatacattaatagatagatgcatacacatatataaacacacaagtatcacactcgacattcatataccttaattctgcagagacatagttagtttttcttacaatttatcacatgaatgttcctgctcttcctcacattaactcatgtcttctatttaagttacccaacattttttgaaataatttggcatatataaattataccaacatatctatatgcgaacacttaaaatctatacgaaggataacggtttatggagtagaccgaaaaaatatcatgtatacggataatgacaatggatagagaaatacatttttgggctctttcgacttatatgtcgncaccatttgaaaccataaatttatacattgttacgtcatatgatagtagtctaaatttcttctaaacgtactctttttttgcttatgctaactttacatagtttgtgaatcttcttttcaaaaccatattttcgataaatgatattttttcatagatattgttagtctatatttgataatttgatatatgga

SEQ ID NO: 55946 - DNA, 300 bp, Arabidopsis thaliana landsberg
cattttgttgaaatctgtatcgggtggactaccagcgattgcatcggcccccacatattgatatttttgttcgcgtgaaacccattagggtcgtaacatcacatctcttacagagacaaagatcaattcaagattcggaataaaatgctattcaggctgcgtggagatcctaggatgcggaattctaattagccacgggtccttcagcatgcttgttattattgattaggatgggaatttactacacatgctcttgctgtttacaaggctaaaggatgaattcgcatctaaaagctactc

SEQ ID NO: 55947 - DNA, 535 bp, Arabidopsis thaliana landsberg
  unsure (1)..(535): unsure at all n locations
ccggctgatgtttcttgggaagaatgactgagttgtaaaaatccacatgctggagagtnnnnnnnnnnnnnnnnnnnnnnnnnnnatcacgaatgcgcaatgcaggattctgaaagcggatgtcctgaagaagtgcagaacccccgctggcagtaannnnnnnnnnnnnnnnnnnnnnnnnncgacgggcctccgcccggtggaggaccaacccttgaataataggggcgtgggcagggggaaggtcaatctcatcatcttttccaccatcataatcacttgttgcatcccatgcttgtggatttgtcgcgggtcgggaccgaccggacggattccgggccgtccgaccgcgagctccatgagacccggaggcttcacaccttgcataacgttgccagatcctcaccacgtttggatttggaacgcaggggagtttcttcatgaatctgttgttcgtcagaggagtcggatttaacaacagatggattcgtngacgcaccatcttaaaaagaaaagatagaactatgatgacaag

SEQ ID NO: 55948 - DNA, 524 bp, Arabidopsis thaliana landsberg
tgaaccaaattttaagatatcgtagcaacgcacgggcacacacctagtgaatgaatacgaattcagagcacgagcgccgttgattggccgctactagtactacagctaggccactgctcctctgctacccgctaacctcgcgccggagtcgtcgcccacgatggcctatcgatccgcagtgctcttgcccgccctcctactggccgtcgccgtcgcctcggcctccgccgccgccggggacgggaggtggcgggaggagcaggcgcgggaccgggtgccgcgggtgccggggcaggccttcaacaccagcttcgcgcagtacgccgggtacgtgaccgtcagcgagcagcgcgcgctgcgctcttctactggttctttgaggccgagaaggacccggggtcaagcccctcgtgctctggctcaacggaggtgcgtgcgctacctacctacctacccataccttatcactcgccgcctgctgcgtgcttcgttcgcttcggatccgtttcgtactgtgatgactg

SEQ ID NO: 55949 - DNA, 637 bp, Arabidopsis thaliana landsberg
tagaatcttctcaaatagagttcttgtgcatcttgaaagcgtggtattttccctgatgtgccaaactttattgaatgatccttctctatcaagaaacttgttgtcatctttgatcatgctttaaaaaaaatggttacttcctcattgaacaggtctgcaaggtcccgtatcttcatctgatatctcatcctacatggaattctcggacatcgtcatggactgtcttcatgactgttcctccatcaatcatcccccaaggaaggtctgaaacccagtctcctgatggtaagaggaatcttaagacgcagttccggacaaaagtggtggtgaaggatgattgtattagtgttgaagcggaatgcacgcccaatgtggttggcttactcaaaagcagttcctgcaatctattctctataaacaaatacgagtgcgacgtggcagaccttcccgtgatgattctccacaggtatgttctttcgttcctaaagttggtcttgtctttacaacaatcccttaacacgcggtttatttatttgagaaggtggcgagccagattgtgtgttggctactggagaagcacggcagtagggacaaagcgagcagggaatttctgcgctatcgtagagatagtgaaggg

SEQ ID NO: 55950 - DNA, 518 bp, Arabidopsis thaliana landsberg
cataacattcacactgagttcaagctgtttgctgcccaaacaagaaagtttttaagtttaaacgatcctcttattagttatttctaaaaccattattgaattagcgagggaaagtttattgaaaatttggttgttttcaaggtttcattggaaaagaagcggcaaattcgaacattagaattttcgtgaaaagtttcaaaataaaatctatgtgcttgacagataggcagtctccattcttgtcctaataaagacaaaacttttcaataaaatacaattgtcggaagaaaatcattttgacctttcattcattcattcattcttcaccagagatcacataaacaagatacaaaaatttcaaaatttagttaattcaaacaacaccaaaaaaacgcatacaaaaattacacattaattcgttacacatcctacaaaattaattattatttcaccttaaaacttaagatccagaaaattcgttaagcataaacggaagaagcataagagagagccatgag

SEQ ID NO: 55951 - DNA, 978 bp, Arabidopsis thaliana landsberg
ggagtcatatccgccaccaagttagtatcgacgccgtgatcaaccacttggaagataccccaattctcacaagcctcgacgatctgacggcagatctctcctctttttccatcgacgtcatcgataccggcgagagagatcaccgggatttcgtcgctaaacacattgtaagcgactttagggcgttcgtcttcgtctcggacgaatttagagttgagcttagactctccggctagctcagtcaaagttcctggagccattgtaattacgaagacaaaagactaaattaagagagatatagaaagaagagatgtgtaatgaatatataaaggagagagtggtagctgaaaatctttcaaagcttgtgatgactgacgaacgaagaggtcgctagctacctaccacggtactactgctctctcttctctttctagaacacaatttactcaactaactacatctgtttttaacttcagaaaataaaaaaaaaaatacatacggtataataatattttgtaggaaaacattataaacttaattatctatttattttatatgctttttggctacattccaacgtatcacattactattatatgatagggacgttatacagtttcgtttacaccgtaggtagtagacacatggttaatatgatttacgtttttaacggttgatagaaagccacgtcttaaaaatgcttgtggtctgtggagaaatcacgtggcggagacatgttctggtacgggcttgcgttacaaaaatcccaatcgtcattaatttttgcacagactttttactaaatcgtattgatgagataattaaaccttattcacaaaaaaaaaatcttaagcagacaagataaattaatgatcggatttgtaaagtattaggttctaactagtatatcaacttggatttgattgatgtagttatggataaacaataaaacagacgccataatactctttatgatat

SEQ ID NO: 55952 - DNA, 220 bp, Arabidopsis thaliana landsberg
ttcaacgaattggccacgctgagcacattcgccgagcgcggcacaaggtgccgacaagccagcttccacggctgtgccaatagaaggtgcgggaggtaaataggcccgaatttgtcggcttgtggtcatgacggcaccgccgtttacaattttgatcatgaaaaaacctatagagaaaaagccagcggattttgcccacggcatgcctcttgctggagtt

SEQ ID NO: 55953 - DNA, 1316 bp, Arabidopsis thaliana landsberg
ctacgtttctggacacgaattccggatagttgtcctgcaaagtctcgattacttttttgattccgacccaaatctctgttcttgacactccaggagcgtttttgagatcgtggatctggagaagagaagtaacacctcctggtttaagattaagcttctggattcccttctccatcagctgaaacctccatctcaagaacttctctctgttcttctccgacccaatcgtctggtaaagctcctcgctgtggacattgtaacaaactgggtgggactcgcggtccacaccgttcatgtaagctgcagtggcaagatcctccccaaactcctctccaaggatcgaatcaatcttgttttgctctctccatttgagggttttcttcagcatctcagaggcttcattgactttaaagtctcttgctctcaagaacttcaagaggataacatccgtgctttcagctcctttgcttggaagcaatggcactccccaaagctcgatatccttatccaccgactcatcttcatcctccacctcaataggctcagctttcacttcttcagtaacaacatcctcggttttcttctcttcttccttggtttcttcttctaccttctcaacaacagaagtcacttcttccttggggattatctcctctgtaacaacagcctcaacagtctcagctttcggtgcttcttcggtaacaacagcctcagatttcttctcttcttcaaccttctcctctgctgcttcttccttcttcttctcaacctcagcttcaggtttcacaacctcttccttcttctccttcataggagagctctccttcttcttcgtctttaagagagtgttgtcaacaatagcttcctcaagcttagacttgagatcactcagtgcctttttctcagattctttcaaatcagcaaagaaatcactctcttctttgaaggaagcactcttctccacaccctcaggcttgctctcatcttcttcaaccttagtctcttccacaacagccttaacagtagtctcctcaggaacaacagcaggagcaataacaacctctgactccacctgtttctcctcaaccttaacttcagcagtcatcttaaagcctgtcattcagaatcgattcaaacaatatttagtcaccaattatacaattcaccaaagtagtaaccctagaactaattaactttgctgaattagttgagatctaaaagaaacaagcttaattcttcttcctgattagtagagatctaaaatcaaaaacgtaattcttgtataaaccctaacgattaaacgaactcaaacaaca

SEQ ID NO: 55954 - DNA, 682 bp, Arabidopsis thaliana landsberg
gcttattaagatgctagattcttttggtatctattgagtgaactatccaaactatgctcacaaaacagtctaaagtttttggctatgccttcgaaagtttagtgtttgatgggaacaagttgctgaatctgttgttttattggcaaatatggctctgtctgacattttttttttcaaattgagtatgctaagaaagaaagaaattgcaatattgatgttagagatagtagaccagttcttgaactttcgtatactgtgttttttttacatgtttccaaggtaatgtactaatgtcttgttgtatacaatttcaggcagtagatgctttagacaatggtatccatcaatatgatactgaccaacctccaagatatgtaaacaatactagcctggggcataggattggaagattgaacttagactggattgaacctgatcagtctagtgccaaagaagatgaagcctttcatcgggcaatggagcttgctggctctgagttcttggaggtttttcccccttctatatctcgttctgttacataaaaccatttggttctgattcttcatggaaatgaggtgcaactaggaaaaatgctagtacccaagccaaaacttgtttggtaactactttgaatgaatcaacctaatgagatgctattaattcttataacaattgttgcctg

SEQ ID NO: 55955 - DNA, 1395 bp, Arabidopsis thaliana landsberg
atggttacgaagacaaccaccacagcctcaggtttttgatcgcacgggctgcttcattgactgcagcatttaatttttcactcaagaacatcaaaatccaccatgtaagccaactgtctaaacaaaattaagcataatcactgaaatatcatctgttatataactgtaactcttttgttttgacccgtcttgtgggactaattatctgtttctgactaatcaattctttggcaacaggagcgtatatcatgggagagaccagatacaagattcttgagcaggaagcagaagttggatcctgcagagaaactgcatgcaacagattttctgttgaggggattggagctggctttgggctcttgcagttcctttcctcaaggcatgagccgcgacgaactgactcgtcttttagaaggtcccaggacacatattgctccacggtcagaatctactctcaagtcccaagatagtctagggtggcatcatgaggctgagtctctgtctactgcagctttaccggtttgcttcttccggtactgcgtagaactcttcagaggtgatttcttatctttgagacaagacagtaaatccgtaaatggaaggaccacggaggaagaaattcatccagcaaacgaagggttgtccatggccagaaagttttgggacattctctgtgtctggatggccagagaaaggtttgtttttgcattcaagtgctcaatttctcttggccttgcggtgctgtttggtatactgtataataaaaataacgggtattggtcgggtctaactgtagccattagccttgtaagcggtaggcaagcaacactaacagtagcaaattctcgtctacaagggacagccatgggatcagtctacggtctaatatgttgttctgttttccaaagactagaagaattcaggttcttacctcttctcccttggataatcctcgccgtcttcatgaggcacagcaaagtctatggccagcctggaggagttacggctgcaattgctgcactgttgatacttgggaggagaaattatggagctccaactgaatttgcaatcgctcgcatcgttgaagcttcgatcgggttgctctgttttgtcttcggggagattcttgtcacccctgcgagagcagcaacgcttgcaagaaccgaaatttcacactgtctcgatgccctcttagattgcatccaatcactcgttctttgttctgagcagaagaaccagaaagtggttgcagatttgagaaaaagtcaggtaaaactcaaatctcatgttgaagcattagagaggtttgcagcagaagccttaacagagcctaagattccgttcctccgccggctcaacacggacagttacaacaggcttttgggctctttctcg

SEQ ID NO: 55956 - DNA, 1182 bp, Arabidopsis thaliana landsberg
tgttaattaagtaaagctttcttactaaaatgtcttatgtatctacagggaggaaaaggactccattcaacactcaattttcactccaagaaattcattggaatcctcaacggcattgacacagattcatggaatcctgccaccgaccccttcctcaaggctcagttcaacgctaaagatctacaagggaaagaagaaaacaaacacgcccttagaaagcagcttggactttcttcagcggagtcaagacggcctttggtaacttaatgtttccgcgaatactgcgagagtcttgagcatacagattcagttaatttattacacatttattttggtataggttggttgcataacaagattagtaccacagaaaggagttcatctaatcagacatgccatatacagaacattagagttaggtggacaatttgtacttcttggttctagcccggttccacatattcaggtaacatcccggtcccttagatgctcttgatttcttctatttaatctccagtttcgtggttttgagctttgaggcattttggttttttgtagagggaatttgaaggtattgaacaacagtttaaaagccatgatcatgtccggttgttactgaagtacgatgaagctctgtctcatacgatttacgcagcctccgatttgttcatcattccgtcaatttttgagccttgtggacttacacaggtaccatacaaaacatgatctttttttgtgtgcaaaacatgatctctagaaggaaatcgaaccagtggtgtgactaaatgtctgctaatatcattgtcggattctctctttgcacagatgatcgctatgagatatggctccattccaattgcgcgaaaaactggaggcttaaatgacaggtaaaaccaaaaacttaagaactgatctgatcttcagatgacattggtttcaaagatcatttcttttgtttcagtgtcttcgacattgatgatgataccataccaacacagtttcaaaatggatttacatttcaaaccgcggacgaacaggtaatttcacgatgctctcatcttttcaaatcttatcaatctttggtcatcatagctgaaaatagggatggacatttgaaattttcaatttagtttgggttcaggtttaccatggcccgtcttttaggcctgaaaaaagggaaaa

SEQ ID NO: 55957 - DNA, 199 bp, Arabidopsis thaliana landsberg
atacactctaaaacagggcatgtatgtttttaagcatacaaccaccacggacacattaaaagtccaaggaactgaaaacgtatgacaggtgaggaatataatgcataagcggttcaagcttatgccaacttatactaacttgaaaagacatatgggagacactgaattccattcctcccaaaaagaccaactttacaca

SEQ ID NO: 55958 - DNA, 596 bp, Arabidopsis thaliana landsberg
ttcatcaaccattctcaattgacaacaacatctgactaagagatcgaaaagaatcgtgcttttcgtctctaatcgatcatgggcaagcactaattcatcgaaaaggtttcttattgagttcttacgagaagtaacgacttctttcagtaactgagtaacgggttttggagaagagagcttggagatgacagcgatggctagacactgtgtttgaaagtccaggcgataaaggtcgatgtggttgacgaaattgaaggctaaattaggagtcttgacgaggctgagtagagttgtagatacaagcgaaggtgtgagtttgtctgcaacgtgttcgacgatatgccactgagaagatcttatcgactcgagcaaaatttcagaagttatcggcggtaatactgactcgggagttgatgtttgggctaaagaggaaagacgagctgcggcaggagaatagccggcgcgggaaagaatgagatctgatgcgtaaatacaggggactgtgaaacgtctcatggctcaggaaagatgaattgaagagaggttacgcggtttatgagtgtctgtacaatttcggtttaaattgatttgcaggg

SEQ ID NO: 55959 - DNA, 1274 bp, Arabidopsis thaliana landsberg
ttcagttttgggtttagggcacagctttacaaagtagaacattcaagattcatgaataattttttctattaatataaacttataattttggatatatgcttatttcgcgagagaagagtatatacgtaaatgttaatattctttataagaaaatatactcaaagatcttcttgttgaaatatttttaaaaaaaaattgtaatctattttttcatcgtttaaattggattaaaaatgacataatttcggtatttaatacttaaaacatgaattgtgacaaactgttttcattcaaactttggaatttaagctttttagtccagctgtttttttttctgactagatattaatggaatcatactttttctgttcttctgtttttgatatgatttagattgattcaccaaaaaaagaaataaataaaaagtgtgaaactctgaaacacaaaatccatttgatttgcatgttctctctgcaatagtatagtttctttgttataaatgctcctttttgaagtaaaaacaaataccaaaaggtaaacattgtgagttttcagaaaatggaagttttttttttacttggttaccacctactatcacttttcatcttttaatgtatttatttcctaatttggaggttaaaagttggtcattagtcaaacctctctctttaaatgtatcaatttaatggcattatttgtaactattccggttaaaatgttgtccataacggttagaatgagagtaatgcgattaaattaagaaaggtatctttgagtctccgatcgtgcttggtcatgattgccctccgaagtccacgagtcggcgtgcgaatcggtgttggtcttaggacggcaaaatgaaattttgttaggctttaaattcatataatgggctttagtttcaattttattttatccattttgtaaatttgattagttataaggcccaatgaattcggccttataaatcgaatttattcgtttgtatacgtatggtattcatggttttggtccttttggaagccaccattcttatgattagttgaattattcttgtcaccgactaatactcacattattttataaattcaaagtcaagcgttattataatggctaaacttacacgctgaaacactagaagagaatatattttttgggtgatatacctattgatcgaatcatgagttggttagtaaattgtttatgatcaatttttcgtaaaaccaatttccaaataaagtaatgataattttctctcaaaaaaaaatctcaag

SEQ ID NO: 55960 - DNA, 893 bp, Arabidopsis thaliana landsberg
aagtaatcttaagacactgttgatcactatacttgctgccagttctgatccagatctcagtgacacggacgatgactttgttgagaacatctgccggcattttgcgattattttgcatgttgactatacctcctcaaatgcatcaactagtactagttcactcggtggttctgtgatttcaacaagttccagatccaagagtaatcaatcatctaatttaaagcagttagatcctttaatatttttggatgcactggtcgatgtgcttgcagatgaaaacaggctccacgccaaagctgctctgaatgcgttaaatgtgtttgctgaaacacttttgttcctcgctcgtgtcaaacatgctgatgtgttgatggctaggggtggtcacaatgcctccatgattgtctcgagtccttctacaaatccagtatattcaccccatccaagtgtgcgaataccagtgtttgaacaacttttgcctcgacttttacacggctgttatgggagcacatggcaagcgcagatgggaggggttatggggttaggtgcattggtggggaaagtgaatgttgaaacattatgttatttacaagtaaagattgttcgaggtacggttcaagaagtatagaggcttactgtgtttgctctcaaatagcgctacaagacaagtcgtgtacttatgcgtaatctgcgtgtggccaataacgtctacaacgcaagctgcgtgataccatagaacaggcttgcaagatgtaggccagtctatggtgacagagaggtttaatcctaactcatccattcccgtgaggaaaaatgtggacaactgccttgcacttgtgtctagccgatctggtaccgaagaatctgatttgctagtgcctttataccaacta

SEQ ID NO: 55961 - DNA, 1492 bp, Arabidopsis thaliana landsberg
taatatttacccaaaaataatactacaatatagaaaagcttgattttttaaaaaaattaatcagatttggtaatggataattatcaatttcgatggacggttaaaaatgagtcattaatgcatatgatgaacaaaattattcagtttaaacaaactataaccaaaaacatgtaaatggaccaggacaggactaagcgaaggataagaccaatacaaaatagcaagttatcttgaatcccaataattccacaaaatatctcaatctcaataatagctatattgtattgacaaaaaaaaggtataaaaaatcttcacaataagatatgcatgaaatatattcgctgacaaaaatatctctctcgttacctctcgctctcacgttattgacatttaggagaaaagaagacacaacaaagagggaaaaaaagagtggtaaggtgaagaaaacaacaaaattggctttagtggaaaatagaaagtaaagcttgagagtgacgtatggggccagtgaaggctggtggggaaggtagggacagtgtttccgcggccgaaccacgggtttagaggattttgacgtccccacgcattatcttgtggaacccatctttctgtttttggaaaatcgtacggacgttcgtttttgaattatttgctgaatcgggttgtttgggtttctactctgttttgggattcttcagtggattggactggatcttttgtagctttttgttggtagatttgagacgcctctattttatgaatatcttaatagctttttgttgcatattcaagctagataagaagataattgaggctttatggcatatttgaaaagtcgaaactcgttctcattccacgtgtgatgatatgttcgtggccacatatcattcggccttgaaagcaactactaaactcttaacataagtgaagcaatccaatgaagaggaaaacaatttatttaattaattgtaatatataaatatacacatttctttataacaacaattattaaacttactaacaaactcatatgtttcatcgaatccaaaacttgacatgtgggatcttgagagtgttaagttgcaagactttttaaaaacttgtatgcattattcattgtgtagatgttatgtgatacatgttctagttctattaatcagtatattctaatcaaaattaaaaaatctaatatttgtttctcttcataatctgttattgttttgtttttttagaaagcagcttcacattttgtttacttgttgggcttcttataatttgtttaacatataggcccaatactcctaaaaagtagacgttctcgacttctcgtccttcagacaaaataagaaagtcaaaatgtgttctgaaaaaaatatctttgaaactaaaaagaaaagaaaataaaataaaaatccaaatgatctctcttgccttctttatctaaatcgtacctaactctgttttcagtttcacctatctctcgacgcgagct

SEQ ID NO: 55962 - DNA, 1547 bp, Arabidopsis thaliana landsberg
  unsure (1)..(1547): unsure at all n locations
tatctaaatttgtattaaatcaaatatctttgatcatacaatttgtgttacaaagaactatagaataaataatatccctcaattactggctaggaattgcgaatgaagatccggtattagtgatgatacgatataatatgcacttccggtgataaatcaacgatgatctggtctgagagcaacaacgagcannnnnnnnnnnnnnnnnnnnnggccggactcacacttaaacgttacatagtacggagacgccgcgaagaacaaagcgaccgatagagccatggcagcgacagaaactccaaaaccgatctgccagccatacgttgtctgaacgaagacgagcaaagactgagaaagaaagcatgcgaccatgacggagaagtagtaccagttgaagagcgtttctacggatgatgtggtgacacgtgacgtctgattaggttggagctggtcggcagcgaaggctaagcaggaggatctaacgccgccggcaccaatggcggtgagggcaaaaaaggaatataggagaacacttttgagcagtgtggtgggttgacacacttttgttaatttatcgcattctggtcgaattattgttgtcagccataacaaaaccattccctgttactcacaagcaatattaaattaaatacaactaattataaagcaaaagttacataaataaaataatagccacggaaaatataggatgattaatttttttttgaaaattctacaaatgattattattaatgtatagtataattacatgcatcattagaatatatagttatttgtttttttatcaatgataatatggactaggacttttgcaacaattgtattaagacgcaagctaaggttctccagtttcatatataatttcttatatttctccaatttcattttttgttctgatttgtgagcttatgacatcaaatatgtaccgtaaggctgatggaggatccaaacccgatcagaggaaaccgaccggtgtaagaatcagcgataaaagcaccaacaagagcgaagaaattggtggcggcagaccagaggaaaaggatgttggccgcttccgctgttcccatgccgtattccaccgtcaagaagagtatcatgttcggtaccaaaccaaaatatgcaagtttctccaaagcctgacttgctatccaaaaccatttaattaccaagaattaaaaaaaagtacgtaaatctatctatttttatgaatacggagtttatatcatatataagaatacaagaattgattatacctagaatgaaaggaatggtcggaataccgcgcttcagaagagttcttccgacgagaagagcttcttgatccattttcagtctctttctcttgaaggtttttttactcttggtggttttgacaatatatgccttatgttatgacgttgtacttcccatgtcgcgatcagattagcgatcagaaaaatcattttaacgatatctaattaaaaacaaaagtaagtatcctacctaacctaaacaaggtccatggaaatattttcaaagttttatta

SEQ ID NO: 55963 - DNA, 907 bp, Arabidopsis thaliana landsberg
aacagccttctaagcctcttaatgaagaggtatctaagccaagatgattatcttggctttacaactacatgtgttatcagaatgctgctgagaaaataaagtagcagagcttaaaaaaacaaaagcctcaaagatgtctgtttctttacaaagcatttttttagctttacttgtagatagttttcgatataaccagataagtttaactgcagaagagaagagatatctcataaaccataattccaaattcttcttacattgaaagagttgttcctgatattgaattggtcaataagtttatgtagaaagctcttattggtcaataagatttgagatttcaacaaaatcagaaaacaataaacatcaaggtgcaatacctaatttaggataaacataagttccatttgcaatttttacaattcagtttagcgtaggggtataatagtaaaatcgatggattcaatccatcaaaatttccaaccctactgctactcatgacacgtcatctctcctcgtaatcggagattttctctccttctcttttcagccgccaatcgccgccgcaatcttcttcatcggcctccgttctacatcgacggtgtttgccgtaacttctgtcaaactctcagaatttgcttaagtataccacctaactcgagacgctatgaccgttttctcagttcagtccactatcttcagtcgagcctccgtagctcttctctcgagcaatggcttcaaacgattttcattcgtttcttcgttttcttcctccgccgcttactctccacctaaaatgaggaagcgtcgctacccaatcgtctctgctggtgatattggtggcgtcgcaatcgctagaaatggttcgttcttagattcgattcttaaaagtgaagttcataaaacatcg

SEQ ID NO: 55964 - DNA, 591 bp, Arabidopsis thaliana landsberg
aatacaaattcacaaccaatatatacttcattgctactgctattgctactcatcactgtctttgttaatttcaacacaaaacaaacactatcatatgtgaaccactgctaattctcatcactggcatgcatttgtgacatatgagcgatgagcattggattttatgtctccgagtcactatcatcgtgtttccagtttacactttgcacccgacatttgcttacccactctagaggtcctatttgctatttccactacaatacgggtcaatttcataatttctgaaaatatacggacaccatccaatatgaactatgaaaccatggatatctcaagtgaaggtacatccaaaattaatgcgaacgctgattatgaatttcagttcacattgtctacaaaatgtaaaatctgtaagacacactaatcatgatataggtacggcatttcggtttaaactaaggctataaatcatcaactacaactatgaatcatatcagttaccactattcgaaaatccataaaactatggactatagatctaacagttttggaatgtcaaaaaatagatgagattacttaaatttgacaacc

SEQ ID NO: 55965 - DNA, 1142 bp, Arabidopsis thaliana landsberg
ttcaaagctttacgctactttgggccgaagataagagactaaatatactaatgctttaaccaatccttattgacaaacattaatgaaagctatcgagagatgattcaatgacattctatgtcttctctcttcgtctgtttctctccctaagcgtaagagtctcaaaggggacattaaaatggtcattcatagacatacgtatcctactacatcatagatcctgaaattttcgcatatcaaaaggttttaaaattggggagaaagtttgccatgtttgatagacttatctttgtacaagacctatgaacaattaaatacaataacaaatgtaggacatcttcatttgtttaggctaactataaaatttgctaatcagttttgaattcgtttctccttatcccttctattctctctagcactcccttcacagcaacatcaaaagaatcttcaagaatctctccatccggtttgttccggtttggtttagcatacacaatcttcggaatcaatcttattacgttttctctcataccaaccactctctcatttggtattccacgcaaaatctcttcgattttgttctttccaccggttctcagctccttaaccgttatataaacagaatatttgctactattcttaggtatgtgccataaatattgcttgtatgcacttccttggttaaagaaaaccggtatacaaccagccaagattgaatcaaataccgattttctggtcaacgaatcacccggcggttgtaagcagaaagtcgaactctcgaaaagtttcatcagactgatcggatcatcacagctatttgcattgacgtcacagtcaagaaacctacacgttttagatgaactcttgcattgttttataacttcagtgcgaaccacaccgttctggtttctgcttggtctttgagctccggcaaatgagaagaggaccgtccggtttgtaagcctgatcttttcttgccactgaaggatctcggaggttgacgtagggtgaaagtaagtaggataaggaattgcgaactcgttgtggctcgttagacttcgttcaatgctgaggaaagtgaggtttagcgactcagataagagcatgaagttggttccccatgctgacctactgccggagtt

SEQ ID NO: 55966 - DNA, 1045 bp, Arabidopsis thaliana landsberg
ttatgtaaaataatattcacgtgatatgtctttcgtgtagttctgttccggaaatagttggtcttttgtctgagttgaacgatgcagttgaagagcttgagagtaagataaatcctgttatgaataaggtaaacctctttactgtttcacaatttttttcaatatgtttctatattgccactttatatcaccctagttcgaaagaagggatttgtgactcctccagaaatttatgcaattatgtctccttgcagttaaaggaaggagaaatttcgttgaatggtttaacaaggtacctggaggttaagcagcttctgctacttacctattgccaatctataacattttatcttctactcaagtctgaagggcagcccatccgtgatcatccggtccttgcccgtcttgtcgagatcaaatctttattagataaggttctgcggtgtacccttttaagtttttaatctctcaacaatctacatgttgtacttctacaactagtcaagctatgtttgtttatatattaaagctgctgagttaatgtatgttttttgtttaaaattagatcaaagaacttgatgaagagcttccccctggatttgaagagtccctagcaagaagtattgctaatggagcagtgcaaaaggtggttaaagaagatcagctcacttcacctgtttctgattcagtagatagaatcacacaagacacagccaaggtagaagttaggatcttactcgctgtcactcaagttaatctcttgtgagctatttgacactttctttgtacacaaccttgctgatctctgtttattcagccgatgaaaattgacaacgcaagagaagaaaagaagaaaaaaggagagaaacgcaagcaccaggtaaatacaaatctaagcattttcctggattttctattctattggaaattgttcaacctcttgcttactggcacattttcttcgtttagcttgaacaaattctctttctttctagcagaatgatctggttgatgtgcaaagtgaggagatgttaaacttcgagca

SEQ ID NO: 55967 - DNA, 1253 bp, Arabidopsis thaliana landsberg
aagataagtagttgcaagttgcagagacccgcaggcatcagaagcatgctggccttctccaaaaaccaagttccctctcacaaatgtcgaaaccactttgcctgataatcttcttcccaaataagctgagatactctattgtacaccacaagaagcaaacataacataaagattacacattcgtgttattcgagcttaaccattagctatatctttcttgtaaaaactgtgtacatacagggtgtttgaagtgaattggatgatcttcatctagatcaaattcggcttcaggttcccacacaacaagatctgcgtgttttccaaccgtaatcgctccctataattaaatcattacttataagctgcgataaatggacccgaatcctaatagaaacacgtctctattatgccattgtgccgtgtatggacaaaaaagagaatattgaagctgcgtttgtttaataataacgaaccttagagtgtagtccagcgagtttggaaggcctatcgctccaccaagaagttacctgctcgagcgttactccatacttttttccataagaccatgtgataggaagaacaaactgcaattggctcttccatgagtttttttgtgctctcacagtttctacatattacatttttaagactaaacgaacctgtaaagaagatatcccaccccatgctttcaagaagttaccatcactcagaagtttgagttcaggctttgtaggtgaatgatcagagctcagcatatcaatgtctcctccctaatcaaatctaaacctcagaatcaacacgttaaggtataacaacaaagattgggaaaaaatatatattataccatcaaagcctcccacaagttttctctatttgctgcatcacgtataggaggggagcatttgaaacgagtatcaccttctggaatctcttcggctgagaaagctaggtaatgtggacatgtttcaacagtaacactgtctcctttgccttttgcttcctttactccatccaaagacaaaaaaaatatgtaatgagatacaaccaaattctagtgcttctactgcttgaactcttgaatacctttatcaaatccaaggaagaactggcatcagataaatgtacaatatgaagatgagctccttctgcagaaccaccaattcttgtgttttcagtaaccgataatagggttctgattgctccctcctccctaattgctcaaataaatattccttcaggtacaatgatgactc

SEQ ID NO: 55968 - DNA, 1314 bp, Arabidopsis thaliana landsberg
atgctgatgtaggtcagtaaatttgatccttctaagaagaagaagaagaagaagcagaagcctctgatacgcgaagacgacatcttcttccagaatggaggacactttacgggtaatgaattagctttcaaagaattgcgttggaagataatcagttaatcgtacccaaatctatgttgtgtctgaagctactgtcctttattgatgttatcgtaacagaggataacttaccggactgtcaatctagccggaaatttgagccagattatggctacaaagaggtacttttcgctaaaattagagttctttagttatgctactggttctcatttgtgatccgagcttttctatgctctgcagctcttgagtatggtgtttgataggcttcgtgaggaagatgtcgaggtttctacagagaggccaagaacagtgatgatgcctcctcagctccttgcagaagggacgataactgtttgtttaaactttgctgatctctgcagaacgtacgaattataactcatctttccttctttaactacttgtagttggtgagccatgtatcacttttaaatatacattgttcaggatgcataggaagccagatcatgtcatgaaattcttacttgcccaaatggagacaaaagtatcgctgaacaaacagcagcggctagagattaagggtttagtgtcttctaaggattttcaagctgtgttccggaaatacattggtgaattccataactagtctccggtgttgatttttttttgtttttctagtggtgggtgtcttgtctgatatgtaaaatcattgtgtcttagatgcgttcgtaatctgcgtctgctgcaaaagtcctgacacagctctcgcggaggagggcaatggtcttttcaatctcagatgtgagacggtaagtagaataatctctgcaaccatctgattgctgcgttcaggtcagggaaaagatgaggataaattcgtctcatttgagtctgttcttgtgcagtgtggtttagtagcaccagtcgatataccaaatctactgtgaagaaactcatgaagatatggaaattcaagagcaacgtgctgggcaaggttccattgtaagatttatagtgatttcttctgactttgttagtcagttgtatcagaagacgttttctctacaactctaaaaaagaagttcccgcgtcctgagagatgttgtaaggctgaactaaaactctcgaaaccgtttgtgagatgtctttagctagtgtatgcctaatggaagttctttaatgatcaagtactgaaacaaaacccaatgatgcaaa

SEQ ID NO: 55969 - DNA, 381 bp, Arabidopsis thaliana landsberg
tgagcagtcacacaaaacctacctggctgaaatctttcccaatctagaaatggaagtaaaaaatataaacacatcctttacatgtcatctaaaaatgggacatgtacattgcattaataaaaaatatcgtttgtgtaggggaaaagagagaacgctggtgcctctagaaaaaaagaaggttaaaattatttagcatacttgaatgattatctgaacaaagacattgaacttagttcaatcaaacatgctaagatacacagaaaactagcaaaatttaacaatcggcaaaaaaatcccctaaaaaatcccttgtagagttcaatgccttccaaggtctgattcgctaacttaatccctaaactgtaactatcggccaaaaat

SEQ ID NO: 55970 - DNA, 310 bp, Arabidopsis thaliana landsberg
  unsure (1)..(310): unsure at all n locations
attacaatatnataattttggactgttacttgaaagaagcatcacggagtatacacagtagcattgaaccatatgatgataaaaagagtactttttgtatagatcagtccatcttgatccctgtaaatcgcttaaccatttaccaacataaagaaatgaatagatcgatggatttcgtatatttgtaaaattacattatgactgtaatgtaaaaatggttctttttttttgttataggttatagaatgaatgtaattgtggatttacatggatganttttttttgtggggggggggtggtgtggtttttt

SEQ ID NO: 55971 - DNA, 490 bp, Arabidopsis thaliana landsberg
tgtgtgttgtccatatttatcatttcatgacaacatcacctaaaaacaaataaacataaaatgtatgccaataaattatgcatcatactgagggttttttgtgtgtgtgtgcattcactgaaaatagtgattacatcaatgggaattaagacttggtttacaatttagaattttgaaataataaagaaagagaggaaagatgccatgaaggagatacatacataaacaattataccttgttcatcactagatttgaattcgtacaattgaaatatgaatgagtcaaaaccaaaattaaaagtcaaaatttgaaattcaaaatgagaaaaaggaaaaagacaacaaaaataataaaaaggaataggcgcgattgggcccaatcacgctcgggcagcccactttctctcccctccgtgcagcccagttacttacacgcgccattgccgcgataggtgggctccagtcgccagccacatgtgtctcgctcacg

SEQ ID NO: 55972 - DNA, 170 bp, Arabidopsis thaliana landsberg
  unsure (1)..(170): unsure at all n locations
tcggcaacaattgatattacagacccttctcggagnaggagatgcacccaagaggaaaagagaaagacggaggagagaataccgagagaaaagtgattttgtctaagtgacacgaataagattttcactaagtaattttagttctcttttttgttaattgttttttttat

SEQ ID NO: 55973 - DNA, 655 bp, Arabidopsis thaliana landsberg
  unsure (1)..(655): unsure at all n locations
ccccccccccgccccccccccccccccccccctaccccccccccccccccccaccccaccccagggagaaacctcncttttcgcccccccccaggcttgccccctattaaaagccccacccccccccccccccccccccgcaccccccccccccccccccctcccccccccccgcgcgcccccggcccccaaaccaaaaccccccccccccccccnccccccccccccccccccccacccccccccccccccacccccccgcctccccccaccccccccccctccccccccccccccccccccccccctctccccccccctctccacccgctcccctcccatccaccccccctacccccccccccctctctttcccacccccgggcggccgccccccccctccccccccccccccctccacacacacacccccccccccccccccccccccccccccccccccccccccccccccctcccccccgcccccccccccccccccccccccccccccccccccccccccccccccccccccctttctcccccttccccttctccaccacccccgaccctgccccctccctacacccccccacccccccccccccccccccccccccccccccccccccccccccccccccccttcccc

SEQ ID NO: 55974 - DNA, 574 bp, Arabidopsis thaliana landsberg
ggtgggccttgtcagcgccgtcggtcaagcgacagcaggtcctgcccgttgaagcggatggtttcgcctttcggctcgatcagacggaccaccagccggccggtggtggttttgtcggagccggattcgccgaccagaccgagcgtttggccggcggcgatgctgaagctgatatcgtccaccgcgcgcaccacctggcggctgccgcgcagcgcgaaatgcttggttaaccccttcacgttgagcaacgcgtgggtcatcgtacgatggtctagacggtgtagccggtgtgggggatgctacgggcgcggtgtccgtgttggaacgccatgaggtccggcatccgcagtgtgcatggcgggcgggcgaagccgcagcgcggcacgaagcgacagtcgggcaggatcgcgccggctggcggcacggtcccttggatcgttgtcagcatcttcacgtcctggtcgatcggcgggatgctgccgagcatgccggcggtataccgatgcagcgtggtggacaagatgctggtgatggggtcctcctcgacgatgtcgtctggatacatgaccaccac

SEQ ID NO: 55975 - DNA, 470 bp, Arabidopsis thaliana landsberg
  unsure (1)..(470): unsure at all n locations
gatctgtctgaatctctttaactagctagctaagagcgcatgaacgacgagctagctgatgatatgatcagtgtggctaagcaagatagtaactggttgttcagttagagtgttagacgggatggcatgagcttgctagctgttgtgtagcagtggattaggtgcgctgaaaccctgggggagnnnnnnnnnnnnnnnnnnaattgttcgcttgccatcgatcaggttctgcccggcggcgctcattggagactgcatgcatgctaggaaattaaattgcgtgcttggtcaaggatttcactactactagtcaaagcacgcaattaagagccattgatgctggcgaatcgagattttaataaactatggcggtgactagtgcgtgctcgacgtagcagtgntcagtttgtcacagctcatcacaagctaggactagtatgtacagtgttagacccatgttttccttagac

SEQ ID NO: 55976 - DNA, 1149 bp, Arabidopsis thaliana landsberg
atcaatagtgttcaatgatacaaatatttatggtaaaatcagacctctcttctttttcatagaaaaaataacacgaaaactacaagaagataatccatttcctgagattatgtggtttttgtaattcttatcaagacatccagtgctttggagccatcaattcacgatctccacccgaaccttgcaatgcgattttttgaatccgagaagagaattcctctgcctgttcaatgttcaaataaatgttgcaagttaaaacacaattgtagttattgtaacaatgcgtagaagacaaatttaaaaaacttactttctcatcaatccacattaaggaactgagttgattgttcaagattctgacaactacatcaagtggactcatcccatctatcgcttcaagttctccaccctgtttccacacaaacatgtttatgatgtatgttcccagcaaaagcaaacgaatagtatatgataagttactgcgttacctggtttgcatttacggattgtataatcgatctgatttgttcagtcatatgctccagttctctttctactagctcagactgttcatacctgggatgaaaaaacaaagtatattgtaagaaagcatagaatcaggatgggatgcgcatgatagagctaattcttctaagcatagatcaaatcatatttgtttccgtgtctgtgggttttctttcattattcatcagaataatatgaagcagaaaggtaatgatgcaaatagttctcacattgcatctctagttgatgctgcttcatcgtccagaagtgatttccgctcgtcattatatatacgctcagcctcttcctccatgctttgcaaagccttgtcaaccttaaacagaaacagagaatccaaatgattagcacagtggctttggcatttgacttgcccaatttcgaattaagcgaggtataaggtagacaatctccatgtcacataataaaagagtgcgactgagagagatgatgaacaagagatatattgatttcccacagataaggcacacatgatttcccgctgcaagttacaatcagaaacctcatttatagattaacatagagatgtcatcactctattgcatacctcttgctgatgagtctcgattaattccacctgccgtt

SEQ ID NO: 55977 - DNA, 542 bp, Arabidopsis thaliana landsberg
  unsure (1)..(542): unsure at all n locations
tattttcataactagaatcatattttataatttttgaaggcgtgatgaataaaattgatctttctatattattaggaacaaacatggccaaattaattaattaaactagtacatacctagtaaaatgaatatactatttaattaatgaggcttagtttattgtaatcactagtgactacagtaaaaaatactagtgatttgattggctaatatatatctgatgttgatggaatcaattgatgatcaagtcacaatctctgcatgtaagatttaaattcttgcctgcagcgtagtaaatttgctattagatattgttgctacgtgctgactgcatagttgactactgagacatgctgaatacaatagttgtctaaatcgccaatatgtaccttatggcttgcaggatcggcgacgacggtcatgtgtccctgcatcatgcgacgtggcagcgacatgaatgactattcgtgttcattttctgtacgtgattatatctcgtcgatcaggcatacgtanaatatccgacacacaaggggtacgag

SEQ ID NO: 55978 - DNA, 364 bp, Arabidopsis thaliana landsberg
agattgactccgacccactggaacgacgatcaaaaccgtttgcaacatttcgtaggcacccgagccaaggggaacattccggtgccttagcaaatgatcctgagaaatgaccgcgaaaagcccattcaccacaagaagttaataagggagccgtaaccagcaaaaacgtgccactaggttccggcgagcaaataagaacggaggcctgccatttcaggacaacacacacaaagaaacgggccaacagatactcaaggcataagaggaccgatgacagatacagcaaaaaactaaactctactctcctaatattcatgtatagattaaatttggctagatactcactagagcatggatgaacagg

SEQ ID NO: 55979 - DNA, 1415 bp, Arabidopsis thaliana landsberg
aaggcccactcttaaaatgttgacatggataaaagcaaaggaacccgtagctgtgatagagagaaaaagaaattaacctcatcaccacggagtgcttgtgctaattcctccctaacttcactctctactttagaaagagactccttttcgagtgcttcgtgagcttctgcagccttcagatcaatggggaatcataaagagtgagatttagacctgaaagttaaataggcctatccagatatccattgaacaaaagcaagagattaaataccttgctctcaactgccagaagatctgaaattaactcatctatttcttcctcgctcaaaggtttctgcccaataattgaaaaaagaaatattagataaacatacactattcctccgccaagtaaacaagagatatccatgatgcatacctcaagatccaactcatcatcacgccgggacagaatttgttcatcttcatctgaattgaagtcagaactttcagatctactagaagcatcttgcatctcctcatctttttgctcaccctgattgttgttttcttccatcagtacatcattttgctcccctcttccatctcttgctttcacctccattacctcctgttctgcttccctattttcttctattattatatccatctcatcctcttttgactccacaataacctcctttccctctagcttttcaatttttcccttcaaactttcttcgtttgcctccatcttcacttgctagttgctactgaaaaagtgtcaataatggaaacgttaagcacacctcctgagacttaccacaactaaaaagacgcatctgtgaaacaatctggtatttaatatctcacacaataagatcttacgacaagacaactaaactcagctctaaatcccgacaattaataaccacgaactttatttaagcatgatattaaagttacccagaatcaattgacttagaaaataagagaagaagcaatagcgtttacctaaagagacgagaattgcatccaaaattttgcaggttctggaaggcaaaaccataattagttgtgtaaaacagtagaagacaaagcggaccagcaaatcccaacccagttgctctgaaacctgaaaaaccctaatcaattgaagctacacgaaaggagaagacttacagcatacgcatacatcagttctccgagatcacgagcatccttgcggcatatatcatggtctacataaaaaagaggagtagcacaaatcgtgattaattaagaattacaaggctacttaattctaagcattttcatcaagcgctcgaaatttaggcgacggcgaagaataggcttccaaagcgagagaatcgtactagtgcgaaagagactcggaagaatttgtagggtttcgtttgggggagcgacactgaagg

SEQ ID NO: 55980 - DNA, 126 bp, Arabidopsis thaliana landsberg
gatgtcagttataaaggggagcctcatctctcggtattgtcgggcacgttcattcgggatatcggaaaaaccaggaacgtgaagtgtgaaggcgcatgcaaaagaacggttggcattcgcatcacc

SEQ ID NO: 55981 - DNA, 947 bp, Arabidopsis thaliana landsberg
aaaaatatgtaagaaagtttgtgtattactgtccttttttcttagtttactgcagaagttaacatgtgggaagcagaagtcgtattttctagctgacgctgacgtgagagtctgatgtcgtaaacttgaacactgatatagtgaaagaaatttaatcattaaacttggctttcaaatatttggcataaaccttaaatcaattaaaaaaagtagtaagggaaaatgcgtcaaaatctttggccaagttaagagtcagcaatcagcaaagggaaatgcatcagccatggagataacttgataactcaactccttatgagctttttgaatcactgtctcttgtgcatagaacaacatgtaacactcacatcctctcaccacttcttcttcaacctcattgatccatgcatcatcacatctataccacaaccctttaagcctcagatacgtcacatagtgacctgattccaacatccccttgtgtgtcacaaccgcaaatatctcaaactccgctgatggagatgatgatgacgaactgtcatactcaccttctccatcaaaggcaaatattctgttcccaaaccgctttccgatgatggaggaagagaggtaaggagacatgtttaggcggaacggatactgcaagtagctatcaatttttctcgaggttttacgggtaagagaatgttcgaaacgctttacgtgcaagcaaagaagcagaggaagtcttcttatagacatttgtttcgaagattctctcttttctccacagctttggcagtttagtttctggtctggaccgagtttctctgaccgtgtgaagaaatctaagcaacccgagagagttggcatgattgcgttcacacttggtccaccactgtatctgttctttctgcaatcagcgggagagaatccatccattgaatctaaagtaagtgaaatgtcgataa

SEQ ID NO: 55982 - DNA, 1101 bp, Arabidopsis thaliana landsberg
atcattaaaactgtattgttttatctccataaattttgaaatcgatcctaactagttgaataatccttctataccaagaaggcaagaaccgacatttgaattaatttaaccaattatcttccacaattactttctttttgttgtccattgttcttcatttacttttgggttgaatttatgaactcaacaagtcaacaacattttatgaatcatatcaattttgggtacacaatcgggaagataataacggagaaagcttgctaaagacttaaaagtggtgtttgtgaagcagcctatatggcccactattaaacatatgtgatatcatgcatgagttttggttactcattcaaaagtatgctgaacaattctttttttgttttcaaaaattacgggtatgttagattattttgagttaactaaaaagcatagaagattaaaaaaatgttacattttttatataaaatattacaactacatctagtgccggcttagcacatgtgcttaaggtgctaggacatatggtctagggtccaaaaaaaaaaaacatgatatgattacataatagcactggatctacaaaatgtttgagccggtcctgactacatcacataatttcatgctaatgtttttgtgtgttcttacgcctaacgtcttctctacacaaaacaaaaacatgatcatgatttagatttggctgaaaacagagttcttgatttgaatttgactggaaaaatgtttcttgatttggttgaaacatgttttcttattcgccttactctcggatacctcgtagctgagaagatatggacattgttctttatagaaataatgtaaagcacgacttccataccttcttgcaaggatctttgataagttcctatcctcattaacatgtgttgcaccttgtttttcgatcctctaagcttccaagtatatgactacaacaacgagattgaatatctaatgatacaaatggtatcttaactatatactttcttttcaattcttctggtaatgtgtatttaacaattaattttgctaatcttggatgtagctttgcacatagattgctacagattagagctgtcaaagcgggct

SEQ ID NO: 55983 - DNA, 1729 bp, Arabidopsis thaliana landsberg
  unsure (1)..(1729): unsure at all n locations
tttgcttcgaccagatctggttgattcaaccacaaggaaattgccaaatcaatcaaacctagtctcacaaagtagtacaaaacagtccactaaactcaagctcgggtcttttcacgaaattccaacatttaaagaacaaataaacaaatgtaagttagaaattgagaacccaattgtaacgagagggaaaggaaacagaagaagaagactgaaatttgaaatctttggtctcgctacttacctgaaatttgttgttggagagccaaccaaataacgaatccagcttctaagtagagacgaagaacccaaattcacaacaattctcgaggaagttttccgattagaagaaaaccctagaatttttataccgtatttgacggttaaccataaagctcgtcgaagtcgccagtcaccggaagtagtaaagcaaccataaatgcatgatcccaacacgatatacggtgttccgtaccgttaaagtacgcgctcaaatatgtaataacaaatattaagaatctaatctctattccaaagtattataaatgggccgaaatgaaggctttttggcccagttgagattatttccaacttctatcctcttattaatttataaacatggcctttacaaaattctattctaagcataaacatggcctttacaaaaaataaggctaccacacacaaaaaaggtccatttagcaatggtgctaaatgagaagagcttctctatttacctagcagaatcaataagtctaagagcattttattaaatacaatcctctgtataaattccattactcatccactagtataaaggttttcatttttagaaaaaaagatttttaagttttctatattattttcatcatagtttaaaataaaatttgaattgatattttattggtacgaatgcactctgtaaattaaagcacgtgagcatgtggttgatataccatactctctcttaaagtcagcaagtcaacacaatacctaactgaaacttgtcattcaatttagatcctcaaccatcacattaaataaataaaatctcatcttctaacagttaaattaaaaagttttaaaatccacatttaaaagacactagtttctgatttgtcttgaccaaaacctgtaatttatttccattaggggaatgtaagcaaatcataaaaaaatagagaccttatgctataaacttgaattataggtactaattaggtttataatacgttttttattttttgcttaatctgtacactttcttctttttcttcttctgtttcattgtcttcatgcgactcgtcgagtttcgtcccttcactctcttcacatcaaattccgcaccaccacatccacgtgtctcaacctccactctcctacgtctctccaccgtcgccggcgtctgcagcgtctgcttcatcaattcctcgccgtctctctgaaagaaaaaaaggaaccacctttctctctctgttttgctcgatctgttgtaatttnnnnnnnnnnnnnnnnnnnnnnnnnnnnnttttaaaccgccatgaaactctccgacgttggattagacgttgtcaaaactccgagattgggtaaattgattgcgtttgcgtttctctcaatctcaacaatttttctcttcaatcacttctcagattccttctcttatccatctcttccttttcccatctcctcttcttcaaacgtcaccgaagctattcaaaccaacataaca

SEQ ID NO: 55984 - DNA, 989 bp, Arabidopsis thaliana landsberg
tttcactatatcacttggggcaccctatatatgactagaaaaatagtcagcaaaacacaaatactgtccatttagcataaaaaataattgcgtactacgaaaatctagctagtataacttgccttaagaagcatagttaaaagatccaaggatccactcgctagtccttcaggctgctgatgtggctgattctcaccattcaccaccgagatgtcattaaaaggaaaccagggaagaaagatagtaaaactagaggaaacacaagcttgaaataatgattccgcacagcaccttatttaaaattggtccaatgaatggtaaaatccttgatgtcaatggatgaaggcagccaggcgaattctttattgcctgtgtgacagccataggaaagaaattagccgcaaacaaagtattttttattgttcagttaagaatgatataagcagtgctaagtgttagcataaacaaactaggcaaattgcatttctaacaacaaaatgaatgataaccacattcactttaattacctccaggacgtcaattacatcgatactcataaagggatctgaaatatgtgccacccacacattaagaatcactggagagataatagactctattgaagctgatgcttcatggcctagcagatgataaagaaaataagatataggtgggaactactgcataactagattctgaaagttttttgcaaagagtaaaaatatgtatacttaccagctttaattgcttgttgaagagtttcaagtaccaaaaccaaagtttcatctgtagcctgaataaaagaatataaatctcgagtgacacaaaagtaaaatagacgcatgttgtatgctaaaaggcactcagtagaaaaattacctgacggagaagatcagtgagagatgagaataaattcatgatctgaggcagaataaccgaactgttcatatcgggtaggagctgcaaaagtgcccgacatgcgcctactt

SEQ ID NO: 55985 - DNA, 759 bp, Arabidopsis thaliana landsberg
tgttgaatgtttttgtgtatgctaaattttcatatcatctcgatttttaggtaaattttgttttcacaaagtaataaaattatttgacatttattgcctatagtaatgatcattacattcgagaattgtatgggaaaaactcactgaaatatttaaatacaatataccttatacatatacgatagttttacgccgtcgggtattgttattcaaaaagtgccattggtgtattggttattcaaaaagtgtcgctcaaaactttgacaacgtactaattgcatgtattcattagtcataatattagaaactgccagctatgagctaaacgatggttagaacacttttgtagagagatctaatcttttttggaaataatttcaaattaaggatctaatcagatcataacggatacaactttctaatcatagatgaactcaattatgactaatttccagtctaaatgtatgcgtatcaacacaaattttaattttaattttaattttgctaacacaattaaagttgaggttagcaaaatcaatgagtgttatgcgaatgtctatttaggtttttaaccttattatgtcgaccccaccattttagtcaaagtgtattaattttgttacgttcaatctccggatgatttggtcttatcattctacagaatttggtaagaaaatcaaagtaaataattatttgattttagtcacagactaatagaatttaatgattttctacttattctttggtccaaaattgatt

SEQ ID NO: 55986 - DNA, 1195 bp, Arabidopsis thaliana landsberg
  unsure (1)..(1195): unsure at all n locations
aagtcttaaacggagagaataaataaaaacttgttaatcaatagttaagattttgttatgcgtgtgaagtaaaactctatataggtcgatatgattgtgtacatgaaattaaagttagtgacatgattcttgaaagtaactcgaaaccaaacccacacgagcatggctacaaaaatgtagaatatgttcgtcctcataatcattggtggcttactttttcttcaagtaatttaagagcacatcattgacaaacaaaaagcaatgaagaaagaaagagagaaaagtctaagcatggggaaaaagataattacatgatgcaaaatctaatgttgtgttaattcataaaatactttatacatgcatcatcctttttctatatatgacagtccaccatttacaaaactacatgacccacactccctctaggtgaactcgaagccaaatattcaagagtgttaacctcagtatttgaaacaaagcctcttcagtcttcatagagctcctattgtccgaccgtagccattcttggttctctattatactcactggccactgcaggctgcagtgagcttttatggtttcagttctatttgtttcttcatatatataattactaatcctgttttgattttgaacattgtatccatctttattttcggctaagcttacatattgtgactaataaatttttaacttgctagaagaatcattaagtcaaaagctagcttaatatcagggcttgagttgccacgtaaatttctttcaccgattttgactaagaaaaccttttttggttctgtttttctcctttatcataaattacaccgtaattcgttaaaaggcgtttacatgattacaaatagtgattttactatcttccatagtcaaaacctagctatccacatataaatgaacttaaccttaattagcacgatacatgttttgaaacttctaagaaactaatgaaaaaaaatggaaacccccatgcatacttatgagtttgaagcctaaatttagtcttaaaacctttaattcattgttcaaccacttgataaaacattataaggtttatagagtaatactattatataataacaaagcattatggaaatatgattcagaaaagtggtcaatgcatggagaaaaaangtgtcagcattattgaaagaaaacgtcgaagtacgctcatgctcat

SEQ ID NO: 55987 - DNA, 1168 bp, Arabidopsis thaliana landsberg
tgcccagggaaagagctcttcttctgccttttgtggcctttcatactgtgccataaacctcttctgctcattgctctcaaccccataatagtctctaatctgttcatattcattcacccatttagttccaacatcaaattaatctctaccacgcatatcaactgcaaattaatttccttccaactcacctcttcaggcctgtcctccagatcgtccaacacatctttcatgtatgtattttcagtggcttgtctaaaaaagtgtttctcttttctggcagcatctctttcttgttttgaagtcttatcttccatagacataggggcaaatttcgggggtcgataaacaccatcatcctacatttacacaggcaaagaggttaataaaaataacacgcaacatatttcttcacaagtgttggaggatagtaaggtttcacctcttggtcatcctctttgtcagcaagtaagtcaggtttaggcttataatttgaaagatcttcagatttttgggcttcacccgacccctttccctcggaatgagctagctctgtcacaggcccaccggctgtggtgagcttctgaatctggtactgaagttttttgtctatgggacgaatctacacaaaagaaaaacaagctaaaactatgactccatgacttgttggcgatatagaaagtggaaaaagacaaagatgcaaaccttttccagaaacatacgtatctctacaaggctccttacaagaggatgaccatcaatagagagtccttttgctttccttagaatataatatacaagatcctggcaataacttagaagtaacagatgcttggcctcaagataacttatcccacccgctgtcggaaaactgtttgcttttacctacgatttgtaaaattaagaaagtcaggatgtcatgaatgacccattgtgtctctgaatggtaacggcagatgcagctatatacaatactttggttaaaaatcctcaaggagaagcaaacagtttgttctcgaagtcgtcaatttctacttatacccaattgaaactagacatgttatagacgagaccgagttgatattaattaaggagaatccaacagaaatatgttatcagattacgtaccaatgcattcagagcttgcactttgctccttaaccacatttag

SEQ ID NO: 55988 - DNA, 522 bp, Arabidopsis thaliana landsberg
acttttcaatcctctggtccttaaagtcaccatcatcgttgacatgatctattgacaaattttccatttgttatgaccgagcaaggatcatgaactttctaagtctattgctcgttccacttaggcacaagtgcgaataaaagagtcctgaatctgacccatttgttaccatatttcgtcacacaatagggatcagacattatcccatctttacctattataggcattaagattctagaactgagaatactaagctcaagaattccaatactacagcttgctcaaaagctttgaagaaggttgatgatcgttgctgaaatgagtggactcagtaaaggacatggtaccctgctgttatacaaacacggagcagaatcttactagagaacttctcttttcttttctcattatcttcctccatagacattgaatgtctttgaagattaaaccaccgaggatcaggaatagttccaacctatatgctgaccagaacatcccttacaagaataaacaccctcccca

SEQ ID NO: 55989 - DNA, 1040 bp, Arabidopsis thaliana landsberg
acccgtgtgtcaaatcatcctcagcgagcgccatgtgaaaataatgatatataatatggccagtcccaaattaatgttgtgagtgtactccatcaagactgcacgatggtggcacatgaacctgtataagagaacttagattcaacagatgcaagttgccttgaatcacaataagaactactgtataattactttttaccaaaaaaacgatataaagaaatagttaaaattgcatataccagaaacatatttaaccaagatagtaattcagttcaccaggtcatacatctatggttttcttgtagcctccatagattgttatctatcagacttgtaaaagtagttaccaaatctaacatgttcttgagaaataatctaagtaactactttgtgttatcaaattgtactctttgatgatgtaggaactctgaaccttgaagtcaacattgtatactattttatacaggtacgttcagtgacacacccatcttctgtgcaaattattgaatcaactgatacacccaaacttactcaagtattatcaaatgttgtgaatgaaaaatcaattgactactaagaatcaaaaaagaaacagtgagaaatagcacaccacataaaaagtattaaatttcaacagctggtgaaactgataactttgagagaagttttcgtctttacctcaaacatgacaagtgcaggctcaatagcacgctcagccaatgaagcattagcagacagtgctgttgcaccttcgaagtctcttaaaactgtagtatctgtttccattgcatcatcagatttaaattcactgccatataaggaaccgtttgcagcaatcccatctgaagaatcctcgtcaactctttgtttctttgcttctgagccaaaatcattctgagaaccatccccactagaagtttccataatcgctgcaatatcagtaaccccacgaacattcacttcatgcatgggttccgtatcgtgatggcatatagaaatatcttggcttataggaaagccattattacccatagatggtg

SEQ ID NO: 55990 - DNA, 1088 bp, Arabidopsis thaliana landsberg
aagaatatttaagccacaccacaccttacaccttttccatttccatcctcatgtcttaggtgatgtaactgtctatctccagatatcttttcttgtctactgctaacacatgaaacaacaactcaaatttaagccatatttttacaatggtaccaaatttataagaatcatagatgaaattaccaaaacaagaagttacgtggaaagattgaatccaatattaatattttgatttctattataaaagcaaatgaaataatgattatcagtccattgtttgttccatttttaagtacacttgtttgtttgatttaggtgaataagatccgctaaagctgaaaatacaagaattgtccctaaagatagtaaagtacagtacgcttccaaataaataacaatgggctttagtaggcccacgcaataacgatgttttaactgacccaacaagcccttgtccagttctggcattatacaatgcgtcggtcgacacgtgtaataagtcatgatcggcacgtgtggtctccacttctcctctctcattggtcgtaaactcgtaactagccgattccttctccaaagtatctcacatttccactgcacactctactttctctctcttcactctctcataaatcacaacaacaaaaaaaaaaaaaaagttgttagttaagacattgctttacagctcaattgcgtcttcttcctctgtcttattcttcatcttcatcttcctcctcgcggatccattttgaggttcgtgtaaattcccattctctttcgccatttttttgggggaagtgagattttggtctgagttatcggcgaatcgatttcgtttttttagattattgaatggttttgttgactcttcagttcttcttgtgctgtgattgcaatgatgtcctccgaatttcgtgatttaagttcgattttagctatccgagctcctctttaaataatgagttggggttttattctgaaggttcgatttctgattttgcaaatttgggaggaagatttgatccgattagataatctcactgttctgggtgctgtaattgttaatgagaccatgcaaatgttgtgca

SEQ ID NO: 55991 - DNA, 515 bp, Arabidopsis thaliana landsberg
tagtactcggatttaaaacgattaagtggatacactgtattttgtatagattatcaatatgcaagcaaagatatggagataatctagtataatattagatatatagaaagatatcaatgtacccccttatgctttaagggactcatatttataatttacattaatttgctaattaatgtactaagtgctcttaaaagtgttcgctttgattctctaatcaatgttgtaacgtcttcatctgaattcctttgaatccttcatgggcctccgaatgctcggcccgttacccattctcaaactcatctcctcttcgcactgattgtacaaacacttcggtatgcttggcttcaactatgggcttcggtcgagagcatgtcccgttgaccgatgtcatgtagacctttaggaggcaagtttcggatggatccgaacatatagtttgagatccgacaccaacaaaaataaggatattagtttgagtattagaatgagacttgtgatatgtatgaattgag

SEQ ID NO: 55992 - DNA, 220 bp, Arabidopsis thaliana landsberg
acagacatgttttgaagacaatacaattagttctagggttacctgcagttctctttcttcctcattcttctgcatattgtctttgctaaagtttctcttctttagaaaataaaaagaagaaatcattttgtctattgacttgtaccttgaagctttgatttgaacctaacaattgcgatcaaagcttctaaatagaagctctgataccaatatgtgagag

SEQ ID NO: 55993 - DNA, 263 bp, Arabidopsis thaliana landsberg
atctccgagcaatgaagtaacggtcaaggtagtagaagaagcgggatagccatctgaccattactttatggtttgaccatcttttaaatagctcccgcagcataaactcatcatgcttctccctcaacgcaggcaaaacctaaccacagacaacaagagagcaaacattcaaaaccgtttgaatcaacttaaaaccaagaggggacaggacttcttgacatatgaaaccatgcacaaaagtggcatcttaaaattcagaggta

SEQ ID NO: 55994 - DNA, 158 bp, Arabidopsis thaliana landsberg
aaaaaagttgaggaaagagtccacaaataacaagagatatgtaaaaagtaaggcggatcgcgcttctattttaaacgaaaaggcatgccacggcgtttggttaccaaagtaaacgtgacgacgggataaatgcgcttaaatgcccccaccaaataaag

SEQ ID NO: 55995 - DNA, 1166 bp, Arabidopsis thaliana landsberg
  unsure (1)..(1166): unsure at all n locations
caaaaggcatcagttataaattacaaatataacatgggtcatgtgggtcgtaaaatagaccccaaggccaccatcaacacgttctttataccgatgataaatccggtggtccacaatgataatacagcatcgggatcgatctatcctcatattgtcatcaacacaagaatgcatcttcttgcgtataagttacgaatctagtatataatctgaatgtttctcgtacatattcaataattttctttttctaggattgtgacaagaactaaaccagcttccataaaaattgtaccagagagtcaagtgtggaagataactttttagtctttggctcgtttgctctgggatttacgcttgttaacgtctagacatcttttcctcaaccgaatcgtctttggtgtcacctgaccacattaaaccaataacagtacaacattaaaccaagaacagtaaatgcataggaagccggaaacaaaatgttcgtcatggataatatgattagctagatttggaattggtgatgaacaatgtacctctataagctcatctgaggcaacgtatcctatagcttcctcaagtgtcatctgaatagaaaagaattcaaaagttaaaccacaaagggcaagaaaattttctgatcaagaaaacagttttcttatgtcatgttaaaagaggaaagggtacatacaagacgaggtggagatagcttcacattttcgtctttcccagcagagcgaatgtttgtaagttctttggccttaactgggttaagctgcagtgcaagggcaagtgagctcatggcatttcgacaatttagtatgaagaggagaagtcgaacaaacttacatcaagatctgcttgttgtgaatgctcaccgataatcataccatcatatgactgttaaagacagacaaacaaaagacagtgcagcattagcatggatcaaacgcagaaagaccacatcacctgttccaatcaagaacagctaaaccgagaaagatatttctatgtcatatttagatggttctcacatccagcctcggagacacaaagagtaatgcacgagcttccaaactcatcagagaatgagctgtgatagtaccacgtgccatggaaacctgtttcatcangataaataaatacaaataaaaatttgagactacata

SEQ ID NO: 55996 - DNA, 434 bp, Arabidopsis thaliana landsberg
tcactcatttataataaaaatgtagcacataaatatctcaaacatcttgctaataataatatacaaatatattttgcataaaacttaattagcttaattaatatatgcctaaattactattattaaaatgaaattcaattccaatgatccaaacgagacgttagtgtattttgaatatggagatggagatgagaaaactactgaagatagccttaggaatagtttagaaacaaagggagccaaacccaaagagtgaaaatatcttgaaccatggtgtgcattgactttgtccaagtgtgtacacgtagaagacgcataggtggatacaaaaagccattttaaagctatttagttgtgtctgcgtttacgaccaaaattggcgtacctggccgaagaggctcgcggccgtctggtttgctgtgcacttaccaatt

SEQ ID NO: 55997 - DNA, 577 bp, Arabidopsis thaliana landsberg
gagtgggcctacactggattctccgagcagatgcttcgcagcgtcgtgctttcgcttggcggcttccggcggctacacgagatgtacattcgtccggtccagcagcgtgctgtggagcgccgcccgggcagcagaggcggcagttgccggtgaggatgggccgtgaccaggtccaagtctcactctctctgctctcgacttcgttctttctgaagatgcctaatgctcctccacctcctcctaaggacaaggatagagatagagataagaatggaggtggccaatgtgggtgatcgacctcccatgcagcatcaccacatgctgcttatgtaatgtcaggtgattggattgtggttcttcactgcatttgtgggagtgaaggtgataaaatcatttggattggtgggcagagaagactattcagataggtgcggttgtactgagtgagattggatggaatggagtgcgatgatgtattgaatgactaccaagtcgcgtgttgtcctaaatcgcgcacaatcagctaatttataaagtttcgatggcatatatgtgaatatatgatgttcaagagaga

SEQ ID NO: 55998 - DNA, 1318 bp, Arabidopsis thaliana landsberg
cagcattcaagagtgtgtaaatgtataaggtttcaccatgtcgaatactttgttggagatagccaaaaccctctggacatcactcattgttcttggtgcgttctcttgcatcaccactgactacttgactacattgatctcatgagtaaggggtttaaggctgaccattccatgataaaactggatgtatctcaggattagccccttatccaaagaaccaaaaatgggcaaacaattttagactatgatgcaaaaaaatatcaagcaagtccaagagctcgagacaactgattggcaggtttgtcaccatggttccacacggattcccaataactagtaaagttgcaagtaaatataaattcaaaaacagagcatgataaacagtaaacaatcaaagtctcatagtcctcaaatcatgacaaagcaagataactgaatatatcaaacaactacacggacattatagaatacaaaaactaatcaatcatagagagcataaaaaattcaacaacactaagacattgtcctaaagtttcagtcattatatcatttgcaatcagccaatttaaggaagatatagaaatgggactaaaacaaacatcaatcatattccaggaaagcttcaatctaatgaactacaatgtcattttacctgacaaagtttaaaatctggtggccacgatacccttttgtgcaatgccctcatagttacagaaactctcacttctttttcaatctaaaaatcaattctttttccaggaaaattgatgcaggaaggtccaattacccttttaaatctcaataatttatcaaagccagctctttagattgaaccaattattctcatcccgagttatcgaaaaaccctaactttgtcaggaaaagatagagaatttaagaagagaagatgatgaattaatgaatccagagaggagacgaaacatctgcaagctaaatccgtcgagatagagagaaggaatcgattgcgaagccctagatcctctgggttcttcttcttatggtcaccatcgtcattttatctgtcctcagattttttctttccttctcctatatacacgtgtcttcacagccgtacccccttcatgtttctatattttcccagataatccattactttagtctatttctataacgacccctaaagaaagttttgatttctgattggaaaacaaagtcaatagcagccagtttcgttgactcattagttatcatccaacaatcccacgaacttgtttttttgtagaccatgttctatttctgagccgttcgaagaattgtacaccacacggagaatttt

SEQ ID NO: 55999 - DNA, 535 bp, Arabidopsis thaliana landsberg
aaggggctacttaacaataatgaagcatgagatgatatgttctgaagcatgcgttaatataaaattataatcaaattgaatttgtaatagagcatgtggtgattataatgaatcaatcgatctaaccaacaaattataaagcataaattatcaacgccatgaattaagagaatacgcaaaagcaatgtttcactctaatagatcatgataatgaaataatataacatggatctccacttaccaaacaaactcaaactatcgtcgtaccaactaaaccaaataatagaataatggatagtaaatttccaccatataaatttgttaataacaaacatcgaataaagcaactgaactgaagcaataaatcatattcagaccatgtttatgatacgataacataaaaaaataaagtaataattgataccaaacaaatctccatgctatcattgaattagtacatcgaataattaattattacattaacgataatagcataagcattaggcgatcattataacgtttatagttaaactta

SEQ ID NO: 56000 - DNA, 521 bp, Arabidopsis thaliana landsberg
gatcgggaatttcagtttatcgccgatgttggcattcacattcagcttggcgttcatgtctaaatcaaagccgccgttcttgcgcgccctttcgggtaaagtagggttcttgatgttctgtccctggcatcccgccatcacattcacttctccgctgggtttgatatctactttcaatccattgcccgatgtgccgaatatgcggtcgaacaggcggtcgttaacacgggtatgcggcctgggtgattcgaggttgagtctcgacaatgcttcggcacggtgctggaagtaatccgattctgcctgctgggagcgtatgcgccagaactcttcaaagctcatggaagtaggcacacggtcataactgttgcctattttttcaatgatatagtattgcctggacttgggatcgcattctatatcacgtttgatcaggccggtctcgcgcaggtcgaaggggctcctgctagtattggataacggagcgacttttctgtcgctgatggggtagcgcgtagtat

SEQ ID NO: 56001 - DNA, 214 bp, Arabidopsis thaliana landsberg
catagcatagcatctacactaaaagaatcaacgggaaggttgttaatggaagggacttgtgatccgtaaaacaatatctagcgactaaaatattaatttacacaggggataagcgtctttttcctgttcccaatactgagtgggacgagcgaaccaggcctgcaccatttaaaaacatctttgttgaatggtctgtactcacggaccgaatagg

SEQ ID NO: 56002 - DNA, 1073 bp, Arabidopsis thaliana landsberg
gtgtgttgaagacatagtagaaaagtataaggggtggtccggtttccatcagatgcttcttgtcccaggactcggttttcccttttattgattcgaagctgcaaaggttcatgcatatataggtagagaatctagagatcaattccataacaagcattagatcaagttacatcgcattatatatgtagagagtttagagtatgaacctggtgctccataggatccagaaagggtaatagatgagtcgcaaagtggtccacgacaagaaaaataggacaaacgagacgctagtcatagttttggcgccgctgtatttgcacatcttgcctatctctagaaacacgtcgctgatttcgtgaagagctaatattacagaacctatacgagcaaatctagtaaagtaaaaggataaaaagaggaagttaaaggctagtggtctcagaaaattttggtcgttacaatcttataattagtatagggggtacctgaaaacgtaagacaagatgatgaggaatgaagttacaatgtgatgaactaacatgactttgaaatcagatcgtcttgtttcccaaaagaacaaagcaaaaaaggcatatacatttaacccgccaacaaacatatacattcccttcattttcaacctgtgaaaacgccggtgttattaggtttgccgcatagttgacagtgtcttgcgtctcacgtaacacattaaggtaaagttattcttactttatcttttggtcaggccatacctggtctcctggtcctaaccagaaggatctggtgtctttaaaccatggctccttataagtaacgtagagagcaaaagcttccaccgagaaagagcacaaacatttccaagcggattctttgaatttcactaccttctttcttctctcgtttgaatcagcacatagtcctttaggaactaccagtcttctagcgaccctctgtgaacctcccagataggtttctcatgagatacttacttgcttcccaagtcataataaaatactaattaagagatagaaaacaaacagaagatagtgggttacctcgaatatgcatctgtc

SEQ ID NO: 56003 - DNA, 734 bp, Arabidopsis thaliana landsberg
cttagtacttatgtcaaccgatgacaatacggttgtaaattggttgatagatcgctgaacctttctaattttaatgtatttagctggttttgtttctatgttgcaatgttttagatttggagtgatagaggcgaaaaagggaaaccccccagtaatgccttcagtgatgacccctggaggacctttagacctctcttctgtgttattccgtaaccgcataatcttcatcgggcaaccaattaacgcacaggttgctcagcgagtcatatctcagcttgtaacccttgcatctattgatgataaatccgacatcctggttagctgaaagctcattgttttcccaatcatttttcaattctgtaaagtctcatatttacttggaagtaatccttgtttcagatgtacttgaattgtcccggtggcagtacttactccgtcctagcaatttatgactgtatgtcttgggtaggttttcttttcctagtaacgttttcatctcctagaaactgtgatatattaacctattgaattttcttgaaaatgatcttcagcataaagcctaaagttggaacagtggcgtttggagtagctgcaagccaaggagcacttcttcttgctggaggtgaaaaaggaatgcgctatgcaatgccaaatactcgtgtcatgatacatcaaccacaaactggatgcggagtatggctcttgaattctccgtgtcaataccaatataccat

SEQ ID NO: 56004 - DNA, 446 bp, Arabidopsis thaliana landsberg
cttcatgatgagtagcacactggtcaggctcgaccctagcggacttaaagcggtaacatgcaagggttgggtcattacctctaatatcttagtggtcccaagcgaagaagccaaggtactccccatttcattttttgtttgttttaccctaggccaccttcgcaggcctttcctctgcattgctggtggtgtcctcaatctcctcttttgaagaggatggggtcgtcgtatctgaatgagaagacccttcgtcatcgctcgttgtcacattcggtttcatggctatctcttgtttctttttagacttttctgcctcaatcgatctaatagcctccgctgcaaaatactaactattctctttctttttatcctgcattacctctctatctagcttgggatagtgttagagtgtatatgtggctagccatatagggttccctatttga

SEQ ID NO: 56005 - DNA, 575 bp, Arabidopsis thaliana landsberg
  unsure (1)..(575): unsure at all n locations
tactgaaataatacagtgatgctagactattaactttcgaattcactatttaaacagagttaatactgcaaaacatattatggtaattggtaaacatggtaaatataattaggtaaaaaagaaaacatatttagcatgtacgtaaagaaaaaacgattattgaaacccgacaagctatatataatctctacgagtcccaaagcaaaggatgtgacttgtctgcacatattttaaagtcgtcccagtcgtccactaacaaaaacaccaaatgaaacaaccctaaaaacaagtcattgtaagaaactatcacacatatttctctgagaaactttttggaataattatacatttttacgttaaggtcacgaaaattcataaaaaaattgtaatcatggcacaaaaaccattagatgttttttacgtgacgtaccatcatcacagaactgacttctttcgtctgtactacaacgcatacgaagatactactattgaatacgacaccgntcagcatttaatgcctcattaatggtgtttatccaaaaacccgtgaaagtagagacaaaaattcattaaat

SEQ ID NO: 56006 - DNA, 119 bp, Arabidopsis thaliana landsberg
agaaaaagccgaagggaactgaatgaaaagacaagggacccggatagagagtggttcgggctataggaccgcccgagcagaagtgggactggatgcgggacaaaggcaagcccaaccaa

SEQ ID NO: 56007 - DNA, 501 bp, Arabidopsis thaliana landsberg
accctgcacgatccgccgcgatttggaattgccggcgagctgtattcacagacgttctatgaccagctcgcgcgtgtattgaaaccgcgcggccgcatgtttcattacaccggcgcgccgaacaaactgaccagccgccgtgatgtgccgaacgaagtggcgacgcgtttgcaacgcgctggctttgcgaccgagttgaacggtgacggcgtggtggcgatcaagacggggaaagtacagcgacgctgatgccggctacgaccgaattcaggagctctcgcttgcttccgccgattccagttcacgttgcaacaacagcaggcgcagatcgaattcgatctggtcgtagtccggcagcatgtgtcggcacagctggtagaacgccttgttgtgatcgaactcgcgcaggtgagcgagttcatggacgaccaccatttccagaaatttcggcgcggtgctcttgaacaggctggcgacgcgaatttcggctttggccttgag

SEQ ID NO: 56008 - DNA, 992 bp, Arabidopsis thaliana landsberg
  unsure (1)..(992): unsure at all n locations
ttaattacttgtcatattggatctcactcaccgacgtacgttcgtgtccatgcattatattatcacacgtttaagagatccatctactctgcaatttattcagatttagtaattacgcttttccttaataaacgagaattattgtataccaacatttcatttttattctccagtattttttattctaaattttcttttaaactttgatagctcgaatttcgctataaatttttcaaaacataaaaaaagcattaatctcgatgcttaaatttatgaatcctaaaccgttgtttggatgtatgacattaagtaagctataaattcaaagttttttttttcccattagttaattagttcagaattaagaataacatcaatttttcattagcaaattgcgcatgtagattctttcatgcatttaaacatgtttgtgtgttaccacaacacctaggatcatgcattcgatttctaatacaattacacaaataacaatttagatgaagaaaccaaatgatatttctctaaatcaacatctcaaactatgaaaactaattaaatggcattctttcccatcttaatgtgacctcaccgttccattccacatataataataataataataatttcagttacacaatttcacaatgctactaatataaatcactgtattagcaaagatcaatgatatgattttctatatgtgttcaaagtaattcaagttttaattaagcaaccataagaaaaactcgcattttataatataatttttgcaagaagtttttttttcttaaagtttcgcaagacttgttataaataataaaatggaaccatatnatattntgcgttaaattccaatctaattgacaatagtcaaaaccattaaattaatacgaaatacacgtagcanaaagcatagggaaaaatatataaactcataagacatacatgcatatgatggacctacattaactatctctctaaagttagcaact

SEQ ID NO: 56009 - DNA, 575 bp, Arabidopsis thaliana landsberg
caaacgtatcctgacgatcatgtaggcagagttacctagccttatgaccgtacgtacgtccagactctcatccacgtgtacctcgatctcttttatctgatgaacgtacaacagggcatttgacgacacacaacttttactaatcaggctagtagctaattaacttgcacctttgctgcgtgctgatgaccaagatatataactagctaaaactactgtggagcaaactcgacagggagtaatcggccgtacgtgacagaggcgcacgctagcgaccatgcatgcaatgcacagcgcgtcgacgacgacgtcacaggccgtggcggcagtggtgcccacggatggtggtggcggaggaagaagttgatcatcggcgacggagccggagccggggctggcagcggagggaagaagaggccggtggaattgaacgccgtcgccgccggtgcactggagggcgcccggccattggtggcgcgcggcatgaagccgcgcggggcagcagtgagatcggcggcactggtagcacttgcgaaaggccgaagtgttgactgctcacgaattagttatgctgc

SEQ ID NO: 56010 - DNA, 105 bp, Arabidopsis thaliana landsberg
agaccatgggaatgcatatggagctggagatttatatgggactggccatatgtctggaggaggaaatttttctgcttattggagattgtaattatccaaggccga

SEQ ID NO: 56011 - DNA, 591 bp, Arabidopsis thaliana landsberg
  unsure (1)..(591): unsure at all n locations
agaatcagtagcctttactttagtgtatgtaggtagcataagatgtacgaagtgtatgtagtaagatgtacgataaagtgtatgtagtaagatgtacgataaataaaatgtatgataattaggaagtctttctatttcttcgcaaagtcccttcttcaatcttagattgaaaaaagaatgccccttagggacctttggctacgaagatttctgacatcttagtctcgtagttttaaattcccgaatcgaatcgatttaaattaataaaagaataaggaaacgctacctcatccctattggtagccgtttgggccactgcccacaaaacaaaccctagtttgagggtagaactatggtatggattctcaaaatccagtatcgccaaacctagttactctcgtgccccaacttaggggggtacgaatttgtcgagtttgatcagtactataatcctaagtattttattgatcaggcggcaccnnnnnnnnnnnnnnnnnnnnnnnnnnnnnnnnnnnnnnnnnnnnnnnnnnnnnnnnnnnnnnaaatccgatctaaaatcgagaaaagagcaagtattcattcacatttttt

SEQ ID NO: 56012 - DNA, 843 bp, Arabidopsis thaliana landsberg
gacgaaagacctgcattgtctcttgtcaaagatctccaaggaaaacctgatggccttcgatgttttggcgctgcaaggcaggtctgtcttgtgttgtttatatcattattagttgttacaattgtgaattgaatctcgtaatgtcaatgtgatacttctttctctgtatctttgttggaactgattgatctatctctaagcttttgtgtcttaatgatcacagttttatgctttgataagtttagcttagatcttggtcctttctaatgtatcataatgtcaatgtgaatctccttctctggttctttgatggacttgattgatctaatgcatgttttggcctttgtgtcgtgatcatcatgatttgatactatgataggtttagtttagatcttggtgtccttgaaatgtagcatttaggttactaaaactgtaatttgtaatcagtggtctcatttcttgtctttatcgtccttctttggctgtgttttgttataggtgcctcagagactctacacgttggaggaactgaaactgaatggtattaacgcagcttcacttctctcgccaacagatacaacgcttggctccatcgaaagaaaccttcagatcgcagctgtctcagggggaatagttgcttggaaagcctttgacttgagttctcaacagcttttctttcttactcttgggtttatgttcctgtggactttggatttggtaactcaaagctctgacttaagatgaaacacacacatacactagtctcttcatatgtccttaatgttgtaggtaacttttaataacggaattgggagtttggttcttgatcactggtcggcgttt

SEQ ID NO: 56013 - DNA, 1031 bp, Arabidopsis thaliana landsberg
gcttcaattttctcccttcaatttatatttccctccttctctaatcagatgttttttaaaaaatttcttacatattcagattttggagttaatcaatagcatctttcttctaatagcaatcactacttctatatcaaaatctttcaatatacaaattatggattcgaaattttctaattgcatccaattttctattttacgatttgttcttagtcttcttgacttttaattttacactttatttgtatttgcaggttcttattccatatttcattgaaatatatgccagagagataaacaatgataaaccagatttgtattcaacttacactttgatttctttgatctttgttgtctctctctatctcccaatctctactgaacctctgttgtttaatttggatcaaaggtaaacttttcgacttttagattcttgattagaatgaatattgatttcttcacgatttgattcaattttgccggttcttctgttaccatttcgcgttttgattgtagattagtgttcatgtgccacaaaagtttttaatttcatttattgtttgcttcggataaatagagtataaagtgaatattcaaatctttttaaaacttaaaattgataagtgattgaaaattaaatcacttacagagttagaaccatgaataaactttggctcgtggtagttattcaaccagatgcttacaaggcactatataatgtgtttaggatgatttgttaaaaacaaccacttgggtgttattgatgcaagtattcatgagactgtcacgctgtatgccgtcaataaaaatgagcctgataaatttaaaaatttgtttgcttcggattatacgcagcaaatgcttatactatttaacagtttgttctttgatttcttaatttttaatttaatatatttgttttgatttgcaagttcatattccaaacttcattctccatatatgccactcaacattagattaaacaaatttataataaacaaacaaaaatggattactccgtcatattatga

SEQ ID NO: 56014 - DNA, 466 bp, Arabidopsis thaliana landsberg
ctccccccgccccccctctcccgacctacacgcacccccccccctccaccccaccctctctcccccccccccccccccctccccccctccccacgcccggccccccccccccccccccccccccccccacacaccccccctttttttcccccccccggtctgtccgccgcccccccccccccccccgccccctaacaaacgcaccaatcacccccccccccccccccccccccccccccctcccccttccctttcccccttgacccccccaccgccccacccccccccccaccccccccccccgcccctcctccctcccccccctcccccccccccccccccctcccacctcttctctccccccaaccctcccccccccccccccccaccccccccccaacacccccccacccctcccctcccccgccccccccccaccccccccccccgcccccccccccccccc

SEQ ID NO: 56015 - DNA, 522 bp, Arabidopsis thaliana landsberg
  unsure (1)..(522): unsure at all n locations
tttgaacgaccttttatacactccgtatacaaacactttacagttattgatagtgggtatataacaaactgctgtcttttttgtagatcctactgcaaacctactgacatctggaccatacgccctcgtattcgcttcttttgtacccttcttcttggatattccagttacaaagaggtttggtgtattgggcgtccacttctctgataaatcattcatataccttgcaggtgtccaggtaaacaataccatatgtttatttgtaggacttcttattcttcttcttattttcattgataattggctcggtttcaatatttgtagcttttactatcatcatggaaaaggtccatctttactggaatttgcggtataattgctggttccttgtatcggctgaacatctttggtattcgcaaggcataggttataccttcccaactcttgcttaaaaacanactacattcatctcctcaaacgtggggcttttgtcactttagtaacacagtggtactaacacta

SEQ ID NO: 56016 - DNA, 525 bp, Arabidopsis thaliana landsberg
gaccaatcataataaagcatttcccaattgtaacgttgcttatctgaaatattcaaattttgacttttttttacaattttacatgtcctgttacggcgcatgaattatgatatttaattctctggcatatcgtacgtaatccataatgttaatttaattagcaatatgtgagttagctaggtttatattgttcgcggtgtcatgaccaaagtatcacatttgtagcattatgaattatacaaatgaaaaaaaaataaaaatataattgttagaaaaaaaaaatatcataatatgtacatacgtacattggctaacaaaaaaataaaaaaacatctaaaaaccaacacaatattttgacacttttccatgtatgtattagatagtagtaatttaatagtagtgagccaaatcaaataaaatcaaacaaatttttttctaaagcacatttcagttttaaatatttggaccaataatcctgagtacaaaaaatatatatgaattatattcgactaaactagatttatg

SEQ ID NO: 56017 - DNA, 1383 bp, Arabidopsis thaliana landsberg
aacacaaatgatgcttacatgatattttcatgcatcagtgagcccaaaattgtttcttataccccaatgatcagcgggttttcgtataacggttttggtaagaaagctctaaaattgttctccatgttggaaagttcaggaaaagagccaaatggtgttacctttcttgctctgttatcagcttgtgttcatgttggatatgtggacttaggatggaaatacttcaaatcgatgaaatcctcttacaacattgaaccaggacctgatcattatgcatgcatggttgatctccttggcagaagtggattacttgatgacgcatctaacttgatctctacaatgccttgtaagcctcattctggggtttggggcagcttgcttagtgcaagcaagactcatttacgtgtcgatctagctgagcttgctgctaagaaactaatcgaacttgagcctgatagtgcaacaccttacgtggtattgtcccagctatattcaattattgggaaaaacagagattgtgatcgaataatgaatatcaagaaatcgaaaagaataaagaaggatcctgggtctagctggatcatcttaaagggtgaagtacataattttcttgcaggagatgaatctcagctgaatcttgaagagataggtttcacattgaagatgattagaaaaggaaatggaattgatttgagtcagccatcacatgaaagcagttttccaatgaagcaagatgcaagcacatggttttcacttcatcaacagagagcaagaagctctcacttggtcatatgcatctaataatggatgggtttgtctatatatattcttcacagtaaagtggtgtagaggtttctatctctcacttcatcaacagagatcacgaagctcacttgatcgccttgtaaaaactaaatgcctcaagtttgtcttcctagaacgaaccgaagataacattgttagcttagctcctctatgaatgagttttaatgttttcgattatacttcacacatatgcatttatataatggatggtgtttgtgtacatatgcttcacagtgaagcctgtaaagtggttatgcagaggaattaccgatatgtatttattattgttttaatcaaaaccatttccttcgagcaatggatcatcgattaaaaaagcacattggcaaaataatttcattatcaaatccatatactgtagctaatgatgtctgctatagtttgggttgattttattatttctttctaattattttttctattggattatttccttttcaatagctatctttcttaatattatcaaataaaagttaaatgcaccaaattatttttcttttattaactgatttttttttttacaaaatcgatttatcttca

SEQ ID NO: 56018 - DNA, 194 bp, Arabidopsis thaliana landsberg
gttgtgttacgttggttatcgtgaccgagaacatgatgaagaagtgaatttaagatgaagaagattaaggcacacaatgtcagcttaatgctcatcattgagatgactttgtgatgatgagtttagttatttagatcattgattgagatgtctaattaatgaagggtttatataagtgtgaccagagagaatga

SEQ ID NO: 56019 - DNA, 1379 bp, Arabidopsis thaliana landsberg
cctcttttcgatcatgaacattctcaatatagtagaacaattgtaaactgtttctaactaatgcctttttgttccatttgcagatttgcaacatcttgaaaaagaaacatgagaaagcaaaagagttacttgtccgtgctgtagtaaacaacaataagttactgatgctcaaccatcctttatatgaagaccagatatcctttttataaatttctattaatgccattgttagattttgtctatctatatatttctattaaatttgcatacatgaactgttttgtgtgtgtttccccttaataatcagaaacattcgtttggtccagaagttcgcagccaagttgactttaagggacacatgatgaacactcaaacaactgttgcttaagaggtaagaatcttgaccttttcttttctcagaaactatctcaagatattttatctgaagagtatacactccgatcattcatttcctgacttggtagcattttcctataggttcagtggacttacaccaaagttatcgtcaaaagtccagaaatgttacgtcacattagtccaaggtactcgatccgatcgtctctttcactttgctggggtgttaacaaagaaaaaacgtaaaaaatttggaacatataaactttaatactaaactgataaacaaattagagcttgtatcttttggattcaattccttctctcgacgattgataaattgaatactttggttagggtcatttcgaaatgaaatggatttgaattacgctcacacacgtaaacccaaaccaagtaatgtacatggctacattacaaacaaaaaccatatgtgctcaaaaaaataaagcccaataataattagtcttgttgggctcaattttataattgattttctagaccattttaaataacaaaacccggtggttcggttccctcttcttggcgcacatactaaaacaaatggcgcgtaaaaacctactctgcctggtctcaaagtcgaaagtcaaatcttcttttagtaaaaacaaaacaaaattttcgaaccaacatagaaacagagaatcttctttagttccctccacaacacagagcccttttttaagtttcagaattttagaaccattctcaaaatccctccacaacatgaaaacacaaaaaacatcaaaaaccaaatctcagatccgtcatttccaaatctgcttcaaagtccctcctattcacacacttcatatacatcttctcagttgctgcttccatcctcaaatccatacatctctccctctgtctctttctccctttctctatctactccatcaatggcggttctaggttcaaagcctcaagaaaacaacaaagagaatgtctcaccctcagagatggtc

SEQ ID NO: 56020 - DNA, 563 bp, Arabidopsis thaliana landsberg
tcgactcccacggagggtcgtccacggcgagcagggcggtcggcggtgaggtcacgggcgcgacgaggcggggggcagggtgcggccgggaccgggatggtccgaatagggcacgacgcgggcgtggggtcgggcatgagcgcggctggaggaagggaaagggccgcggcgggcccacgtgtaagagagagaaagggggagtgggggatgcggcgcgcggctgatgggccttatgggccaatttcgtccagcgtcgattagggtttctcttttttcttttcattaaaaatataaaaaaatatatttttaaacatttctaaaaatcataataatcatactaaaattatttataataaaaatatttatctccggaccaaagttcttatactaattaaatgggttcacataaaatagattttataaataaccaatcaattattatcagacaaaaatcattctctaaagataaatgagatcaagacttgatttaaatttttactttactcactactaggttttaaattactattaatgtattattttaaattgatggacttgaggtg

SEQ ID NO: 56021 - DNA, 531 bp, Arabidopsis thaliana landsberg
  unsure (1)..(531): unsure at all n locations
ttgaaataaggaatgaaataaggggtctgcttgagataaccttacgcaaaaggataagtaccaaagttaagactatatagaggaagctctcccttatgaaaggcaacaaataataaatccaacagatcatcttttactaaagattatctattgcaatcaaaattatatagagagcataaaattaaacaggcatacggctagagaatgaagccaagctaggaaattgaaagtccggaaagcaaaaatggttatttattctcgactcgtgtgaggcgtcttcagagtttgatctaaagtagagggacnnnnnnnnnnnnnnnnnnnnnnnnnnnnnnnnnnnnnnnnnnnnnnnnnnnnntcttcctgatctctcagttggcggcggttttgatctcgacgccgcccatcttcaccatggctttcgcgaacttctgctgccacagatagggcacgaagtccgcgtagggcgcaccaggttgttggacgtgaagttggtggtgagcgcggcgtccgacgtgaagagaacttgtg

SEQ ID NO: 56022 - DNA, 614 bp, Arabidopsis thaliana landsberg
  unsure (1)..(614): unsure at all n locations
cgcatgtggctagaccatggtcagtcacatacgtcagcggaccatctatagctatgtctatagacgtaactgcagaggatcccgtcagaggatgaggatgtacacacggcttgattttatgagcgaaccttagtataaatcatgtggtctttgtgtgcttatgtttgttttccattaacttgttttcacttgatctacttgttagcaagaatttggtcgcagaaccttataaaactagctcattattctcgtctacatgtgtggtaacatggataaaaagtcctttaactaagttagagatcaagtagtttatttccatttagagtaaaaaaactatagacttgagtgttcttcttgacgcatatggtatatctagaaaaattagaatccacaagccactgtctaaatttggcatttgttgtcggcttaaaacccaacattaccgttgaattttgggctagaagtgatgaccagtaaattccattactcgacttccacctgacagtgnatacatgtcaaaaaacaaaaaacacccacacgaccgcatccgccatcgttgagcccacacggtagatgttgtggctcgtgtggtaatgtattacgtcgcgatgaca

SEQ ID NO: 56023 - DNA, 1013 bp, Arabidopsis thaliana landsberg
aaatgtgaaaccgcatactagaaaatccggtatcatctattctaaagttggtatgccatcaatgaattcacaatatcatcacaggttaagatcaccaacatgaaatatcattctagatattaatctcaagatagataatccaatcaacaaaccattacacaaccaaaggtttctattttaaagcaatagagatcagctaaaaacgagacaaaaggaaaaaagaagaatcataccatttgatgagccagccaaagaggaaatgctgcataatcggaactttctcaagcacttcaactctatacatcttaagcaaaccgctattcactttcttccagttcggtacaccacttatatcatccaacaacggcgaatgctcagcgaacaaacctttcttaaccttcttcacaaatgcaatacaagacaagtacatgtattcactagagaaattctccaaaatatcatcgttatgaatcgatttcggtttcatatacttatgatcaatcaactgagaactcccaaatatgaaaggcaagaaatggtaatcatcaagtccccaaactccatgagatccagctggttctaaacaataaaccatttgcaatttcctcatcaactccaaatacttaacaaaaaccctagcaaccaaaccatgataatcctcttctttcactatccccatcctagctatacaatacaaccacgccgcgaaatttgtttcgtgtcccgttccgtaatcaatcctacttgagttcccaaagctatcgaagaagtaaggaacaatctcaatcacagattctttaaattcctcaggaagaaactcaagtataagcgattcacctctctcacggagccgttcatgccatgacctaaccgaaacgttaccgtatcgagctgattgttgagcaggaggaatctcatcgatccattgtaacaatgtttcaaggattgaaactatggcggcgacggttggtgagatatgacaaggatctgagatcttaaatccacggatcgat

SEQ ID NO: 56024 - DNA, 895 bp, Arabidopsis thaliana landsberg
gacgcacatgacggatgtgttggagcataaacgaacaagaccgatcgggtctgatagataattgttctgccactctggttggatccactgttgactcaatggttccaataaccaagccagaacttcttgctgctgttgagctctgcgccaagattagattatatctaagaacatgacaaatctgaagcaggagatatgcaatatagtaaacttcatttttgaatcaaacattaccctgctgaggaagccataacaagaaatgcttcacccagaatgttatgctccccacggagtaaagttccttcttttgccaagtaccccattgtatcagcaataccctgcacaaaattatgacagtatgacagttgacatgacttttttgtgctatagattatccagagaggccactaagaaaatgaaaaataagaattctgccaccaaaatgataaaggtatcttccctagagagaaagtagccatataatgtcataaatcatgatactcgagagtatgataaaggtatcttccagagagaaggtagccataaaattgagtggtggtatatccatatatcacaccgcacaagcttaactaaacataaattcttcaaacaattctccaacgtttactgatatgagttcctaaatgtagtttgtgagagatcaaagctaccttcatgtgaggcagaacacttttttctgcagctttggctattcttatgaaagatgtgcaaatctgcaatcttgcagctctagatgtactagtagctggatcctgccaaagaaacaagctattagataactcatccacaccttgccctgtgcaatgtcccaaagttgaaaacgtctattttgtatatacaaaagcatgtatgtaaaataaatacaaaaaggatt

SEQ ID NO: 56025 - DNA, 957 bp, Arabidopsis thaliana landsberg
aaaaaaaaggtgaactcaacattcattgtggtgtgccaaataagagtcatctttttgcctctcaggttagaaatcaaactgacctctgaatttgggaagagaagctctcctccttgagttgtgtttgagaggtagagaacgacggttgccagcaaagattcatgcaatacggagctaggctcctctccaaaataatccaacttctttcctgacttctcagaagtgtaacttcttaccttgatagagccgccattttctgaaaaatgtgcgtcaagagagaaacataagccagcagtttggccacaagaaaagagaccttccaagagcaatcacaaagtctccgtagattacaaaaccaagataagtaaagttacctcctgggaggaaagtccacgcagaaactttttcttcaatcccagcaactactggatcctagtttatccaaaatgataccaaaataaggaacggaacatgacaattgtaaaggccattttgatcaaccaagatggaaactgctatactagggtgtgaaatcatttgtgttaacttgacaatatatgagaaagggtgttacataaaactccaaacatatatctcaaagtctacaacaacactagcgtctttacaacatagtgttataagaacatgacaatatctaattggaaagttgaagaatacaaagaacttacaagttgcgtctttccatcagcatccactgagtaaacctctgtagtctcctttctctaacagaaaagaagtaaccattacacaaagaacaatgtatcactatatctcaaacacaaaagaactggaaattaaccagagatatcagatgatcacactcttcctccgacaagaacccgcggtatagaaagaccctgtacataacaaaccgcttcagacccctaaaatttgaagcagtaaaacatacattcctatgtgcggaaatgatccatg

SEQ ID NO: 56026 - DNA, 491 bp, Arabidopsis thaliana landsberg
  unsure (1)..(491): unsure at all n locations
taatctcattagacacctctttttttcttgcttatataattgcttcatatccacgtaatctcattagacacctctttatataatctcattagaatttataaatttatgtacttacgtacgtacgtacgtgtgcgactaaccctagacaaattaaccgaatactcttttttttgcaaatgcatcacgcatggtaccctaatagtggtgtctccatcatttgtcattactttctgaatgcaaaatgagtaatcagattcattaacatttgactaatactatattttctcatattttttgtgggcatagagaattatcagtattttgagcatattataaaagtaatctcaaatgggaaacataacaaataataaaaaagaatgaaannnnnnnnnnnnnnnnnnnnnnnnnnnnnnnnnnnaccccatcttccaggttacattcttgtcgttttccagcttcttaacacagagctataatctcatgcaccaaag

SEQ ID NO: 56027 - DNA, 224 bp, Arabidopsis thaliana landsberg
tcacctacccagctgtatggccagcctactgtgccggcttgtctgcttattccagcagctgagcgccactcggcctgtgacttgacgtgacccagtgctcaccaaacaggtgagccggtggactcctccactgcctttggggaggcctacgccccatagaaactgtgtacctgagactggaccttggcccaaagggcctgtcacgaggtaagaatgatagctct

SEQ ID NO: 56028 - DNA, 1083 bp, Arabidopsis thaliana landsberg
ccgcttggaagtaacaacgaataaacaccccccaccaccggtaagttcacctaaatatgaaaactaaaagcttagaaaggaaaaaaaatagttctaaaatataaaagaaaaaaaaaagattaacacacattcaaatgatttacttgttggattcttggtgggattgtgagtatccaaactctgggaagaatgaggcatgaataacgagttagggacacaaaagacatgcattgttcgatattatggtccaggtgaaatgtggagctgtgctagttcaatgcttttgctgagagagatacaaaattaaaaagaaagaaaccagtgagatcaccatagaacaaggcaagtgtaatgtatttgtctgcctattcaggttatttcagacttgtttttgtatattatatgctttgagatttgggaactttcaatattataccattctgtgcatagaattctctcctgctttctgattgctgctcattgttcattaagaggtttatgaaaaaagttgagagaaatagagttcttttctcaaccctaagttgtatctgaaactgtgactatgataattgaacagatcacacaagtgattaacgaattcttacttgtgtttattctgtaacaaattggcactatctcagttacatagtgataaactttgagagatcgcggttattgcaaaagattataatcaataataactcaagaattaataaatatttcgcaaagtgcaactctctactcttttcttgtaacttcaaaaatgccggcaacaaatatcaataggcactactatctcagtatctcctcctctgatagtatcccatagcttgatacatattgcgcattgtgacagctcccaactcctcggctctatccgcaccttctgacaatattttgtccaaatactctggttccgctattatctcctgataacgggcctgatgtaaaacatatacgaaaccaaatactgtatcacattaacatatgcacatgaaaaaatgcccttcatttacttatggaagctgcaaaacatcgatgaaatgggacaaactcgaagaaaggtatggattataaggattt

SEQ ID NO: 56029 - DNA, 1341 bp, Arabidopsis thaliana landsberg
tggcctgattattttcagcccaagcccaaaacatacgtgttgagtttctattgggtattattagaaaaaacgaccttgggcatttcgtgtttggtcatcggtgttccgtgtttctcccaaacttttattacacgaacacaacaaacaacacaagtgagagaaccctagattcttcttctattcccttcttccttcaagtcctttttatttctctaccaacctcgaaaacgaatcaagagattagcatcttatcgagatttaaaccatcaattaatcggctgccatggtgggtttcctcctcctctcttcgttttttccaaatttttaattgtttcttgccgctttaatctcttgagtgatgactcttttatcatttggtaaatcaattgatgttagcatgatttgagatcatctattagatttatgttgttcaattgtataaattagagaggcagatgggttttatgaattgggtacggattattcaactggttgtttcattttgagataatttcggaaaattttggtgtttattactaacgaaaattttctcgttgtatgattgattgattgattgaaattcatccatattcgtattcgcagtgaatagaacattttccaattgaaaaaaacaaacaaattttttcggttctcatttgttctttctaggcaaagatttctcaatgttgaagttttaatgtattggcgatagatcgatgattttgagctggcttgaatttggacatgtttctttgtttacaaatcccttcttcatctctacttgtcatgttgcatttattctataacattctcatttcttttctttttacaggctgggagactacttgcaaatttgattgtgatgggttctgggatcattggtcgtgctgtctttcaagcctatcgtcaagcacttgctagtaagtttccaacactttttgttttatattcacccttttcacatcaagtgattgctttatgaatccaatgataaggcaattacatttcatggtaattgttgattctggcagctcctgtttgtgtgtgtttacaactgttagaacggttgatatgtttctgaatcatattgctgctctcttttactcgatacctaagacaaagggtggtcaggtatttgttacgaaggagacctgtcttacctaggagaaaattcttttgcagatgcgtctaaatctggtgttgcgcaggaagcaatgcaaaatggagtacgtcaagcagggaaagccatcactgagcaagaggctaggcagattcttggtgtaaccgagaagacctcttgggaagagatattacaggtcaacatttctcttttagcaatgg

SEQ ID NO: 56030 - DNA, 164 bp, Arabidopsis thaliana landsberg
aactaaccatgtattccagaggcgaaaacacctcggcagacgccttggaagcgctcggtgcctcctcgattattacgacacgagccctatttcggggaaaggtatagaatactgaggtgttgacctggccgaccaccacgggggtgaggcaacccccacagctt

SEQ ID NO: 56031 - DNA, 547 bp, Arabidopsis thaliana landsberg
ttggtgagagcgtcgtccccgatcttctgcaggcacttctcgagctccgaggcccggatcctgtcggcgtaagacctcagcttcttgatggttggaacggtctccagcgagtcccgccacgcctcaaaccgtttcagctcttcggcgatgattgtctgtgcctccatcgctttcctgagacggtcttccttgttggcttccaccacctctttcaggtcgtcgacattgtatactcgcgcggagcaatttcagagacgcacgcgctgacattccttgggacagatatgtcgacaaaaagccgggcaccatccatggcatcggaaattgtgggaagtgcctctgcgtgctcttttgtgaacaatggggtttcagatgcagtgctcgtgaataggacatcagcttcagcagcagcttcgtacatctctgaaagaggcctgtacacaatctcgatacctttcatctcctcgcggatggcatcaccctttccactgaacggttgacacaaccacttcttgcatctttggcaataagatgtttgatcactagt

SEQ ID NO: 56032 - DNA, 1765 bp, Arabidopsis thaliana landsberg
aggatgccctggttctaaatcgctcggcacagaaggaaacactgaatctggagtatttccgcctctggatgatagtagaaactttgatggcgtaacagatgctcattgctctgtggtttcggatatattgttgtcaaaggttcagaaagcaaaacatcgccccaataacctcgatatcctgtctgctgctcgatcagcttgctgtagggtgagcgttgagacctctttggaggctaaattcggtgatttgcctgaccggatatatctcaaggcagcaaaactttgcggtgagcaaggtgtacaagtgcaatggcatcaggaaggatacatatgctctaacggatgtaagcctgttaaagacccaaatcttctacatcccttgatcccgcgacaagagaatgatcgattcgggatagctgtggacgctggacaacattctaatattgagttggaagttgatgagtgccattgtatcatggaggctcatcattttagtaagagaccgtttggaaacactgcggttttgtgcaaggacatcagctttggtaaggaatcagttccaatttgtgtcgtcgatgatgatctttggaattctgaaaaaccgtatgagatgccttgggaatgctttacttatgttacaaactcaattcttcatccgtcaatggatcttgtaaaggaggtatcttacttgttctagcttgtcatacccttgaaacagagatgtgactccatgttgtaaccttgttttttgtccgctgtttgcagaatctgcaactcaggtgtagctgtcgcagttcagtgtgctcgcctgtaacttgtgatcacgtataccttttcggtaacgattttgaggacgctagagacatatatggaaaatccatgaggtgtagattcccatatgatggcaaacaacgtatcatcttggaggtaaattttagttttgtctctgttgaagtgactttgtggtatttttaaagcttgttacttacttgacaacatatttgtggatcctcattttctgattaaccgtgattgttgtcgtcgattctgaaaatgtaacaggagggttatcctgtttatgaatgcaataagttctgtggatgctctagaacatgtcagaatcgggttttgcagaatggaattcgcgcgaaactagaagtttttagaactgaaagcaaggtgtgatcctttttgagttattgtctttaacccatttgtcttgcttcaattccaatatccaactgattgatcaacagggatggggattgcgagcttgtgaacatatactgcgtggcacatttgtttgcgaatacatcggggaggttcttgatcagcaagaagcaaacaagaggcgaaaccagtacatatcttttcgcctttttgtcctccagcttagaagatctggagctgaacttgaacttaaatcctgctattgatttcataggtatggaaatggagattgcagctacatactggacattgacgctaatatcaacgacataggtagattgatggaagaagagctcgattatgctattgatgctactactcatggcaacatctctcgattcatcaatcacaggtgagtttataatacaaatgtaccaaaacctttacaattactacaatactgatgatttcaatcttttttaatctctagctgctcaccaaatctcgttaatcaccaagttattgtggaaagcatggagtccccgctcgctcatatcggtctatacgccagtatggatgtaaggctcttcttctc

SEQ ID NO: 56033 - DNA, 1542 bp, Arabidopsis thaliana landsberg
  unsure (1)..(1542): unsure at all n locations
tgtgagatttcaaggttagctaaaagaaacaaagtatcagcgatttcagtcatagtgatatgcatcaaaagcaaatttgggaaaacacaaaacacaaaatagcctactcatgatgatcaataagaactctaaaaccacaaaatctggttcgatacactatccaaaagaaagaaacaatccaaaaattctccaactctgatgtcgatagaaacaggcaaagctcatcaaaattaggatttagccatttggaatcaaatcgagtaacttaattcagcaattaggattcagccaagccctaattacttcaaacgagcttcgattaataggaaatgagcttagaagcttggtaagaacttggagaaaaaagtgaaatgaaaaggggcggcgaagagagaaagaagatggtggaagagtaagcgaagtttaccgggggaagtagagagagaacccgccggagagatacagagagacgacgacggtggtggtggtggtgggtgatgacaagcagagcagagagattgaaaccctaattgaactgcgagagaataaagaaaaatatctttgtggaagaaacagatcgaggaagaggaagatggatttctttctttctaactgtttttacgtttggtaaaaacaaatttttaaacttttaactcttttttcacccatttggtaagtgttttactgttgcactgttgttgttgaaaattaggtgaccaattggaaaaaaataaaataaaaaatgtctattagtattattatgtaattaccagttagattatttttatataaaatttaaagtgtggctggtgtggtcattacagtttatatataatttaacattttacgatcaatattaatatggcctttttgaaacttcagtctcggtcgccaaatatcaataaaacgttacctttcctcagaacaatcgactctataattagatagtagcacatttgttatgagattttatcacaaacaacatttgatgccccaacgtacttaactttgacgccatgtgaacgtggattcctgcagtctaaaacagagcacctacttgatctgaataatagatttgttctattaatagtagccttaagacattgatactttttaactcgacagaggattctcgtccccatgcatttctcattaggcatgacccaagagttattctcacaacgagaaagctctcgtgcattccaagtaaactgagaagacgaaagatgaatgttattccaaacaattgatataatatattttaagtttaattgagtaactagcacaactgtacttcaaaattatgcaactaccaaaattcttgatcgttgttttattttttgaaaaaaaaaaaatttatgcaactaccaattttgttttataacaaaattcaaggagtttctaaaataagttatatactttttgcaagaaaactaaagtcttgtcattgatcattgtttcaaatatcatgtattgtttttaatctattttatgatttaactctaggccgncgcacctatgcccttctcttttgggactcag

SEQ ID NO: 56034 - DNA, 1234 bp, Arabidopsis thaliana landsberg
caggcgaaagatccatgacttgtttcgattgcactactctcgaagcttttgcgaagatgacaattcttctcccaaaatcactccagggaaaagaaaaataaattctgtgagatttacaggttttaataatcttttcaatacagtttacttacggtttacttaaaccgaccaaaaaattgaccaaacacaagaggataaatgggccaagcccactaagccttagtttcccgccaaacatcataaagccacccggtctgttcccgccaaaataacaaacagtctctctcactctcacacacactctctctctctctgtagctctctcttggcgcgagttctaccatggccgaatcagatcctatattgaggaagaagatgcgattttcgtcttcttcagttcgttatactacctctcagaaccttatggcaagcaaattacgaactcagagcaatcgttcctccgttcgatttgcatccccattgtctcacattgtcacggatcttcgtcaccatcatgcgtcaccgatcaaagggaaaattgttactcaaatgccccgaacttgttctcgtgtcaccgtgaagaatctgtgtctcagacgcgtattctctcctagttccatctctagtgattgggactttcatgtgaaagggggaaatctaaccaaggagctaaatgtggaatctccttgcgatactccgaattctaatggtaattcttattttaagctctttttcttctacaagtttttctaagaaaatttaggagaatgttgatataatgaaggtggaattaggaaatttcaatatctgtttagaaactataatgattacacaatggtgaaaacagttatgagagaaggaagcaaatatcttgttgatggattagtggctactggaggtgatttagaagtagtggaatgctcacaaacgacgccaccggattcaggaatgttcaccggtgagctttctttggtgaaaaatgaagcaggttctatcaatcaagagatcagtgaggtctctgggaagaaagttggtaccaatctcggcagcaaagtggtatgttttttactcatggttttataacaaatgatgcgtttaaactagaacattggctgctcggtggcttgattaagtccgcctcctgtgatatgaactcacagaatcgtcatacagtaaagattttcaagaaccctggctctgtgagctatagaacaatgcatccttacgttgatgg

SEQ ID NO: 56035 - DNA, 137 bp, Arabidopsis thaliana landsberg
tgagagcggttcgcgcgagactgacagaaaaagaccaagaaattgccgaagatgaccctgatgacgagcatagagcccagaaagctcgcccgctttcgtgagcgcaaatgactgagccttccagtatatggtgttta

SEQ ID NO: 56036 - DNA, 501 bp, Arabidopsis thaliana landsberg
tgatcacaggttgcaagaaagtttaattgagggagaagctactttgcttgcagaaagaaaagaaagtgatgcagccaagaaatcactcactgaagctcatgtaaaaaacgaggaactattcaataaaattgaagtagctgagcataacgttagtatcttccaagacgacatccaaaggtgatccttaatgttgcttttactgttcttggtttcacttcatgttttttctcaaacacacaggaaatttgcataccattatattaagaagaaaggagcctagatgactcgtacaacccttataggagcaaagaagttacaaaaaggattcaccacaaattttaactacaacaagcaactgtgagcaaaacacttatgtgcatagcatatttttcggagccttttggctccgggctcccgccatacagcataacagtgcgtcgcatctaatacccacgagatggcagcgcaattaggagcgcctagatatacagcatttgtatg

SEQ ID NO: 56037 - DNA, 471 bp, Arabidopsis thaliana landsberg
agcctagaagagtgtgagagtagtttgttagaaatttctgtcaatagagaagatggttagttatactcaataattttgacagaaggaagcgtgtaaagaataataagtgtaggcgcatatacgacgtaagtcgcttgtacatataagaatgaaatgaaatcgatgaacaagaactgaatgactggtgataacatcttaggtgaaaacacaatacacagagtcaaaatcggcatcgagagcatattatagagtatgtgagttaagcgtcatacaatggtggagctagtatagagagtatcaagcagatatattacatcgaaatacactaggcactctcaactaacttcctgactcgccctagctctcacaactctcatatctctccccctctggcgtcaaacaccataagggttcccgagcctacacaccagaggaggaaggatgaggcgggggatcatcggtcgcggtcga

SEQ ID NO: 56038 - DNA, 473 bp, Arabidopsis thaliana landsberg
tacctctccgtagtatgtgcacatcttcgggtcatgagacaccattgacttcatgacttggtcgacaaccaacttggagtcgcctctaactaggagccatcgtgccccttcggccgtgattcggagcccgttgtaatggccccatattcaacgatgttattggtggcattgaagtggaggcaaatggcataacagagcttgtgtccctaaggtgatgtgaggatgatacacgtgtcgcttcagctcttcagataggaaccattaaagtacattgtccaatactccgggtcctccaccagcggtgactcctacgcttccgtccattctacgacaaagtcagcgagacactaagacttgatcacagttttggagacatagacgatgtcaagttcgttgagctcggaccacttcgcaacacgtccggacgcgtcataatttcgacaatctcaccaaggggtgctattgacactaca

SEQ ID NO: 56039 - DNA, 1593 bp, Arabidopsis thaliana landsberg
ggggggtgaaggggctgtaaaaaacctgcttgcttttattcctattaatggaggttatgtcgctatgatctgaaattgggtggatagatgggggattggcaccaggcacgtatagctagaaagatgatcaagcaccaaaatgcttattaaccaccaggctggagtcggattgagatcgataacgaggtccatcagttctacttctcttgacaaatcacatccggagactgaggagatatacatgatacttgacagtctgatctctttctgacacttttggaaggtcctagtttctctatatgacttgacacagctgcactctgctttataacagcgagcttcgtgcgaaattgttggtttgcaatatgtatggcttcagagaaaagcaggcattttcttcattgatctacacaggttacatactttgtttctgatacacaaatgctggtacggtaattttgttgtactgtaagaagaggaactagtacgtgataagccagcaaacaacatgttgcttgattagaaagtaagtcttgccattcctttctaacatgctatcacgtggtttctttctgtgattccagcaaaaaacttttagtttacaggtccatggacaatcaaacattcgagaagaggaagtctcttacgccaagcattagtactatttaattatgatcttttagttttctaacactttcctcatgtatctttattgagaatgatcaataaacaaggcacgcaatatagagactttgttacagaatatattcgcgtgtagaacgagattacatagattctacagacattaaacacgggtcttgattcaaccatagttcttttgtgactaagcagaactgactttgccagtttgatcctcttcgaacgcaatatcaacaacccttggacctttgactttgtcttgggaaagcttactgatggtaatggtgaggcaccgttttcaagtttggccttgacagagtccagatccacattatcaagcctctggtgatgacctttgttgtagttttcttctctatgaaggttaaggtgcaagtctctggtgaatatatatatgcgtgtaatgaagtgaatagtgacacagattcttgacagagaaattgagaatggtctacacataagcttggtttgagaattcaagggtcttctgtactgttccagttccagacacttcatgtcaatctatagtgtatgtagaagacccaatacaaaatgggccgatgattctagttttctaatcaggccctattgtcttatttctgcattgtgtggtccaaacaatactcaaagacaaaacaaatctctttctgttgatccatggagcggcaattttttagaatcagaaggtgtaccaatggtttgaagtacttatgacatttgttttacaatttagaagctcgtaacacttgtgacactggaaatatgcagcaaaaccactgcataaacccagagaggattcttaaatatgcgctaaattattgtataaaatccggtaaaccccgtgtaaattgacaacatcactacattagtattatataatcgtttcagacacttcctgttgagatgaatgatcaa

SEQ ID NO: 56040 - DNA, 923 bp, Arabidopsis thaliana landsberg
ctccaatcgattatgcccccactttaattgggtgagctaaagtttatttctttgaattgacaggctgctagatacaatgatattgatgatctcagaaccttggcctctgatggtctctctcttcactctcgtgattcacaaggccgaacaggtttcttctacattctgtgtttgttctcaagtttcaatttttccagttaatagcttcactttttctttaatgccactgtcaattgagattcttaaaactcttgctgagatacttgtagtgtgtagtgagtgaattactcgtctagatttatgaaattttggagtaactgatgcgtaaaaattgtacccttggcttatttcatcatttgttactgtttttggggttaggaatatgttggtgttcttactcttatccttgtatgttcggttactcagattaaggagtttgaaatgtattgttaactcttggaacattgtttcttttatcttttgtttgtcatcaaagccctgcatatggccgcagcgaatggacatatgactatagtggagtatcttatcagtgaaggagtggtaagataacaacaaccccttgctaaattctcggtgttctatcgatggaaacgattgaacatgaataaaagagagattattgaggctttgttttcctgagcaggatatcaacgctcttaacgatgagaacaatgctcctctacattgggcatgcttgaatggccatgtcgaggtaaccgttactcatgtccgcgattaaacatgttttgtttcgccggttttactaagtggaaagctactcacaggtggtaaagagattgatcttggctggagcaagtctaagtcttttgaatcggtttgtctcttgaatctttcctctaaatctatccaagaaactaagctgaaccagtttaagcttgaaa

SEQ ID NO: 56041 - DNA, 582 bp, Arabidopsis thaliana landsberg
tttaaacagcttcattaatcgctaatgctttatttttgtcgacattcgttcatttaataattaattaatgcagctttcttttattcatacaaataatataaaatcatgaaacgacgaagttagagacacagagcagaaaaagcttacactcatatcactgagcttctttggcttcgccaatcgccattgttgtttcgaaatctaattactgcttctcaaaacccttttgttggtttttgatatcgatgtcgatcattgcttcaatctctttcctttcgatctgaatcatctgatctctgatcttcttcgagatctcactaataggattttgagattgagttttgtccacagaatcacgaggttcgctcttggctcgattctcttacgataactatacgttgacgtagagaaaagtaattttcctttttgcatttcattgttcaaaatactgaaaagtgtaaaaaggtttgatttttgatctgagaaatttggttgcaggttttgatgatttggtgtaccgtaattggcgattacgaggtagttatggatttggccgtcaatgactaatggtctttcctgatt

SEQ ID NO: 56042 - DNA, 276 bp, Arabidopsis thaliana landsberg
catatagcccaatcaatagacctattatttatttcttcatgtcaccagactcataaatgacattgtcccaaaacataaatctgctattcggatagagacaataagtcaggcactaaagacattttctcaggacataggcgctagacgaccagatgcatcgcaccgacgcgggtttcgatctctactgcgcagatctgttagggtacaggcctgaagtgcttggcttgttagcagagctagctgtcgtaacagggcaacacgcatcgccaccggagt

SEQ ID NO: 56043 - DNA, 1269 bp, Arabidopsis thaliana landsberg
ctacagagttgtctattttcaacggtggtcaaagtatggattagattttcattgcacccaccaccacctttctttgcaagcacctcccaagaaaggtacgtatatcagatcagagggtttactttttcataatgttagtctttgatgagtttgtgttcttttgtgaagaatataatgtagtctttcattattttggcttgtgtctttcagaactctcgtgaaaaaatgatgctttataccaatatacaccttctcatttcctagcggatttcattatttcatagttttgaactttgaacgtgaacgaaaagccaatagttatatctatttaaaatgcatcaataaacaatactctatttgtgatagtatgaggtgagagagaagaaatgatgagcgatgcagaggggagaggagacatgcgtgacggaaaagagactcaaaaacgacacacagttggaaagtgaggagataatatagcattatttttagggtttagatcagaagagagaagtttcgagagaaagagattaacggagacaaacaaaaacccttccttcactccaacacaatgaagtcaacgtgcttttaacatgtggatatcgatatctcccacgctcttcctctgcttcttggttttacactcgcccttgtcttttgccctttgtacccaaatatatattcagcataatcgtgaaatgacgactatgtagaatgataatgcaccaaagactaagatattttagacgcccaagaattaaatttggatacacaaaactaatcacttggtggtgtcccgtctcaaagctcgatcccaaaaagtcaacaacatgcaccatgaccatgagtattctgtattcactaccaaatcgacactactataactataacgtcaaactaatccatatgctttgttttacttttatagccccctcgattacgaaacacgtatagtttggtatcaagacaattgtagagattatgtatggtgagaaattcatatctttgcagtcaccttaaacgcaatctatttgagatttgtgaaatcaagagagtaattataaaaaaaagagtagatatataacgaatcacgaaaaattattactaagtttatttttttgggagataaatgatatattccccaagtaatttacgtaaattatttttccatatattatgtatatatttgcattaaatcctactgaaaataataataattataaagaaatcttaaaactgatatcctaatttatgaaaaaataaaaataattt

SEQ ID NO: 56044 - DNA, 577 bp, Arabidopsis thaliana landsberg
tatttcttgggaattgaggatcttcagactccgaacagtgttttaccactcccagtccaagtacatacaagatcttgatcgtgctagtcttaccgatgctcgcattgttgacaccaatggatattcacctgcaacttcgttcgactaatggggcgcctctagaagatccatctcaatattgacacgctgactacatgatgacatggcacacatgtgggcctatatgcgagtcccatctcttccctcccgagcatgtgagcacattggtgctatgtcatcgtgaactcaatgtgctatgcaagttgattacctcaagtcatggtgatttgaacctaatgtgacatgattagtaagtttagggacatggacaacactcgaaccaagtttgaggacccatggtgcattttactcctgaaacaaataagcacgacaagtatttagctttttcatatgtgtaagaggtgggagctaatcgtgatcctagatgggagtgagaggaggctgttcactcaacaccctatgttgagaaaactggaagtgtagaggcagaaaatggagatagaaggaaggttcgtgt

SEQ ID NO: 56045 - DNA, 457 bp, Arabidopsis thaliana landsberg
agaggattataagtggcgtctttctagagaacatatttggtaacatattttttgatcttattttcttattctgggaatgtacagattctgtcaacgtaacaatgtgaccattgggtgttggaacggttactctcaatgtttttttatgatgtgtatgcttaagcgtctgctgatataataaaaaacaaacggggtgcggtgttaccagtttgaactgtgtctctgtggatcttaaatagcttcaatttgcatactctataattatattgggaacagagttattttgtgagttcttttgattacatgattacatgctcttttttctacccgttattacagtgacacgcggtttcatcaatgttttagctgggactgagatgcatggtttaactcttctcttctatcgtttttctattttgaacaaaagaaaaatgggaccaaaacttgaatggtgggg

SEQ ID NO: 56046 - DNA, 340 bp, Arabidopsis thaliana landsberg
  unsure (1)..(340): unsure at all n locations
cccccccccgcccccccccccctccccttcttcccccccccccgtctgtctccccnccnccccccccccgccccgcccccccccccaaccagncacaccccccctcccccccccccccctcccncccctccccctccctctcccccccgccttccctcccccccccccgccccccctcccccctccccctgctctcctccctccccccccccctcccccccccccctcctcccccccccccccccccctctccccctccccccctcccccgcccctccccccctctcccccccccccccccctcccccccccccccccccccccctccccntcccttccc

SEQ ID NO: 56047 - DNA, 607 bp, Arabidopsis thaliana landsberg
gttggcttatttgcttgtcacaggcaaatgcctgccaggcaaaggatcagccccagacggtgaaaatcaaacaggcaaaggatcagctcccaaccaggcaacgactgggagcgttgtctggatcaggcagccttccgcccgcgcaaaccaaacatacctacaatataatatagtatagttattaatagcgtagaataggagatatggaaatatagacgatactatttgtaaagtgaaatttaaataaaagatgagataatgtgtatagttatgaagtagagtttaaaatacaaaaaatgaaatagaaggtaggatagaatacgtgctggagacggtgccaacggttttccattgcaccattggttcacgatgtatttgcatgttggtcccctgtgatctggtgtgcttaaggtggatagcagtaataactaggtatgtgcccgtgcgttacgacgacgtatagattattcgatgactgttagtgcatacgatcacatgattatgaacaacatatggggatgatcaactcaatatctacaaattcacctaataacatgaaatgtgttactgttgtttacagaagttgtgacaccctaagaccgtacat

SEQ ID NO: 56048 - DNA, 626 bp, Arabidopsis thaliana landsberg
catctgttgttttcttataaatgtgtttaatcaactataacagtatcaagattagtccatcaatgtttaaaaaaccaacacccgtaccctagataactgattaataaagccccacaagaaaatccaaccttagccaaataaataggggcaattaagaagaaaaagattaggcccaaacagtccattctgcaagggagagaaccatctttgtatgccggaaaaggtttttgggtgattggtatttaagggaagagtcccgaattctgactgttgtgtcaattgagtccacaaatatgtgaatatggacgatatagtctctcattcctcccacgccaaacctcgaagatgattgtttgccaagaccaaaggttttggtgtggtttagtcccaatgaagaaaaaatgatcactcagaaattggttggttccatgttacatcaactcagaggacatcgaatttggaggtgatttactcctagtcctagatgatttaatatgacaattaatactcaataacgtgtgggatacctattacgcatgaacaactaggtaagtatatattattttgggattccattcttgtaaagattttgcatggaacttttttttgtgtgttcttgaagaaac

SEQ ID NO: 56049 - DNA, 518 bp, Arabidopsis thaliana landsberg
tcatcgtcctagtccaaaaatcttgtctaataaataagctagtagcaaaaatatgggacgctagattccttataccagaaataaggtgctagcaaaaagaaaacatgacgaataccacagaaactgtttctgcaaagatacataatcacactttcagaagaacaattaaatttatctaaagctgagtcttgatggtatctattggagtggtgataatcgaccagcaagcaccaacagttgttcttcctcccgccgctctcccacaagtcgttcctggcgccggcccacccctggtctggcagcatctgggcgcgcacgggctacgccggcgccggcgcgcagctccactgcgccacggggactgcggcgggcggctccagtgcggcgggctcggcgacgcggtgcccacgacgctggcgtgggtgaacctccaccacgacaacgacaagacctcgtacggcgtgaggtcggtggacgacttcaatgtgggcctgtccgtgacccgcacgagggccgcg

SEQ ID NO: 56050 - DNA, 497 bp, Arabidopsis thaliana landsberg
cttcggcgtcgagaacccgaacgaggtcttgtacgccgcggaccgtccatacggcctgatcgaggtcagcttcatccgtgacgagtcgtccgaccccgggaacgcctggcactctgtgcccggcttctgctgaaaagtggtgaagcgccgtgaaactcctacgacgcgagggtagctcgaagtatcgtggccggcccgaggacaagatgtatggtcccggcgaactggtgacgtacggcacccagcacattctcaccatgtatggcggagtgatcgccccacccctgatcgtcgggggtgccgcccacctgaagccgagtgacatcggtctgctggtcacggccggcctcttcatcagcggacttgcgacgctgctgcagacgctcggcatcgggcccgtcggcagccggcttccactcgtgcagggcgtctcgttcgcgagcgtctccacgatggtcgccatcgccagcaaggacgggatccgtaccgtgctcgga

SEQ ID NO: 56051 - DNA, 1056 bp, Arabidopsis thaliana landsberg
gatccagttatagaacctttcctacgaaaactcaaagaaacaatggccatcaaatccatatttatcatcatcatcatcagcatcatcacatcaatatctgaactttatgctttggatccttcgtttcttcgtctttcgacctctctccaaagaagtagctttcctcaagattttcggtttggtgcagcttcgagtgcttatcaggtcaatttcattcttcttatttcatttaactggtttttctccttaactgtagtttagaatcaatttcatatagatttcgatttagtacagagtgaaggagcagccaacgttgatggaagagaaccaagcatatgggatacgtttactaaacaatatccaggttattctcttttttactagccttataggtgaaatatacaagaggcaagagctaacgtacttttgtatcttttgatatttaggtttgtatcttttatttcaatcccaacgttgtatttgatacaatcatacgtactcttactttcgacgttttatgttatacatacagctctttaacaaaagaaaaattaaaacttgttactgcagaaaagatttcagatggtagcaatggcgacgttgcagacgaattttattaccgtttcaaggtttgtttttaagcaaatccacaatatatatattttcctttaaaattttttttgtaacaatattatatcgatgacatttttgcttattggccaggaggacgtggcacatatgaaagaaatagggctggactcatttaggttttcgatttcttggtccagaatactacctcgtatgatttggttttagtcattaattaacatcgttgtgtttactcgttacgtggccattattttcagcaattgcttatgtttggttaattaaagtgacatcaatgacaaatattttggtccaaattaggaggtacggttgctggaggagtaaatcaggcaggaattaacttctccaatcatctcatcaatgaactcatttcaaatggtcagagcattttttatcccaattcgaaatttatttgttatatggataaag

SEQ ID NO: 56052 - DNA, 581 bp, Arabidopsis thaliana landsberg
tacctatatctcattatttttgccactacctattgaactaacaaacatactgttttagttacaaagctccttttgatttttgaaacctagctaggtgaataaacctaaaatcaaatctgccatataattttctgttaaaatcaatactctggtattattataataataacttttgcttggataattattctagagtttattgaaattaaaacaacaattctttcactatttaatttactttattttatttctatgcatgacttaatttcattttgttacaccatgatttaatttaatactaatatatagtgagagagaggagagcgatcgatagagtaagagtagtgcaaaaggaattacattgtcgaagaaagagcacgcccttcgataacgtaaatgcaatgcaaacaataaatgaagtgaattcattgagaattagtattatcatcatcaacacacacatcttcatcatcatcacctatcttcattaaacacacacaccgtacgtgaagatggatgaaacattcatgacatgcttatgcatgcatatttaattatgaatgtaaatatacatggcttta

SEQ ID NO: 56053 - DNA, 815 bp, Arabidopsis thaliana landsberg
gatgttgattttcatatccgttatgaccctgaaggtgttgttgtgagctatcagtctgtggaagccgatagtataaagaagcttgtggccgacatacaaaggctttcaaatgctagaatgttctcccttggtatgcggaaactacttggcataaagccagatgaaaaaacagaagagtgcagtgctaattccactatgaaaggatctactggaggaaaaggcagtggtgagccagtagataggtggagagctttcaagattgaggctgtgggattaacaagcctgtggtttagctttggttcaggcgttttggcgcgttttgttgtcgagtgggaatcaggtaaagatggatgcaccatgcatgtctctcctgaccaactatggccacatacaaaggtgagtagttcgcaggacttaacatttgctctcttcatgggaaatatttttattataagagttccaaatatatgctttttctcatcgtgagttactcttgtacagttcttggaggatttcataaacggagcagaggtagaatcccttttggattgcattcgcctgactgctgggcctttgcatgcattagctgccgctactcgccctgcccgagctagtactgccactggcatgcctgttgtacctgctacagcgtcttcaagacaatcaaatcagatacaacaaactcaaggaatcattgccccttcaactttagcagctcctaatgctactggccagtctgcctcagcaacttcaggaaatactgttgcttcttctgctccaagcccacttggtggaggtttccatggagttgcaat

SEQ ID NO: 56054 - DNA, 185 bp, Arabidopsis thaliana landsberg
atgaaaattcattgattcgaataacaaaaataatagattacaggttccataatacatacagatttcatattttggataataatacaataaattttgtaactaaaactacaatatatttagagacttagtaattatttcaacccgcacatagtaccaataaactacctaataatttattttttata

SEQ ID NO: 56055 - DNA, 1415 bp, Arabidopsis thaliana landsberg
tcaaattccagacttcatgtatccatgtaaaaagcatgagactttacttgcaaaactaaagtattgtataacatatacagtagctatatctgttccctaatcaaatcattcactggaaatttaaatagcctatagctgttctttgttcacaaaaaaaaaacacagatcgttggaagaagttgttctaacaatatatgtaccaccaagttgtagttttgaaaccttaaagttgtgtaaaatggccaaaagattattcctttaaggagaagctagtaaattcagcagcagcgagaaagcagataagcatttagaaaacatcgagatcatgatctaagaatgtaaaagcctggagatttctagggttttcaattctcaggcatcttctccagcagtagctataagaagaaaacaaaaaagagaaagaaggaaagaggaatcgtacttgattttcatacgagcgagccggtcggcgacggaggtgtccttttccagcttgggttccttagttccgaagctgtagttcgaaagcgggtacgtgttcaccacctgagacatagccatctctctctctcaacagaatccacttagacaaaatatggtgaaatcttcttcgccgtgtgtgtttctctgtttcgatctatcactcagcggtggggacggacggcaacggggagagaagcgatctcgacggagaattaatgacaccaccaacttctagagtatactcatttgttatagtggcactttaggcccatttaaaaaataccggcccatttataaagacccggcccataataaccgctccgaaccgatggcttcgtcactttgttgttcagtgacagtgatggattagagagattggcaacctaagaaagcgcgcgaaaattggcaacccaagttcgccatagccacgaccacgaccttccatttctcttaaacggaggagattacgaataaagcaattatgggcaagcaaaagcagcagacgatttctcgtttcttcgctcccaaacccaaatccccgactcacgaaccgaatccggtagccgaatcatcaacaccgccaccgaagatatccgccactgtatccttctctccttccaagcgtaagcttctctccgaccacctcgccgccgcgtcacccaaaaagcctaaactttctcctcacactcaaaacccagtacccgatcccaatttacaccaaagatttctccagagatttctggaaccctcgccggaggaatatgttcccgaaacgtcatcatcgaggaaatacacaccattggaacagcacgtggtggagctaaagagcaagtacccagatgtggttttgatggtggaagttggttacaggtacagattcttctgagaagacgcggagatcgcagcacgcgtgttgggtatttacgctcata

SEQ ID NO: 56056 - DNA, 772 bp, Arabidopsis thaliana landsberg
tttattatttgtccctttaaattaattgttctattggtttaaggattgtcgtttctttataactttgaactatttttcaatttttgtgtcatctctaaatagagagactatactaattttctctgtactatttctattttattggatactccaaagatatgattactgttttacgatttaatatataatttttaacaaaaaaaattaaatttattcctatttcatattaaagaaaattcaaaatatagtcaatttgttattaggagtataatagaaaatttaatttattttgttaataagtttattgaattgcttgaaaatacaaaatatagtcaatttctgattaagagtatataaaaaaattagtttattttgttaataagtttattaaattgcttgaaattacaaaatatagtcaatttcttattaagagtataataatagaaaaacattatactattaataattttattaaattgcttgaagttacaaaatatagtcaatttctattaggagtatagtagaaaattttaatttattttgttaataattttattaaattgctttttaatccacatgaaaatatccaatctgcaagaagtataaaatcatcattttcaaaatatagaaagaaaataatggttttgaacattgaaaaaaatgatcttattgacaaagagaggagcttttgacttttgtaaacataatccaccatttagataattatgctaatgtatctaaaaaacttaaaacaggatattattaatccgta

SEQ ID NO: 56057 - DNA, 499 bp, Arabidopsis thaliana landsberg
taagcatacgttattccctaccttaaaaccttcaatgaactcagtcaccaaatgtcttcatgttccaccaaatatctccactttgaaagatatatgcatatctacaaactcttggaagaaatagtgaataaagttggtgttttgttttttcctttttgataaagagaacaacgttacgtcggtgttattactacactaaaaccagcattggcagtttactaacaacagatggagcaaatctgtagaaatcgtgtctcctctaaaccaagttctctactagctaggagaaacctaccgtcacagttttgttccgcagctctagttttggaaatccttcaaattcattgtcaccttaggtaatcataaacacaccgaagaaagacaacaatcgacaaatcaagatcaagtctacttttttttgcttcacaatttgtggtcatttactcatttttaacaaagttgaagtatattgacgctaacaacacttttattttattcc

SEQ ID NO: 56058 - DNA, 580 bp, Arabidopsis thaliana landsberg
  unsure (1)..(580): unsure at all n locations
gaacctcccatataaagtatctctagctcattctctataatacattgaatagagatattaatctctttttcatttttttcaattgtaagctatgtttcaaagcgtgtggaatttatatattctattcacctctcatcattgtttcaaatctttggacttacggaaaatgatctcatacaaataatacttggataaaaagttagtgatgacttagcccttacatgttttttcttatttcgtttcacattttgatagcgtttagttatcattatattatattctctaggcaatatgcgttaaactgtgatcgtatggtaaaataataacttctaacaaacttaactaaacaccgaagaattctttatcgatgtatgaaaagctaaatcagtattaaggctcatcaatctaacagtagaaacaagtcatttagaagctatatttctttttataaccaaaaaaatagttaaaaaggtttttaaaatgcgacgagcgtggaacgaaacattaaaacaataaacttatgtttgatttaataatcacaattcttcanaacggatttgtgcctctggtggggacacgt

SEQ ID NO: 56059 - DNA, 459 bp, Arabidopsis thaliana landsberg
  unsure (1)..(459): unsure at all n locations
ttaaggaagagcagaattactatgttcttgaaagcagacgtagtagcgatctttctccaaacgagatcgcgtaatcttaagctcagaggaacttacgagaaatcgtaagttcttcgacacgcaagagagaattggatgataccatcttggcacgcgggctaagatgtttaaaacaatatcgtttggcagtatttttaataacgacgacggggcctccttggccgtcgtagacattgtcttggccctaatcctaaacaagtgtctctctatatcaaatatcaacatcgctttgcttgctttcttataatcacaccaacatgagctttctttatataaaggaatagtaatccttttccctcttggaatcgtttacacaatattatgctcacgtganatattatggagtcaaaacttttatttatatcgtgtggaattacgaaattgtagggatcgtaatgc

SEQ ID NO: 56060 - DNA, 1042 bp, Arabidopsis thaliana landsberg
caatcagatacatagaagacacggcatcttctactgacttactttctgtctcgaaacttcccaaagagggccgagggcaggatgcagaagaatgagatacggaggtggggaatcaacatatttatcattagcttcaatctggaggagtagaataaaaatgttaattatcaattttaaggtcacactggcatgcaaaagatgtgtatctatgaactaaccatggggagtttgatatcacactccgtaaggaggtcatatccattccggagtatatccaacaatgcaccatctggagtctgcaaagagagagaaaagtttgaaagttaagttaaatcaagctgaataaagattttcgttccattgaatgccaaatcaatgcaagaagacaaaggaataggcaaagaaagactaaacaagtggctagagaaagacaacctggtgtaatgcagcacttgcgtgtggtttcttcttcttagctgatgaagtgacctttcttcgttcgttgtacacaatatatgtatccagtttgtctggtaagatcatgggaagaagtaacaccttaatacagatatacagaaaacaatgcaacttattcaaaaaactttaccttctagactgccgtggcatctagatggaaacttattaaaaaaattgtctgctatgttttgcatcgtgcattccaatctaccacccataacgctgcccaacaaggaaagttataagaaacttactaacgataatacaagaaggggattgaatgcaagagagtgattggtaactccatttagaaacgaaaaaagtgtttggggtcaaaaggaatcagtataaattccagtttagctataagcgcagttaagatttgactgaggtttccatttaagcaaaatatcacacggagattgggacatataacaaggtaacagaagatcagtcaacataaatgttcagagataccaacctgtgatagtctccatactgatcaaggtactcaattcgcttctttgtattgagaaccatatttggcaaactttttgcattactg

SEQ ID NO: 56061 - DNA, 535 bp, Arabidopsis thaliana landsberg
gggtaccgagctcgatgtttgattaaaatcttctaagtgatgtctctgattccgatatggtggcaagtaaccttcgcgaattgagtaatcaacatccactagataatacctccctctacacaaacaaataaactcagaaaaagatttactagatcgtaatgcatgaatgcaatggtatacaatggcgccaacataacatgcatgccaccacacctgctggtgggtgtggatagttcgcttctcccatacaactcacgagcactgccatgtcatggcaagaaccagacaacccagcacctacaaaagtgaactgcatatccatgtccagtatacctaatacattgtagctaggccacccttatctatttatgtgtacaagcctcgactcatgacatacgtgagctggaatgtgtgccatctaagactcctatgcatcatcaaagacagggtcataaggtctaagcttgttatgtacattagagaatgttggatcatttggacatatcctggtatgtgcacacctatcatagcatct

SEQ ID NO: 56062 - DNA, 244 bp, Arabidopsis thaliana landsberg
ccccctccccccccctcccccttccccccctccccctctcccccgccccccccccaccccccccccccccccccccccccccccccccccccccccccccccctcccctccccccttccccccacctctcccccctccccccccccccccccccccctcacccccccccccaccccctcccccccccccccccccccctccccccccccccccaccccctccaacccccccccccccccccccc

SEQ ID NO: 56063 - DNA, 231 bp, Arabidopsis thaliana landsberg
atagacgaaaaggccaaaaagagataaggcgaaaggagagagctggagagacagaagtaaggggaggggaagagcgaacgtagagggggggagcaaaaagaaggagggaagagggacaggaaaggaaagtaaggggaaacgttgggggagaaacgaaggaaaaccacagagggagatccaaagggaagagaaaaagaagggaaaagcagtcaggagacagaaagagaggga

SEQ ID NO: 56064 - DNA, 930 bp, Arabidopsis thaliana landsberg
ttttaatttctttttcttcaattggtgtttcgggtttactatttgcttttatgaatcctaatcccaccaataccccttattttcaaaaaggggaaaaagattacgtacccgagcatccaaggtagagagtataaatcaagaattttcaaaccgttgaagtcatatctaatgatggttaatcattccgttaaatacacaacaagacttaagttctaaagttgatttataatttacttacacccatgtgttgtcgttgttccctgtccaatagtttcttctacatgttggatgagtaatcttaagatttttaactaatgaacactcactttttcttttctttgggcagtagactaaatttttaacgataacacagataacttttgttttggtcattagagtttatggttacgtgttagaataatatgtttatttcaaatgaaatcatactagttaaacactttttttggtaaaatctataaattatatacaaaaacatgcaacgcaaagcaacggtaagaagagggaatcatggctcgtgatgggtcacgtgagatagcgaggttttagggaatggtttctgaaacatggaaggaagaggaaaaagtgtgaaatggatactaccgaatcgggtgcagtgactttaccaatatacgcaaatctatatttaatttgtatatacatacatacatgtagtagtagtagtattggaaaaagtcatggagtactcgagtaggagaagaagcaaaagccaaagcacatttaatttggaaaacgaaaccaccgatttggcttcttcttcccacaatcatcatacccatttgccataataacccccattccccactcgacgacgatggattcattcatcatcatcatcatcatcaaccatcatcatcatcatttgcattatgaattttgtgggctattttt

SEQ ID NO: 56065 - DNA, 1158 bp, Arabidopsis thaliana landsberg
attcggaatagacctcctaggcaattttataactttttatgcttaacgtgacggatatatatttatttcaaattttcaatactatgatgatataattttatactctaaataataatcttttttcagtatatttaacatataataatggaacaataaactcgatgtatctgatgatatttataaatgtaaagttaacagttattttttttctaatttgtgtgtttttcgtagattagaaggaactaaatttgaaattataactcagaacgaagaacaaattgaaatttcatttacaagaacgtggagtatctctagacgtggctccttggtccccctaaatgtagataaaaggtacgtagatcatcgttaatttatagatattttgtgtatttaaaaattatgacctccaaagtaaataaataatcgaatgtaaaattttcctacagatatattattcgaagtggtgtgtccggaatatacatgtacggtatattggagaggttagaaggttggcccgacgtggacatggaccaaatcaggattgtcttcaagctcaacccaaaaaagtaactatacgcttttcactagttatatttatattttcaatgccaatttaaactagtacatttagtgaaattgtttgtgacttttgacagatttgatttcatggcgatatccgatgatcggcagagaagcatgccatcgatggcagatcgagaaaattctaagtcattagcttacaaagaagctgttcttttgacaaatccaagcaaccctatgttcaaaggagaggtatatatatatatatatacctgtaatatactccatatataagtccatatctaatgatacattgcatttacatcactatagttttggttttatatctttgttaaaacaacacaaattatgaaactactaattttatatgggagaatgatgttggtgtgacgcaggtggatgataagtatatgtactcaatggaagacaaagacaacaatgtgcatggttggatctcatcagacccacctgttgggttttggatgataactccgagcgatgagttccgtcttggtggccccatcaagcaagacctcacctctcatgccggacccatcacactctccgtgagtccatttatcatacattaaaaaaaca

SEQ ID NO: 56066 - DNA, 1077 bp, Arabidopsis thaliana landsberg
tcttgctcatgcggatccgcaaaacaataatacagatggatctgaaaatatgtattttgatctttcagtaacatcagtaagctcaccacttaacacggggtaactgtagaaagaggtttatacacctctgaaacgtcattgtacatactaatatttgtttcatgttgaaaaattcatataatgactttacaactctagcccagggcataagattgagagacaaaccttctaaaggagcattttctggtatagctggttgcactccttcaatagccagccagtgacaaacaatttcagtatcaaggggagcttttggcagcggggcttcgatcacctagaatcatgacatttcttgaaaacataaggaacccaaaatgaagaatttaactgaaacaaaaaaaacatgccagcttttccaacatcttacatctttgaaatccacttctctgtcatcagtgtagaacaaatcgcgatgtccaatagcttttctaaaacgaaatggccctcctgaggcaaatccatatatcggctgcaatagatataatcactctcaaaaagatgcctttgattcagttgactacaatagtgaaatatgtgaaagcaatgtgtaacagatggtgttattcatatgcaccagtaaagccaaacctcaaaactagaaaccatatatctttgtcactcaactacaaaaaccaggaagcttacacaaccaaaactctagataatgggaagtaagaaataggtcatcgagtttgtacctcaacgttccttaagttgagagcaccatctacatccgaagctgttaaagtcgttctctttgagtgacgcatgcatttgatagcttcctgaaaggacatccaaagagaaggtacagaaagatcaatatgctgataccagaaaactcacctcaagaacacaaagacatgattagaaaaagaaggtaacctgcatgatctctcggacacgatactcaacatcaggagcaagcataagagcagcttcaggtaacaagttagtaatcccaatactttgagctattacctcaaccgtttccttaggtacaatgcacatcttccc

SEQ ID NO: 56067 - DNA, 620 bp, Arabidopsis thaliana landsberg
  unsure (1)..(620): unsure at all n locations
gattatctaggaatcaagattctcaaaaaaattctttagaaaaaagttataccaaacatacactaagagcatctccgcggtgtcttaaatcagtgccttatcttgaaacgggcctcaacacataacaaataatttcaacattgttttatttcatacctttttattaaaaaaaatatagaaatgactatgaaattatctaaatatactacttgaagaaccgtgcctcggtctcaggtgatagcgatggaaagtaggagaccgaccccggtaggctcgacagtggcgaagtggctgggggcgccgtgcagcagcacgggtgagggctgctggagataggtgagaagataacccttttattagattaattcgcctcccttttatttctttcaatcattttggttgagcctaacatagcagaacataatttcatatcttttagcaaaccgaatctcctattatttctgtccctacaaaccttatctcaatgatactcctattctatctaagccgacggtcagcatcctgaggcttggtcgtcattggcctatatgttttgngatcatacaactacacaccggattagtgttaatcatgtntctacatcatgaccttttatttta

SEQ ID NO: 56068 - DNA, 1088 bp, Arabidopsis thaliana landsberg
gtttttacaattcaatggtttgaacatatcattatattctgaatgagattgtaaagattttcatttattttctttacagggaaagaaagatctaatggcagttgacaatgatgaagatgataatggcaatgccgttgacagtgagaacgaagaccatggcgaaggagcttcagatgactccaaagacagtgacagagattctgatgaagaacgtcagaagtacgaccgctaaacctatacctttttgtagattatagagtgctgttacaagaacgtcgtatatttctgaagtttgtggagttacttcatcttaatagtctttttaacattacagatacactgaacaaatggaagagatttttgagcaggcatatgagcggtatatggtgaagaaagaaggaagcgcaaagcaaaggaagcgggctaggcaggcccatgctgaaaagctggaggtactatcattttcttaccccaatttcttaggatagaacagatttttggaactaaacacttttttctttttggctttgcaggaaggtgatggagatgaagaaatgaagatcgattacgattcagatatgaatgaagaaaaggatgaggcaaaccctcttgttgtaccacttgatgatggagtggtccaaacaaaggaggaaatatccaaccagtggttcagtcagaatatatttgcagaagccgtggaagaaggagacttgggaaaagatgacagtgaagacgaaatagcaaataagaaaaagagcaaaaatctgtctaaaccagacaagtcaaagcagaaggcttcaaaagcaagtgtgttgtctgatcagagcttgcccaatagctccaagaaggaagatgagtttgaggtagtccctgcaccagccacagattctgactcagattcatcctctgaagatgatgttcataccaaggccgagatactggcatgtgccaaaaaaatgctgaggaagaagcagagagaacagatgcttgatgatgcatataacaaacacatgtttgtagatgaaggtttaccaaaatggtttgtggatgacgagaagcagcacagacaaccaataaaacctgttact

SEQ ID NO: 56069 - DNA, 1335 bp, Arabidopsis thaliana landsberg
gtctgtgaaaatgcccgccaaataatgttatagagattcttgacagccggttttagagtatcagagatccagattcaacttctcagacgaattccacggtcactggattagaacggtaaggatcttaactggtaagcctttggaacgttttatacctaaaagtgtttcaaacaaagaagagcagaagaagagagatgtgtctccaccattgttcatacaattcaggtagctcaacgtctctgtgtcaaacaattttctttatgaagcatagatttgaatcttgtttcaaaatttgtaacaaaatctaagagaagtgatgagattccactaatagttgttttattgagtatcatgtttttcactactgaaatgtcaaataagttgggaaaagaaagacaacgagaaagcctccatacccaaacccattacattacaaactaccgactcatgtagtatttggaaagagtgtttaaaagctgacacagcaaaccgcagtaagtaaaaaagaaacattttggagcctatcttcagtgtctgtagcgatggaatattgattataacttattaaatcatctaaaaaaaattcagagctctaaactttttctttcatttctctgcaaaattccgacatccatgagctgaagatatctgttgcttactacttagtgttgtgtgttgggacactaagatagaacttagtgttcttgaagtcatcaagtaaggggttatatccgtcctttgttctcgtctttgaaggtaaaccaaactcatccatgaacgctgatgtatcaagctacaagcaaatgagaacaagaaaagactgttgatgaaaagcatcagaaatatcctctcttgttaaaatgtttaaagagaatcttgatttacagtgagagttcgccttttccttccttttttcgatggtgtcccgtctttttccatcttcctccaaccggggcaataagggtccattcgttctagaagccagaaatcggttgggaaaaatatatcagcatcaccctgcaagatcatccaacatacatatgaattgtgaagttttcaatgaggttagaagttcaagaaaactactcgattcgcaattgagaataaaccaaataagtagtcaaagaaggaaatttgcagatatctcgcacctttgcgtccagataactactgtaatctgagctacatccatctttctgcaaatacaaataagagattataattatacttcacgtatgtatttcttcgggtgaaactgtattcaagttttcttgagacaagtttgctattaagcaatgcagaaagacactgtctctgtaccaaaaccaagttttt

SEQ ID NO: 56070 - DNA, 1063 bp, Arabidopsis thaliana landsberg
taataaggactaattcatagtcgatatttgacaatcagtggattaaccaattaatgttcgttaaagtgcacgagttatttgatgcatgcgtgaattcaacttatttaaaactttaggtagagccgatatgcaaaactataactctagctagtacgtttcctttttcaataaaaaaaaactctagtcccttttatgacgaacccacaaaatccaaaccctaatcgatatcaaaataaataacaatgttaagtaaactgaaacaatgaaatagcctgagtgcattagatatttagatatatcagtgtttatctatatatacagatataataaacttctgcatacataaaaaaacatggattatttggtagagttttcttctttgagtttctttcccatccttctattgggccaattttaggcccatgatagcccaatcttacgcgtgtatgaaaagatttgacgttaaagcaaatttcaaaaaacgacgtgtagttcatctctaaaacgaaacaacggcaagacgttaaaatgcaatcttttttttgtagttgctccttcatcaaccacgtgtcttcaccttactggttcaaccaggaagcgaaatattgagctaaactgataaagctccttcctccgccatagccatttcttcctctctgtagttcacatagggggagagtaagagacagagctcaagcaacagtctcactcgagataaaataaagtcgtgattttgattggacccatgattctcattcgtataaattatcatcttttggcttaatcggaaaatggacgttctcgccttatcctcttccgcttccgccgccgcaccctccgcttctctcgccggaaaattcctgtcgtttccttctagggttagagtgagaagaaaccgagagaatttgttagctaaacagaagaagtttttagtttctgcctcgaaaagagaagagcctaagctcaacgaatgggatcaaatggagctcaactttgaagtaaactcggcgaagacccgaaattgactttggctaaggtgagagatttcgtaaaaaacggttcc

SEQ ID NO: 56071 - DNA, 1164 bp, Arabidopsis thaliana landsberg
cttctaaaccgatgatacaagccgtggaggagcctttggctttggtttgagaatgtgctttctctaacaccactaaagggtcgatagaagaacctttatgttgttcttgaattgcagatactgaataagacataagctcacgcgaaaacagtcccgcattaacaccaacctcagcccaaccgccaactccatctgcaactccaatagcttgttcttcatcgcagataaagtgagcgtcttctccacctgtagcttccttttcaggatgcgggagataacatgaccccgacactagcctaagactcctactcaaaatatcaaaacattgaaaccaattggtaacaaaaagattaagaaagtgtaaaagaacttacttaagagatgtagtagtagttggtggtgactcttgagaaccaccgttaagagaagacagctcatgagccggtccaaccgagaaacaagccataggagaagtatgaacactcttagacaatgtcccaaagagtgcacgactcttttctagcggatcaacaacagaatagtgacaaaccaatcggttcttcatcattccccctctcttcccaagtctcatgctagctacaggacaattaatagtgaagctaccaccactagaacgcttcttagtgaagtctaagccatttgaacaagtagtaaccaaatcatccaaacaagcgtctccaaacactggcaaagaaccagaagcagccatggcttgacgaaaccgagaactatcagaaaacaatctcctttgacccgaattggagaagaagctcttacttttcccagcaacgattctttgaaacccaaattgagaaactgggtttaatctcgagagagcagtcgctgacatctgaatcaataataatcaataaaaggaaagatttttaccaaaactgaacaaagctacaccaaaatcaacagactataaaacgagcccttaatcattacccacttcaaatacttgagataagagataaactattaccggattcttcactagtcagggctttttccgtcttcttcttcgccggaattaggttagagaagagaggaaggaatatataaagatctcttgtttccgctaccaacctgcagctgcgagctcctccgtaaaactcattagccgatgagggcagaatcgga

SEQ ID NO: 56072 - DNA, 540 bp, Arabidopsis thaliana landsberg
  unsure (1)..(540): unsure at all n locations
gaatatcaaaagcaaaagcctgataatgggtttcaaacacgaaagaagaaaagaaaaaaagaaaattatagctttctttttttttggtgcgtgcttttcgcctgccttcccgaccacggataggctacggggctttgcacttcggcccctgtgaatannnnnnnnnnnnnnnnnnnnnnnnnnnnnnnnnnnnnnnnnnnnnnnnnnnnnnnnnnnnnnnnnnnnnnnnnnnnnnnnnnnnnnnnnnnnnnnnnnnngtatggatctacccgatcgaaaaagactcgaaccgcagtcgcccaccccgcgggaaaaggaagccggaaacaacggctttaaggaattaggcctccaatttaattgaatccccgcccggtttaacttgaatttcctttcggaataacttgaccgttctgagannnnnnnnnnnnnnnnnnnnnnnnnnnnnnnnnnnnnnnaaagggcccagcgaaagaaagtccacgccagcagcctgccagaaccattaatacagggtttgatcactgacaccacacaatc

SEQ ID NO: 56073 - DNA, 581 bp, Arabidopsis thaliana landsberg
caaaactcatgttgagcagatggtattgattgacattaggaacatgttgcagtcaatgggaaaggacataaatacattccctcttcctcctatcatggatgcgtatgacgatgctattggtactgctagggaggtttacgaggaggaaattatcgaaccagcagcagaagatgtggctcttaaagactgtcttaacaaggaacagagggccgcctatgataagattttatctgccgttgacactgatcagggcggattattctttgtggatggacctggtggcaccggaaagacttacctatatagagtgctactcgcgacgctacgcagccagggcaagattgcagtggcaacagctacatctggcgttgcggcttccataatgcctggaggaagaaccgcccattcacgcttcaagatacctctcactattgacgatggcgctgtatgtagcttcacgaagcagagtggacccgcagagttgctaccggaagcatctctcattatctgggacgaggcttctatgactaagagacaagctgtggaggccctggacaatagcatgcgcgatataattggtc

SEQ ID NO: 56074 - DNA, 811 bp, Arabidopsis thaliana landsberg
atgtctgcaggttggtcatgaagcatttgagcttaattctagtggtggatttccaaatgatcaaggcggcggtggtggtggtggtggtgggtttaacccatttgatatctttgggagcttcaatggcgatgtaatacttttctttcttggctttcatctaatatattccactcaaaagaatgttgtttactaatttgatagatagccttcagtttatattcgctgatactttgataaagatatatttctttttaatggaagtggcttactaatcaaaatccatggttcacaccctaattcttttgaaaatcagatttttaacatgtaccggctagatattggaggtcaagatgtcaaggtattgcgatctgcttattttcctagagatcattttggtgctttaagattaataggtttctcttttctttccttctttactgttgtaaggttttgcttgatctttctttcatggaagctgttcaaggatgctccaaaactgtgacttttcaaaccgagatggcttgtaatacatgtggtatgtatatatttctaagatcaaagtgctttatatgatggtgtttgtatctcagtctcccgctccttaaagagaaatctttcttcctttcacattcaggtggacaaggtgttcctcctggtacctaaacgagagaaatgcaaagcctgtaatggctctggcatggtcagtgtcatgcatgttacagaactttagttgaacactgtaattatattttctttatcgttttattatggttgtaataaactacagtgtcatttttcagcactcactgag

SEQ ID NO: 56075 - DNA, 1142 bp, Arabidopsis thaliana landsberg
  unsure (1)..(1142): unsure at all n locations
tagtagaaacaaatttacatatatcacaataataaagaatccaagaatctctggttgcgtttcaagaagaagaatcaagtgcccggtcagtactcaaccatggcacctaggtgtaccacggggaatgttggtgcaaccatttggacctgacccgctgactggacccctttgcagtgcttggaacacgaacnnnnnnnnnnnnnnnnnnnnnnnnnnnnncctcattgcttcaacttgcttgacgtccaagaatacaacaaaaaaggcaactaacataacaaagatcattacttgtctcttcatcttcctcgatcgtactcttgcaatatcttcctcaaagaaaaaaataatctgacttgtttttctgtgtgtattggcacgtaaaattggttgtagagtgtaggccttttttttgtttgcatggggtttcattttaagtctatatatatatatatatgtagagttattggtcaacacctcatggcttgactttgggatcatcctcactagcttgtatatgtatgtatatatatctttgactttgactttactacaaaaacaaatggctttcaaatatttgataaaacaagcgtaggaattgatcaaacgagtcactataacacggtttccactttgcgatcgcatttagacaaaggcctcttcgtgtcccgaacaaatagcacgtgtctccatctaatatacccaaaacaaagaaattgcataacccggtctagattggtttagtgcatgttcgattttatatatggaatttactctagctagtgtgacggctacgttcatcactagctaattgggacaggagtatagttagatttaatttgtgatatgcttacataattatgactctcatcctgtcatccattacaattttgcaatggatgatgataactagtttgctacaatctttttttgaaaaagtcatttttgcatgggtttgaaaattttgtatctcctatatatataagtggctctataacttgtatatatacaaggtatgttggggtggctaattatggtttgacaagaattgaagaaactatcgaggcttgactttacttgggacaatgatgacatttgaacaatgaaactgatcaaacaagttactacacgtacgactcggt

SEQ ID NO: 56076 - DNA, 529 bp, Arabidopsis thaliana landsberg
  unsure (1)..(529): unsure at all n locations
cgaaccttgactggttagcatttgcctccgcatgtggaacacctcgagatactcgcctaagctttagatctcgagcattattcttggaagatcgtgcgcaagcgaactcttatgccctatctgcctttcgcatcaaaatgaagccaggaatctaccaatttttgataggttgctttgcctcgcttggatcattactatttggctacgatctaggcgtcatcgcggaagctgttgcgtcgaaatcatttaaggccgaatttcttcaatctagtaccaatgcccgtagtagcacagtggttgctctcttcactggagggtgttttgttggtgctttcgcagcaaggctcgcagaccgtctgggtcgtcgcggcacaatcctactcgcctgcggaattttcataataggaggaattattcagacagcgggcgttgntatctcgaatgttatacataagcaagttccttgcggggattggtgttggccttctgacggtagtctttttccgcgctcctatttctgaaatagctg

SEQ ID NO: 56077 - DNA, 549 bp, Arabidopsis thaliana landsberg
  unsure (1)..(549): unsure at all n locations
gcaaattctacaaatcaacaactaaataattaaacatttatactttcatatcattaaattagagtttttttcctgcataatgaaaaatgatgtgttgtatcatactacgattttcattattttaattctaagatttcatcattccatatgacatgcatgtctattgcctcgtttataacaaaaacaattacatgcaacgagtaaaggcatatcatacaaataaccttaatgggtttgtttattaacctcattaatggagatttttaaatgaaattaatgaaggaattgatgaaagtgcttgtccaatggggttcattgtttgacccaaagcatattgatcaaacagctttccacgcgacactccgtattcagtgattaatgctatctttgcatatatattgatacttcactacattgatacaaaaattaaacctccccaaaattatgaatcaaacatgagctgccaaatggtaacctctacaaactcatattctgtgtttctcctttacttnggatcatcgatatttcaagtggttgctacaaaacatg

SEQ ID NO: 56078 - DNA, 447 bp, Arabidopsis thaliana landsberg
gaaaaatactattcatgccgaaacaaaataaattaaaggaaatatttttgttttcttctaaaatttgcatgctcgtttgtaatttgtcttttctcatgagctcagattgggtcaaatatgtttaattatgggccaatttcaagcccaatgcaccaaaggtggaattgctcggactggcagaaattcaggcagatgatcaagtggtctactggtaaatgaccaccaaaagtcctgtttaagccgttggacactgaagagcactttttgtaggtcaaaggctttttctgactgaaacagattaacgtgtctaaaacagaggtagttaatattttgatcaaaatgtgaattgacatccacactaaatccgccgcgtgtactggtaaacccacaatttgaagactaattcggtctgattataagctcagccttctctttttacctgcttaa

SEQ ID NO: 56079 - DNA, 418 bp, Arabidopsis thaliana landsberg
tctagatgatctcgcattaatattctgcatacaaacattttctttgtagaaacttttacaaagatcataaaaatcctgtgagataactttttaacattttttaggaaatctgtattgaagttatcaggactttgtgccttgtcattggggaggattgcaattacggagtttatttcctcttctatgaagggtgcctgtagagctgctgatttacagagtttattttacaattaatttgaagcagtgctgctgagttgcaacattccatatgggtgtcatcgtcatgtcacttgctttggataaattttctagtttccaaagagtactgtatttctgaaatctataaacgcatttggttgggatagaaatgggctctacaaacaaaggtcgatactgactctcagttccattctgtaac

SEQ ID NO: 56080 - DNA, 1087 bp, Arabidopsis thaliana landsberg
attagttatatttggccctactaagtagtgtcggtcactattataaccaaacgtttaattagtcaaaagaagagaaaaattaacccatgcaatacaaaatttatattcttaaatacaataatgtgtgttgtagaagtgttattgatccagtagttgatctatacactaatagcttatatatgcaattcaagtttagattttttaaaaatcagaactaggttgatagggtgacttagtattagtaaggtagcaaatgacttggtagtagtgcacacaattttttcagatttgactatggaagttccaaaatacattaaaataaaataaatcagtatagaaaagtagatcttgatctatgattaaattctttgttccctcatacgtaaaatagtataaatatataggttgactttaaaatttggtgtatggcaatagaatctataattaagaaaaccaacaatcacgagcacataattgatttcttaaactaactaaaacataaggagtgtgcttctaagttatacctcacaagattccaattagcattaactagtttttgtaaactaaagttaaaagtaagtgaagtcaaaccaaatgatatttactccaaaccatgagaaacaaggtgatgcatccctagaagagatcacatattgggaacagaaagaaactcaaattaatcacacatgaattctttatcactaattaagctcgcttgtatcatgtgaatctgtatatcctaatgtatttatatgacataaaatgtatttatacgtaaaatgtgtactaacatgcatgtgtatgtatgcttcctccgtcctcatcttacgaagcttgtcttgaaactagcaaatcgatttcagagccattaatggattcatccttttaatttggagtttaagaagtttcatgcctttattccttaatctctcaaatgttgattttatgtacattaaggttctacaaaacaaaactctttaaacaatgtacaattcctatgactcagtgactaatttgcaattgtagtagaaataaatcatagtggcttaaagtggatgtatcacaaatagtttttgtcgttaccaat

SEQ ID NO: 56081 - DNA, 610 bp, Arabidopsis thaliana landsberg
tgccaaaacttcatctactaagccactaccctctcaactcggttccaaaaaaaaaaaaaaaaaagtctgcaaattcatgaatggaaacaaaactagagaaacgctctaaatagcctaaaacagcccacccagttcccacttaaaaccaaaggttggttcagcaggcagtagcaacagcatttttctccacaggtaactcggtctctttcactactttcgattctttagtcacttcagccgcaactcctagtgctgctgcatcttctgaggctgtagtagactcttgaggtttcacaagattaatttttgacattacacctttgtctgcattggccaccaatgtctgcttggaaacaataccaaaatttgtaagatattcctgttatataattatatatatcaatgaattgttggtttcagagaggattgttgcctgttttttgatctgcaggtgtttgcttttcctttcttggataatcttttgacgattctcatagaactcaaaatcatcgaggatgcatgtcttgcttgcgtggtccttgaaatcttgatgactttaatgccttgctcgagctttacctgcagacaaaaaaatggtaagaaaataaat

SEQ ID NO: 56082 - DNA, 341 bp, Arabidopsis thaliana landsberg
tttaggagcatagacactgttttccttatcgaaatacacactcattaagtatgatacctcgtttagcaaataagctttagtgaagcatcctcctactcttgcattattttcatccatgtctcgtaagtatttgtgtgttcattcaatgtgatacaatcacctatattttatagggcctccaatctttggctcatgtggaatctgaataagtatatgctgcatcaggttgaattaacctaatggagatattttttctagcttgcataataacaccagtatttcttctccaacttctccatcatatttatactaatttaattatcacagatgttcctatatat

SEQ ID NO: 56083 - DNA, 957 bp, Arabidopsis thaliana landsberg
  unsure (1)..(957): unsure at all n locations
tttcgacaacatcgaacacatcctccgatcatctcagctcaaatccgtcgtctctcttaagaactgtatcgtccaggaacctaatcgctgcattccgatctctgccatctccaagaagactcgtcaattcgatgtatcaaccaaaatcgctcagttcttaaggaagtttccttcaatctttgaagagttcgttggtccagagtataatctcccatggtttagattgacaccagaagcaacagaactagataggcaagagagagtcgtataccaaacttctgcagatgatttgcgtgataggttgaagaaattgattctgatgagtaaagataatgttttgccactaagtatagttcaaggaatgaaatggtatttaggtttacctgatgattacttgcagtttccagatatgaatttagattcttcgtttaggtttgtggatatggaagatggagttaaaggtttagcagtagattataatggaggagataaggttttgtctgtgttgcagaagaatgcaatgaagaagagaagaggagaagtgagtttagaagagattgagtttcctctgtttccatcaaaaggttgtagattgagagtcaagattgaagattggttaatggagtttcaaaagcttccttatgtatcaccatatgatgattattcatgtttggatccaagtagtgatatagcagagaagagagttgttggttttcttcatgaattgctttgtcttttcgttgagcattctgctgagaggaagaagttgttatgtctcaagaagcattttggattgccgcaaaaggttcataaggcgtttgagagacatccgcagattttctacttgtctatgaagaataaaacttgtttagccacccgctagagatttaaatataaagacanaggtagtgttgtaacacatcttgtgtagggtaagggagaaatacaaaaagttga

SEQ ID NO: 56084 - DNA, 363 bp, Arabidopsis thaliana landsberg
ctgagccgtcatatgagtccccttgtgggtgggagtctcttgtccattaacgacaaagactttttgtgactactcgtgtgggaatatgtttaaaacatggaaaaaaaaagctgtattgtgtaaacgaatcaccggtttaagcactcattaaagacatttaaccatggaactaattgctccggggtcggttaaacagtttcaagagttagttataaaatgtcgggtgcggggattctgtattcatgagattatacacatggcgactgacctctgttctcactcctgtatcagtgtgtggttcatggagcattcatgttcttgcgttgggacacgagaattcatatattcatatctatctactaa

SEQ ID NO: 56085 - DNA, 1018 bp, Arabidopsis thaliana landsberg
gtatcatataatggttgagatctcattttttttgtttttttttttggtatcaatggttgagatatcattgtaggtacataagataattttgccttagtcttgtaattaattgcttaaaactttaggttgagatgtcgtatatatgcttgaaagataaggacgcaaaccatatctttaaatagttttttttgttggttaagtggaaatcttagaatcgaactcccctgcatcgaacttccctggtagaatcgtaacctgagatagcacaacaaactttgccccaatggtattcagcagtttatttttagttttaaaaaatagttattacgtatttatttaatttatctactttcatatattacttgaatttaaacccaaaaaaaaattatttgaggaagcttatatatataggattggataactgaagctctatattcgcgttttcgtgacattaatttgtggtgtcgtgatacttgatttatttacgacgtgaactgtttttaaaatttctttgtgttctttaaagtagttggaatctaatccaaatttcattactaaagaaaaagaaaaaaagtttttagagtttttgatataagaaacttgtagagataacagacaaacagacacgtgaagaatttatggtttgaaagttgaaacaattattcgatgactttattgcttttcactagctatttaaaccaattgtatccaaaatatcttccttttctacatatgtttcctcatttgatttgccttcgagttggattttcaaacaaagtattccatttcttaaaagtaaatacctttacttttttcaaatgaaaaacatcaattaaagaaaaacatcaatcctctattcctttttacaacaaatatatatgtatgtagatatatattagttatatattatttcggataatttatcaaaacaaaaaatattagtctatatgtatatgttgcaaaaaactattatatatcacaatatttcactggtgttgtggtgcataatgagaagacg

SEQ ID NO: 56086 - DNA, 274 bp, Arabidopsis thaliana landsberg
aactgtaactgttccctacatgctaaagtggtgattgatgagctgaaagatacgactgtcaaacattcattcaggctccggatccaccttaatagcgttagagaagacccaggcggcttggctagtgtcatccagcgacatatgatagtatgtcacgtggatgatgaagaatagaaagccgcttgcaacctatctcatgcagttaatgtagcgccacctggcttgcactatctaagcctaagactcatacgcgctttttttgctccgtgaaagc

SEQ ID NO: 56087 - DNA, 940 bp, Arabidopsis thaliana landsberg
aataaactcattgtgctagagaccaactgctaagtttgttcttataaaagtttttttaaaaaaatttgcatgaaaataaaatatattacaagtctcaaaccattttatattttatgttttaatacgttgaaggacacttcactatatgaggaattacaaaagtatatataagcatactaataaaacttcaatccaactaatgcttcttcctcaagttcatttgcacaacactaaagcactgaccatgtgaaattaaggctaagctaatgccctaagttacattatagatctctaagactcaatccaagagttttagtctttcattatttcatcattgaacaatgactattaatgatacaatatgtgacctaaaaatagctaccttttcaattttgatttctaataacgttatctgcatccacaccagtacactactactatcaggaaatgcagtcttactctttatgaagccaccagaagtttctccacattgaatttttcatatattgacatttgacatgtgctgaaaacaatatccataaacccatgggcctgtagaatttaattcaaagtccataaacccaattatagtgatggagcaaagggcttataataaacccaccaattgagcactaccaattccaataccatggtgagatgtctgaagtgtctaaaaataaactgagctgagaccatgcacgagaaatctaaaaagacaactaaaacaaacgaaactttgattaggacaatttataaaagaaatcattagtctctaaattattgggaacagaaagtatctataagtacatctgttttctttccgaagacaacatttcttgcttctttaaaacatcttaaacgtttaaacctagtgatgaagttagtatgaaacatctttaactgtttaccattctattatacaataataaaataaaataga

SEQ ID NO: 56088 - DNA, 660 bp, Arabidopsis thaliana landsberg
  unsure (1)..(660): unsure at all n locations
cttcattacaaagtttgaggagccgaataagccagttttgttggagggatgtttggatggttggcctgctattgagaaatggtcaagagattatctgactaaggtggttggtgatgtcgaattcgcggtaggtccagtggaaatgaagctcgagaagtattttaggtattctgatggagctagggaagaaaggcctttgtacttgtttgatccaaagtttgcagagaaagttccggttttggattcggagtatgatgttcctgtctatttcagagaggacttgtttggtgttttaggaaacgagcgacctgattatagatggatcataattggtccagccggatcaggatcgtctttccatattgatcctaactcaacatcagcttggaatgcggtgatcacagggtcgaagaaatgggttttgtcccacctgatgtggtcctccgggtgtgcaccaagtcctgatggagcagaagtggcctgtcctgttccataatagaatggttcatgaacttttatgatgatactaaggattgggagaagaacctattgagtgtatatcaaagcaggggaggtgatgtttgtcgtaatggatgctgcatctggtgattacctggagagacgattcnantagtcagaataagctacaggtaaagtagt

SEQ ID NO: 56089 - DNA, 253 bp, Arabidopsis thaliana landsberg
ccttctgagttctgtgaatccagtggaaattgatatacctaaaccatgtcatcaactcacaacatttcgtccatttctggaataatgattcactctcacacttataatctttcatgagctcggatatcactaactttgaatccccaaaaaaattcttctgcctcggcctcaagcaataattccatccctttgcgtacaacttggtattctgctaaattgttagtgtagtaataaggcagtccaatggagaaag

SEQ ID NO: 56090 - DNA, 633 bp, Arabidopsis thaliana landsberg
gaatagcccaaaagtaaaccagttgtttgacataagagcaagagggggagacaaatgagtcatgggttagtgttttgaaaatccaaatctctgatgttgcctactgaaagctaatcgataaatgcattctgcaacagtaactatcatactgtctgcatcttctgttatctattaaagtaacacatgagatccaactaatgagtcacagctgcaagataaacagttcaaattcccgcctacaatccaaatcactacggcaacttctatctatacaattgatatcggtggcatcctgcaataaaaatctcacaattagttgataactcaaattcaggaaggaggatggttgcagatgttcaatgttattattaacaagttcaaaatcccacaaatgttgattactcaaattcaggaaggagtagggttgcagatgttcaatgttataattaaacaagttgtgtcagataaaaaggggccaagttcttccagaaaaacaaacccagtataggccgctatatggtacggcaaaatgtcatgaattcaggtaacattggtgaatcctgagtttacctgatttaatgggcagcaaaagaattgcgtcccaacatttttccctgtctttgtggtgagatt

SEQ ID NO: 56091 - DNA, 493 bp, Arabidopsis thaliana landsberg
aggggataaggtagtctggattgatctcgtgcgcgaaagtgcggttataggagaaggttgcttgataggacctgatgtggtgattggtccgggatgtgtgattgattcaggtgtaagattgtttggttgtactgtaatgcgcggtgtgtggatcaaggaacatgcgtgtatctctaatagtatcgtgggatgggattcaaccgttggaaggtgggctcgagtttttaatataacggttcttggcaaagatgttaacgtcgccgatgcagaggtttacaacagtggggttggttatcgaagagcaaggtctgtgaaaccagagcctagacctagattagttagttccactgtttccagagtcttatgaaccgcaatattcttacaatttaaaacagatacaaactctatggtaaaccatatcataaaccggttaaaaatggtattcgacaccaatagagaaaaacgttttcagatcaatccctaagcaagcttt

SEQ ID NO: 56092 - DNA, 608 bp, Arabidopsis thaliana landsberg
cattcaaatcctcaacatcttcattaagtttctgcacttgttcttcatactcatgaaccttctcatcataagcgtcaatctgttcttcaaaatccttaacttgctcctcataactctcaacttgattctcataagttttaacttgaacatcgtaacctttaatctgaacatcataactctttatttgttcctccaaaccagtgaaatgtgtatactgctccacagatatttgcacatactttggcttcttaatagcttcctgtttcccaaaataaccaaataaaatgttcatcaaatctagtcacaatacaagtaaatgtcagagagtaaaaaaaaaaaccttatcaatctgagaatgagaagcatcagctgcagaatcaatcactaagattgatttatcagacgcctttttcttccacggccagcttcgtcggtccattgcaatctatataaattaatcacattgttttcaaacagatccgaagaaaaaccctaataaagtctgataatcattttttttttttgctgaatgaggaaaaaagataaggtaatctgagagatgcatcgcaaaaaagtaggttctaaattaggaaaaccacaaggtaagt

SEQ ID NO: 56093 - DNA, 537 bp, Arabidopsis thaliana landsberg
gaaaccaaggtcgactacgtcaagggcgcaggccgcatcgtgaagtctggtgaagttgaagcgactttgaatgacggttccaaaaagaacctgtccaccaagaatatcatcattgcaacgggcagtgaacccactcccttgccccccgttcctgtggacaactcaaagggtctgatcgttgacagtacgggcgccctcagcctgacaaagatcccaaagagtatggtggtgatcggcggaggcgtgattggcttagaaatggggtctgtgtggcgacggcttggaacccaagtcacagtagtggaatttttggacagaattacgccgtccttggatgttgagctgtccactgccttccaaaagacgttgactaagcagggcatgaagttcaaactggggactaaggtgacagcatcccaagccggagcggatggcatcaagctatctctggagccagcaaaaggtggcgccaaagaggagctgcaagtcgacgtggtccttgtggcaacgggacgcagagcgttcaccaaggggctc

SEQ ID NO: 56094 - DNA, 564 bp, Arabidopsis thaliana landsberg
catacaccatcaattccagcttgtcggcatggtagcgaatgcgatcaaaataaggtttgaccttatcgcaatatgcgagcttacgtttgtgggcatcactcaggttattggcctttttacgttcttctaccatttcatctaccagcacaatgatctggttggtatgctcggccacttcttccagcattttaatggtaggggccatggttttttttaaggaatcaccaagaattgttctcattgattcgacattggcggccagttgctgctggtattttactgcagtgggcacaatatgggtcagtgccaggttctcgatcatccggccttcgatctggatcttgagcatataacggtccagctcgatctcgtggcgtgcttcgagctcgcgttcattaaacacgcccatgtcgctgaaaagtttaatggtttcttttcggcccaatacatcaagtgcgcgtggcgtgtctttgaggttggataaaccgcgtttggcagcttctttcacccattcttcaccataaccattcccttcaaaaacgaatgtttttgactcgatgatat

SEQ ID NO: 56095 - DNA, 1166 bp, Arabidopsis thaliana landsberg
gattgaaaaggcttatggttccataaacatgcccagatttgccataacatatcaatcattgcactaatgacacatttatccttaagcaagccctgtttaatcacatatccatgaatcagcctccccatattcagcatctctgaatctccaactgaaggaagaacacttgaaactgtaacctgatcaggacaaaaccccaaatggtgaatcttctggaacatcaccactgcttccttgtgatacccactccgattaaacccactaagaataccattccaagacacaatattcgtctcaatacctgaactttccatctcagagaggatacgaaccacctcttctaagcaaccctttcgcgcataggcacaaagcaaagcactgcaagtgacaacatctttatcagacattctatcgaacactttgcgtgcatcacccatcctaccacacctcatgtacatatgaaacatagacccctgaacaaacgcatccatatccaacccggaaacacacgacacacaatgtatctgtttacccactttaaaagccgataattcagcacacaccttgaacaaattcggaagaacatgactatctggaatcaacccatgagagaacatccgagaaaacacaccaatcgattgcgagaatagcttagcctttgttaaagcgtatataagagaagagaaagagtaaacagtaggatccggaatcgattgcaagacgagatcagcatcgttgaaacaattatagttcgagtatgaagcaatgagtttagcggaaatatagccatcgttttgagccccggatttgagtatacgagcatgagcttgtgttgtcttcgacaacgaagaagaccaatgatattctaagaatccaacgatcgattgaggaattttctctatcagtggaagaacttgttttgtcattgcttaactaaaaataaaaaatttcccgcttaaccttaatcattcacttattaatcttccaacgtgaccagattattccacgtcaccacaatcagaaatcaacggctgaagatgaaggactgggtctcactcagcttctgagaaatcttagtcgttgattctgtcttcgagaaatcttggacgttgattctaccttctccgagttttataatctgttttcttaaaaaaatttgattgatc

SEQ ID NO: 56096 - DNA, 775 bp, Arabidopsis thaliana landsberg
tggaggggacacacaccaatagattttgggaatgagtcatccatatatactagaaaattaatcaaaataaatggcgttaaaatatacaattattttccacccattatattctggctcttagtactattgttcgttttaagattaggtggatacttaaatttcttgtagatttttccattcaaaatctattagttatacatgcatctcattgtattttacgatttttaataatatttgtgaaaatgcatctcatattaactcaatttacgtaacataattttgatctccgttttgcactactgaagctagaaaaacataaacataagacaaaaaccaaaaaaaaaaatccttttacgaatgagtgagatcatccacacaaattttgatggaattcaaaagaagacaaatgttaataagagattaaggaaaatacaaaatatatgaatctagctagtggacaaacaattgtatgtttcttatatctggggcacccaagcagctaactagtgtttcaaaataaaaacaaaagaatgtccacataatattaggatattaatacttaaatctagcaagaatacaacaattgtatgaatcttatgtttggatatgcaagccgccagctcatatctccatataaaaccaaaaaaaggtatttttggtaaatataaattagataatacaaaataagtagatgtggatatgtatgtacaatgtttaataaatttggtccatgtagtgttaatatgtgatgttacatatattgataaataggtta

SEQ ID NO: 56097 - DNA, 587 bp, Arabidopsis thaliana landsberg
tatgtcactagacatatgtttaaatcttgatcataataaatacatgaaatgtattaatatcaaagacaattaactattagtatatagaacacaatcatcttattttatggagtacctactaatattagtgtttccacgttccactttccactgactccgatttgctatcataatatttgtctgtcatatcagttgatttttctgatattccatttccacaaagtattaatgtgaagaactgaaccactattgtgaccgacgtaaaaacaacattactgttgcgtattatgaccaaatttgatacaaaggaaataattaaaaacgacaaattaccagctagtattagtttatactccttatcatgcattgatgatgcatatatcaaaagtagaaaagagaaaaaaagaagaagaagaagcagaatctagggaggctatttaaagtatagaagaaagaaaaatatgtagcagcttctgagtgtgaaatgctgtgagattgtgttgacttgagataacgattttaatgaaatgttaaaaaattgggagatttgtatcgcctcacatggaggggacacacaccaatagatt

SEQ ID NO: 56098 - DNA, 438 bp, Arabidopsis thaliana landsberg
aaaaccctagaggtaccaatgggaaaacgagccagccgcttaggttggaggggcttgctactttaggaaagctaggggccgacatggctgtcccgcgggggaccggagagcgaggggccaccatgggcataaccaggatgaggcttggaactgatacgtgacgggggggagcaaaggactgaaaaacttcatactaccaggggaaatctgaaccttgcgagaggagttgttgatattgctagaattatattatcgaaacgaaaaggatcttgagtaccatatgtggaagggagctcgattcgctgacttgccggtcgaggagggaggaacaacaggcgaacactaggaacgcctaggacgggaggcatagctcatatgcgaagggaggggccgactgagctgcgccgaatgagaccaaggagagagggtctatcatgg

SEQ ID NO: 56099 - DNA, 719 bp, Arabidopsis thaliana landsberg
atttgtgtgaagacgatactttggagataaaattacaattatgtcaatgatagaaaatgttaccaatatcgatcagcattatcgtgtgtgccatcaagtataaactaagagaaagacgcacattttcttaagagtaaattaaatattatgcatattagtttagtagttctttttaggtgaaggattttggttcttagtactttgctaattcgagtttgatcattgatatttgatagtgattggagaataaaaacttcttttgatatcgctaatcttacgtgtaaatgacatgaatatcaatgtcatggaccacactttttcccccaaatatggtccaaagatgttcaactgatagatttatatgtttcttttgttggtttgcggtagcaaaagctatatcatgatgaaacctttgaatcgggtttgagaacgtgtccttgtccgaaagaggtattgtcgagtcgagagcaccgatcgagtcagggaaattgtttatactataaggtcttgaccatcacataataagacatgtggataacttcgatcgaggagtgatactttgtgtttgtggattagatttatcatttctgttataacgattggtatacatgtgtgtatgttgaccctaggtttgttttctagtgtcgtgagtttctataattacattttgcatttgttggcaatatatatgtaactatgtaaggatgttatcatcggtt

SEQ ID NO: 56100 - DNA, 531 bp, Arabidopsis thaliana landsberg
tttatgtatatgtttgttttggatcggattcaagtatactaaaatatatgattaatgtaattaagtttgactgaaattttaggaattcttctcaaagttttggaaatgtttagaattttaagattttggtggtgattttagaaagaaaatataaaatgctgtattttctaaccttgaatacttttttgaaaaaaaaaaaaagaagttcatccatatccaagtgatgttagaaaataaaatttaaaatgctgtattttctaaagttaaccttcacttctttttttgaaaaaaataaattcatgcatatacagtttaaacattatggacaactgtctttataatttttttctgtaagaacccgatcatggtcggctatatgacaatcgaataacgtaagaaaaaatggattcagctaattaaatcaagaaaaccggattgaaaacttaccgataacgtctggaatattccgaccgttgctaaaccgaccggttggaccttgaaagtaatctataccataaggtaaatagttga

SEQ ID NO: 56101 - DNA, 648 bp, Arabidopsis thaliana landsberg
tactttcttgatatttttccctctgtctcgaccaaattcgtactatataaatctcggagtgatatcaaaatagatttcaagtatatgattgagccaatgagaaatagacaacattacgatgtaatgtccaatcttacaatctgaagagcaatctttgttctctgcaaacgaatagagatatataagatgccacttgacttcgcttataattgaccgaaatctatagtaaatctcatcatgtacccatcttttttggtacactgatgattcgattttgttttattttaaatatagaaaatgtgttttccatatactttatgttatagaaaaaacattatgtttatattttattaggattcaagttgaaagattttaataggaaaaaaattgtgtttttgacaagaaactacataatcaattttttgacgagattatgtgaactcacgttttggcgggaaaaaacgggaccacgttttgacgaggaaaaatgatgtaatcgcgttctgacagaaaaaatgtgaaatcacgttttggcgggaaaaaacgggaccacgtttttcgcggaaaaatgatgtaatcgcgttttgacagaaaaaatgtgaaatcacgttttgacgaagaaaatttgataagactaatgactactaa

SEQ ID NO: 56102 - DNA, 1241 bp, Arabidopsis thaliana landsberg
aaatgtcttaaagctgtttcaacttttatacacattactgcatttactattctgaaatcaatttttaattaaggtccttgtactataaggaatcctttaaataaatataaatattaacaataaaaaaatccaaaatttcagaatgcaatggtcttacaattacaataataatgtatttgattgtatattaaaaatataccttaaatactcaccaattatcttttataatataatccacaaatttctggaagaggaaaaacaagtaaatgcaagtcacatttcacatttcaaattaccaactaccaactacaaactactttcgcgtctcaaattgaaccactaattaatcactactttatatgctcatcattctttttctttcattacaattctagaataatgacttaaccaaaattcatacaaataaaacaatattttggcttccttcaccaggctaagaattttggtattgaaaatctaagtacttcataagaaactgttggaatcatttaaaatttgtgatcatatataaaaaaaattattcatctttatatttaagagtttaaaaactgcaacttttgtttttctttcactaagtcttatggccacagttaattaaaagcagatgaaaggtggtccaatggaaatggagaatgtgattgggctagttgggagagttctgatgtctagtgttgggtacacgtgtccgtcagttacacatagcattaaatcagacggcatgtcattattcaaatctagttcacatagtacgactaatagctgataaattaatgattatacagcatatgaattatgaattcaaaaaaaaaaaaatttgaaaatgttaaggagatgctatattttacaaaattcatcgcaatgctttctactaatttgctaagtggtcttctccagttagtcttgtcgattccaagcgatattattaaatcttgaagcatcgctcaaagcattatagcttaagataaccaaattgttattaaaaacacctagtgaaatttttaaattaaaacaattttgatatctttgtaatatctaatactactctttctgtgtctaaaaggattaattttcaaaattttcacacatattagaaaaaaaaaaaattactagctaaacaattttcaataatcataaaacaatagtaacttaataatatatttttataaacaaaatagtccttcaagtttacaattcattttagtattataatcaacaaaatc

SEQ ID NO: 56103 - DNA, 1037 bp, Arabidopsis thaliana landsberg
gttattctacatatactagtatttgagttggtgtttaaatacctcgggttattcggacatgcatagagagaatatatggtattttaagataaacattatcccataatatatggacattgacaaatacaaataatgtgtgttcgtgcgtaaaagaattgtcatttctttaaaataagaaggaatgaaagattgaaaggtatatgttctaactaaaacgtgtgattaagattggacttttatacatagttgattagtatctttttgtttaatttttgtttcaataatgtcattgagtagtcgttgtgaatacgattgaccaacggttgcagagatatattggaggatttgatgtgatatctcctaagaatttcagaagttcattgaacgtttttttggggttagtgaaatagtatcatttgtatctttttgcataatttttgaaaaatcattcatatccacttgattctcattcaaactttgaatacctttattcgaattccatgtgatgatttatacttttcaagaacactatggtcccttgactccattgtctcgattacaactttagtttacgtcattaacaagtaattaggcttgagctatagcctatagcctatagataagctagttaaaaggtcaaacaaggagattccataaactgtaaaataaaacttccaaaactgggttgtatatagggaattgtatcttttacatacgttagttctgactgtattattttttttagtactgtccttttttgttcttatataaaaatggatcggatacacatttaaacattagtacttacgggtacatgtctatcctcatatgtattatccaatacatacacttacggacatatgaaagtgaacgatcgactctaattcaagtgaagtaattctgctaactgcaataatctacattttataaagtttgcactttttttttgttttagctacgtttgaattcttaacttactatatatatattattttaaaaagcttactatattaaaacatcttatatttattgatcaa

SEQ ID NO: 56104 - DNA, 557 bp, Arabidopsis thaliana landsberg
aaaatcctataagcttgacgagatttggatgatcagcgagacttaatgtcaacacttcaactacaaactctttgattccttgagcaccattccgatcaagttgcttaattgcaacaacctatcgaaacaccattcacaaactcttaaaacctctaaccaaactagccacaatacactgtgactcattagatcaagatacaaatactaaacctgattgattttctcaatgaaacctttgtaaacttttccaaaacctccttctcctagaaaacaatccgacttaaagtttgcagttgaaacagagagttcttcaaatgtaaaagtctgtgctttcttccctataacttcatcttcaacattagtatctttagcatccaaagctaattgatccttcttagtaactatctccttgcttacatctccacatatactaacttttaaacaatctacgcatcagagacataacaacagacacatcagaacgaatccataaatgcaacattaagaacacaaaacctaattatcgcaagattctaaatttcgaaataaaaaatgga

SEQ ID NO: 56105 - DNA, 161 bp, Arabidopsis thaliana landsberg
tttatttctactacaactaaggggtgcaggtggaatataacatctaaggcgatccctcaaccgataaaaaaagctattgactataatcttgcgcccactactagccgaccattataatatatgcctacttccacattacattcatacactttctacttaac

SEQ ID NO: 56106 - DNA, 221 bp, Arabidopsis thaliana landsberg
ttattgacaaagcataccaacagaaaagggccgggggacaaatattataaaaccttactcggcccccctaatagattaaacagacccaatactaccatctatagcacacttcctaaccgaaattgcacatctggatgcctatttgcaagcaacactaataataggacaaactaaagatatatacattatagtatttacatatacatagataaatgccgtat

SEQ ID NO: 56107 - DNA, 1616 bp, Arabidopsis thaliana landsberg
aatatatcaaattgctattcagtctaattcggcaaagcttttgtaaaaccaaaatgtttgatgttctaaaccaaatcaagatatccgaatattgaagctttagattgttcggcatggatcttaacgcttgagtggttaattttgttttttctaattaattgaattatttcttctgcattgtcaatcaatattggtagtggaaaatgtagtaaggggcatgttcaatcccgtattttaaattatttgagttttatttttttatatgattttggatgaattaggaaagttgatatgatttataatttattataaaatcctacaaaattccacttaaaattatgggatttagttttgtgtgtttttaacttgggaacattttttaaaaatctcttgaagttatcaagaatactgttcttggacaaatttaaaaataattttaaatttaaacatgttttgcctccgcaaagaaaagacacaaagaactactatgaggcacacaaaccaatccaatgaccaccataatggacgagcaaatggtaaagctaaaacaaccaaaataactcaaaggatgcatgataatagagagctaacaagctcaaccaagaagcatccaaacaaagacaatcaagagaaaaaatatcgaaaaatttattatttaataatatagaactagttaaaacaaacaaaaatgtttgattgaatacacccctataaaacgtattaaattgaaaatgctaaaaagaagatttttttttcggatccaacataaaaatccaaaagtcggctggataaaacgatataacttggtaatgccttaatatccctatacaaaaaggcaatgtatattgggaaataaaacattaattgtcatagtaaaaataatacatattacaaaaagtgattcgatatgaatagttataaagtgatgaaacatcaaaaacgtttgaaatgaatataatttattcagaatatatattttttatttatttattcagaatattcaatatgatacgttaaaaacttgattttaatagattactaaaatgtaaaaaaaaaactgatttgaatagaggctactaacatttaaattttactacccatgttatttgaatagaggctagcatgtaatggatttagcggaataaaaatgtgaaagtttgacgaatgctatgaatacaaaaagaaacactatgccattcataccatcatgaacaaatgctctgattcaaaaggaggcaatatgggtatgtcgatttgacaaaatggtcgaagttcttagggaacaaagagatttgaggtcacaatgcaaaatccaaatatctttatttttatttatttatttttttgttaaaagggttttaaaatccaaacatcttgtctaaagaaattgtaaaagacacttcaacagaagatgccttccagaagcaagcaaacagagttgagtttctcaatctcgttccatcatgaccactaagccaatacatgtatgtatgcatctacgtaacgtatgcgtgtatatgtatgtgcatgtatgtgtgtgggatttggaggaatgggagagaagaataaaggtcaaggtagagcatgtctaacatttggacgtgcgtcctagagcg

SEQ ID NO: 56108 - DNA, 1129 bp, Arabidopsis thaliana landsberg
ttgcgaactgccaaacacagaacaaatattcaaatagaatacaatgaagaacataatattaggtccctaaaaagtgatcatggagcttaaacatggaggcaagtactgagtgattaacaagataacaagactgcaaactaagttctaagctattaactatcaactacatagaaatgtttgtcaaaacacattagacaccatagcttaaaaagacaacacaaaacatttcacgtattagaaacataccctgtataaataattccatctccgccccatttgacacaagtcacagcaagtgtgtgcccactgagacaaataatagattttttcagtgtaatatcccaaatccttgcatccccatctttactagaagtcacaaatcgacggcatggagaactaaggtggactggttcccacgagataccagtaatccatttcttgtgaccctaagaaaaaggtaaaagacaacggtaataagtaacaaaccaaagcatatggacactggaccaataccaagtaaaagagactttaccgtaagtgggctgccttctagttctcctttctttggattccaacaacagatttcaccggatttactaccactcacaagatgcttaccatcaggagaccacgcaactgtgagaacccaattcttgtggcctgaaaaagattatagattaactattagtaagaatctacagagggaagtaaactgaagaacaatggtgagggaaatttcaaacctttgcaagttaacaataggagtttcagtgcgtagatcccaaagcctgacagtagtatcacctgaaccactatctaattgctttgcattacgactatagcgatacacatagaacaggttccgtgtgacctaccattcaaaacaacttatgttagttagccattgacacattcttaaacactctaaaacaacagaacatgctgtattgtgacattaccagcaattgcttgagagcctcggttaacaggacgaattcgaaaaacagctcgatgctgataaacaaccgtcgagtcctccttcacagacactgaaatgcacatttgtgcaacaacacttattagactttcattgacccgtaagacaccacaaccacactggttaaagaga

SEQ ID NO: 56109 - DNA, 909 bp, Arabidopsis thaliana landsberg
tgtgcggttaacggaccggtttgtccagacagaaacaaatgcatattctgggatgacgtgcatactacggaagtgataaatactgtggtggctaacgcagcgtttaacggacctatagctagtccgttcaacatatcccagctagtgaattaaaattagggctctattccattgttaaaatggcatagtccctttatttaaaacttggtttcgtctagattgaaaccatatatcagacacatatgtaataatgatggaataatatatcagatagactgaataatgaataaaacggattgatcaaaagaagtgaaattaaggatggtaacatattgatcaacaatatataagaaaatcagtattttcttgccgattctatatacaaagttgatttgggccttgtcaaagcccaaataggatggcaaataaacaaaaaggctctaattgtatccaaatgtcaaaaagtcaaacccgatccaactgatcttttctcgaaactccgatcgaattcgagcttacagtgaccgatcatggaagagagacgatcaagagataagctcactttccattgttcttaattacactttcactaattgattcaggtttgtcatcgatctttatgttagcttgagttcaagaaaccatcaagattctttctaaagattcatctttttgcgattgttctgcaactatttagtttagaagagacaggttttgatacagattctgactataagacacggtgtcatgaatttggttctataaagataagtttatgaccaacatcccaaattagaagtctaactgaactaactttatgtggcttaatattacagacatctccatgcatgtaaactatcttttgatagtagatgatgcagctttcatggctaatctaacctaagtgct

SEQ ID NO: 56110 - DNA, 972 bp, Arabidopsis thaliana landsberg
ggcgaagaagacactacggcggaggaacacgtgtggttgacgagaagtcagtctctgaacacgatcaatcagtgactcgtcaagcctttgacatccaaatttgtcaataagcttgtcgtaatcgatcttcccgccgtctttggcggacacttcccatggattcaccacttgctccgaagattcagcctctctctcgtccttcttatccacctccatcgcgacggaaaacaaaaacctatacaaaaacagaagtcagattcaaaatcctattagcaaacaagctgaatagagctgaatgaaattgttatatccaagtacctacggttgttgccggtgataagacggccgtggatatacggcggtggttttgcgactggagatagtctttagactgacgaagaacaaaacgaggtttaagtcatatatttattactatttgggagtcagaatattttatttttgtcaattttgccgtcaagttttagatatacacattacccctttctctctggcccaaaattaaaacaattatcgtcatttatccctttacttttagagagaacaaatatccccctctcgttaattttttcaattgtatcactaatcaaagtctttgacgccatgattgcctttttcactagaagttcattcatcatctaaatgcaccggtccggtttattgaatatcttcttcgtctttctttctgatccgttaataatctttccatagtctataagatgttatcataatttcataaattttcataatccaatagttgattagtttatgcactaaaataggtgttaaaagattttagatatgaaaatcatgttttgtgaatttgagaaagaagaagaagggagaagtttttggagtgttgtttagtgatggaagaaaattctgatgatgtttataacctaaacaagatatgtcaagagataaaaaaaaaagagtggtgagtgatgggacgtt

SEQ ID NO: 56111 - DNA, 1350 bp, Arabidopsis thaliana landsberg
acttccctttgtcaaaggcatgcaccactaaattatcttttgttttacaaaatgaccaaaattagcggcaatattttacgtcaacacttgaccaattttgattgttagagagcactttgtcaataaaccaaagtataatgtttccctccttactctcctaatgtataatatatattttgattatagaactcatagttaatattgagttgcatccctttgttttaacagtaaggctttgacttacgtttgtgattataccaattaccaagtatgatcaacactcaagatttttttttgacaagaatataataatgaaaatgcttatgctttgagtaaattaatcaggaaaacttttaactcatgttaatatagtatttttaacaaatatgaatggactacaaagagaatttgactaaatgtataaaatatataatttggaaaaaacatggaacatgacatggggagcacgtaggagaagcggtgatagcaaaatagagtgattcacttgaaaccgatttggtagtatcttttcttataaacatgttccaatgtaactagtacatagttggtcacaaatacaaatttgaatttgtcttcacctcaaattgccaaacaacccatatggtccccatccatcaatggattttcctcaattttctttcttttgaatatataacaaatttgttttttttaagaaaatacaaatatttgtaatgaagatccatgacatgacaagtgcttgtgaaagattacaaagagtgataataaaaaggggatgaattttgcatgctgaagcaatcaaataagtagctgaaagagtaacacacacatgaaagtgcaagtgacacatcttttacaacttctctcactgatgatacctttcttcctcttcctctgcctttgcttctctctctgagtcactacactctctcaccaacccatccttctctctgtcattctctaaaaaaagaggtccactataaatgagccttgagctgtggatgcttctttgtctggttttttagaatataataaaaaacaaaatgggtctctagatttcagatttctgggatctgggtgttagattaatctctttctcttccattattagtagagaaagctcactcctttcactcaaagtttctacctttttgttttcctgaaaatgggttgtgtttgaaatctcacactttgagatttgggtgtttattttgggatccttcttaccacatttagaaatttcagctagggttttcgatttctttacttctcaaaggagattttagaggcaaaagatggctccaagggtgggatttttaagattggtgggcgaaaagaacgaggaaagga

SEQ ID NO: 56112 - DNA, 303 bp, Arabidopsis thaliana landsberg
  unsure (1)..(303): unsure at all n locations
agcattcngtccgtaggatcactaaccagacccacttatagtaacatnccgagtgatttcaatgattatttcattcctttttaataagatattcatttatttttgttaaaagctaataacactttttctccttaattaactgtcaataaacttaattaatttccagcagttttgggaatagatataaaccaaaaagcatcattttgctataattggcgttacagntttcttaagaggagaaggattagatttaagcgagattttttcggatatatatattctctgtttttctttaattaaatt

SEQ ID NO: 56113 - DNA, 558 bp, Arabidopsis thaliana landsberg
  unsure (1)..(558): unsure at all n locations
gaatgtttgtttcaaacttttagcgagtcagattggtgatattagaaacaagactattcttcccttttgtcttgaatttttttgaggttgatttggctggtcccaccggaatggtggatattgttacgggaatatcaataaggccactggattcagatgtaactctgggggcgacctttctagaactcaaattaatatcagcgaggttattttcttcaggagttcctgtgataacttggatgggtacattggctacattcccatatgccaccggtgtcgtctccgtcccgattgctatattataagacctgcaattaaaaacagaaatagattacgcaaccatgatcacaagcccagtagaactatatattgctactgacattaagatctttatttctgtagagcagaatgtctgagtctcctccattggatcaaaagcgataacacaaaaaaactaaattagcctaaaggttatgtatcaacgactgcctttaaaccacacaaatcaacgaacccttttaacagagcacctaatttatctatanggagaatgtcatt

SEQ ID NO: 56114 - DNA, 166 bp, Arabidopsis thaliana landsberg
cgtatatgtagaacgtataaatctatatggattatctttcaaagatcatgacacaaaaaattttttcccttttaggccgtaatctatgaggctttcgagtttactatcgaacatactgtacaggatgagcacaatccattcatcttacattaccaaacaaaaatgg

SEQ ID NO: 56115 - DNA, 285 bp, Arabidopsis thaliana landsberg
  unsure (1)..(285): unsure at all n locations
ccccccccccttttctgccgcttcccccccccccccccccccccccttttctctcccctttttcctccccccccctttttttttttttttccaccccccttttttttcctcccgttgtttgcccccccccaccgcggtccccctcacctattctttccctttttncccccccccccccctccccttttttttcctccccttttttcttttctttttccctcccctcccccccccctctccccccccccccccccgcccccctcttcttttttttgccccttttcc

SEQ ID NO: 56116 - DNA, 152 bp, Arabidopsis thaliana landsberg
tttgattctatgaaaatggatactaacttcaggggggcgggggggacttattataaaactttggtaggcacccagtaatggatgaagacacgcatacctacaatatataggcaaatacttggcgcaccatgctcacctagatgccaaagttc

SEQ ID NO: 56117 - DNA, 1026 bp, Arabidopsis thaliana landsberg
actcttcctcttcctcgtcctcttttatgggctctgcctctacctctactactagatggtttttctaagcgcttccttttgtttttcactttctcattggcaataggtgaatctttgtctgaagtgttgttatcttcagtttcatgaggagcaacttttttcttatttcgttttcttggaccttcctggagagtatgatcggccacatctgacgacagacctccaccaattcctttgacagctttgttaattcttttactacggatctttgcaaatctttcattaaaggaatagaaagcttcaatccgaagttgcgtcttcgtggaaagaaaacaaattgtcagattctgttcatattatttattcataagcatatcagcgataagagatcaaatgttagatgaagacctcgcgcttttcatactccttcaagactggtagtagtagttcatctgttttcttgccgttccaattaaacttttcccagcatagccttcacaaaaagtgatactacagaatcagaactcaggacattgtttcataaattgataagtagattattacagaaaccgggtccatcggacaagtcatgatatatatatttttcatatacttcagattcattgaaacctttctgccgctgtaagtggctccaaaaaaaaaggtcaagctatgccatactgtttagatgaaatgttaagtaaaggaacaacttactttctaagtactgaaagatcaggtttgccccatgagaatttctcagtcgacagatccacttgcggatttaagtaggctgatataacagcctcactagggaaagtcaatggaatatgccagttcttgcttacctttctctgtaaaattcaaatcgtaatcaaattaggagaaaggttttgtcaatcttgaacaagttggaccataataaatttaacattaagttatggtaaaagagccatacatgctgatccatgaagatttgcttgatttcttcggtgtcatcagtcgaggcacctgagatgattcctt

SEQ ID NO: 56118 - DNA, 1135 bp, Arabidopsis thaliana landsberg
ttattaataaaaccaaccgatttgtttttgttttggttattatatctccaactttttgttataccatgcatgtccacacgtttttttcaatttgttacatgtccacaactttgacaaatatttttaccaaaaaaacaaaaaaaaaagtttgacaaatatctttagattttttttttttgggcaattagtgacaaagcaagggacgttgaaagcaagaaacgtaaatgtttggatatcacaccacaccaatatgttttagccattacttctccaagtttttttgttgtgtgggaataatacttctccaagatatttaagaatacgcaaatgcatggtcattgaattatatagcgagaaaacgtcaaaaactaaactgattaaaacagatattcttttagtaaaacagaaaaaataaaaatatcttcatatatataacctgtggtccgagacccaaaccttaaatcagtataaaatatcatagcggagtctaaagaagagttcatccaattatttaactctttagtgtaatcattagcaacgcaaagaaatgcctaaacgacaggctcaacggcgtttcactcgcaagactgactcgaaaacaccatcccagcctctggtatcccgtcgctctgcaaactatcaaccgtctctttggcagcacgaatatctcctctcgctcggtaatacatatgtggtacgtataagaatgtacatgacgttgtattaaataaaattatgtgacatatattactatttaggaaattatatatagtgataatatttatatcatgcagaaagaggacaacgtcgagagagttacgttattgaagcaggaagtgagtaaaatgctcaatgaaacggaaggtttactcgaacagctagagctcatcgacactttacaaaggcttggagtttcttaccattttgaacaagaaatcaagaagacactaacgaatgtgcatgttaaaaatgtgcgagcacacaaaaaccggatagatcgaaaccgatggggagatttatacgcgaccgcccttgagttccgactcctaaggcaacatggtttcagtatcgcacaaggttgaaagcgctcaatcctttttagttggaatacaaacttgttattcacataaatcca

SEQ ID NO: 56119 - DNA, 134 bp, Arabidopsis thaliana landsberg
tttttgaacatggatactatctgcaatggggcggggggaattttaaaccaaaccgccgaaaacacccagttacaacggctagcacacatggacccaatagatagggatacgtctaccagacagagcgcaccacg

SEQ ID NO: 56120 - DNA, 113 bp, Arabidopsis thaliana landsberg
tttgattttttttacaaaaataccaacctcaaatgggcgaggtacaaattataaacaacttcactctatcccctaaatacattttcaatcccatacaattcaaacttatcccc

SEQ ID NO: 56121 - DNA, 139 bp, Arabidopsis thaliana landsberg
tttgattttttttcaataaataccaacctaaattgggtgggggacaaataatataaaactttactcaacaccccaaaaacattaacaaaaccaaacacttccaacttcagctcactacataatccaaattgtttattcc

SEQ ID NO: 56122 - DNA, 238 bp, Arabidopsis thaliana landsberg
tttttttccacgaataccaacttaaacggggcaggggataaataaaatacacctttactccaccccccaaactgattaaacaaaccaattcctaccaacttcaaccctatatctgaccgacatctgataactagatgactatttcaactcaacacttattatcgtacttactgattatttatcccttattttttttacatatacaatgatatgtaacgtataaaaataaacatttcca

SEQ ID NO: 56123 - DNA, 219 bp, Arabidopsis thaliana landsberg
tttgatttttttaccatgtataccaacttcaagggggcgggggatacataatatacaaccttagtcggcaccccgaattgattgaaaagaccaatacctaccatctataggcataattctaaccgaccttgcacaactggatgccttattccacgcagcactcctaatcgtacttactagacatgcaagtattatggtatttgcatatactcttacaaa

SEQ ID NO: 56124 - DNA, 131 bp, Arabidopsis thaliana landsberg
ctatttaccacgcataccaacttcaagggggcagggggaaaataaaatacaacctcactaaacacccaaaaatgaatactaacacccttacctaccaactatacgcataattctaacccaccatgctcaca

SEQ ID NO: 56125 - DNA, 433 bp, Arabidopsis thaliana landsberg
cagaaaaatctttgttcttctctcttcactattaaaaggagggggaaactataagagagtgaaaatccctttttattccggttaaggcaggcgtatcattcggttcatatgatggctggtttattttcggataataactagatgggtctactgactgggctttcccttctcagcagaaaataatgagaattaatagatgttgattaatctcatttctttcaaaaaaaatggggtattgaaacatctatatagttacataacttgttattgattaatatagttcttagggtggagtactaccgagtttgaatttatgttttggacaccacaccaataagaaaagatttatgccgctattaaacggccttgggttaggctctataattcaaactacaagaaactaatgtgtattgttgggcaccaaaaaaaaaaa

SEQ ID NO: 56126 - DNA, 1528 bp, Arabidopsis thaliana landsberg
  unsure (1)..(1528): unsure at all n locations
ggacataggaagcctcgaagaagcacttgctcaattcacagcatacgaagtcctagatggagagaaccggtatttctgtggcaggtagttgattttttctcttggaaacttaatatatacgttataaaaaactactactaattcctttgcctttggctttcctttttacaactacagatgtaaatcttaccagaaagccaaaaagaaattgatgatattggaaggacccaatattcttactgtcgtgctgaaacgttttcaggtgagagtcttcatcctcgttagtttgaaggtgtctactattgttgggttaactcagaagaatgatttatttttccatgcagtctgataactttgggaagctgagcaaacccatccattttcccgagcttctcgatattagcccgtatatgagtgacccaaatcatggggatcatccggtttatagtctctacgcagtggtggtccatttggatgctatgagcactttattttcaggtcattatgtttgctacataaaaaccctcgatggagattggttcaaaattgatgacagcaatgtaggtctcaatatatcatgtatactatntagataccaattatgctattgcctatttctcgaatcttgattttgattctgaattcgcaggttttcccggttcagttagagactgtgttactagaaggagcatacatgcttctttatgcaaggtgaatgaatacaaagagtggacacatatcataaaacccaactcttgttcattttactaatatagctgaggaaatcctcttctttgacagggattctccgagaccggtgagcaagaacggtggtcggaaatcaaagcaaagaagaaatttggccgcaattccgtcaagaaagggcaacaagaaacagagagacggtgataataacagtttgttgccgcgtgtggactggtcgagtggaagcctgtcgtcaatgtttagctcatcggacacaacaagctcatgtagcgcaaaagactcatcaggtattgagaatttatcagattacctgtttggtggagttgaaccggtttggaaatgggatcgtcataataaatctcaaacgtttgattgagatttaatttttgagtttgatgaccaatttttgactgtgaaccaataaagcaaaaaaatagaaaatgttaacattttttgggtggacttgaaccggtttggaacgagttcgtcatgattcatatcctctataacgcaaaaaaatagaaaatgttaacattttttgggtggacttgaaccggtttggaacgagttcgtcatgattcatatcctctataacgttttactgaggtcatgttttttgaatttgatgaccagtttttgactgaaccaattagcaaaaataggaaaaggtacagttttttagaccttttttgaatccagtaaatttgaaatttaataaatggatttctcttattttaaatttaacttttaaaatttggaaagcataaaaaattactccctccatttcacaaataagtttttt

SEQ ID NO: 56127 - DNA, 846 bp, Arabidopsis thaliana landsberg
tttgttaaagacttatgtgcattagcgattgtttgacacacaagccactcaaattgatgattcttgcagacacttgttccattggcctattaagatcttttgtgtcttgtccacgatatagtatgtgtgtgtgtggctaatcagatatattatttaatatgggctacgtaaagatgtgtcatgtgtactttgttttggcatgatgagtgatacataacgggtgattggaaccaatgtacgagagcctcgtaaccgaattgtaaacacggtttcttttttcagttttttttttttttttttgcttaattaatcggtaagttaaggtctatcggtactatttgtttatgtgttgtatttcgtgtgccaaaacatttttgaaccttccattataagctttgtaacacaaatattggcatccatggaataacaaagaatatggtattacattgagatatatattgacaagttcattcgatcaaccaaatcgtttcttctacttgtgaaagtagatttaactctttgaaattctttcttcaagaatttcgtatccgtcaatttgtttgttcttgtacacaagcttttagttaatgttttacattttaaataaactccatggaataatatatcctgaagtcctagttgatagcatagcctaaacaagcctttccacttctagtgtcgatcctgcgatagtttttgtacgagagcctaaagatagtcaaaagatatacatttcacataactattaaaccaattatcttaattatatgctttatcagcttcaaaaccaactactacaatatataaggaaaaatacccctccccttgaaatttttggatggcata

SEQ ID NO: 56128 - DNA, 126 bp, Arabidopsis thaliana landsberg
ttttttaacatggatactaacttcaaggggggagggggaatatttaattaaaattctgtcggcatccaaaaatggaagtttacacgcataggtacaatatatacgcaaaatttcaacacacctagc

SEQ ID NO: 56129 - DNA, 519 bp, Arabidopsis thaliana landsberg
gcttattgagtgttatggaaaagccgggattgttcaagagtctgttaaaatctttcagaagatgattgtttttgttgtggagaggacgattaactcgtataatagtttgtttaaggtgattttgaggcgcggtaggtatttgatggcgaaacggtatttcaataagatggttagtgagggtgttgagccaacgaggcatacttataatctaatgctgcgggggttctttttgtctttgaggctagagactgctctgaggttctttgaagatatgaaaactagagggatctcgccggatgatgctacgtttaatactatgatcaatgggttctgccggtttaagacgatggatgaggcatacaagttgattgtggagatgaaaggtaataagattgggcctagtgttgtgagtttctccaccatgattaaaggatattttgtggtggaccgatttgatgatgggctgcgacttttctgatgagatgagatttccgggattgagcctaacgcttctaccta

SEQ ID NO: 56130 - DNA, 1053 bp, Arabidopsis thaliana landsberg
agtgatggcaaacttcctgagtcaacaaatatcgttgatgtggtgagattatgcggacctttttctctctttatattccaatgtataaatctttcaacacaaacaaattttttttcctagaggaataagatatagcaatcaaattgatatatctgttatatgttatttgataatattcaaatatgtcttataatgcagattcaagttgtgaattgtcctaaggacggttgtttccctgggctctatgttaccggccttctgagtgatccatggctgtcagatggacatagccttatgttgtctacctactggcgcagttgtcgagttatactcagcgtaaatttgctaaggtggctgatgaattaatatggaaagtttcagaatttcctcctgctgctgtactgactgatgaatatatcttgacaatattacagcggtgaagtgtcacgtgccagccctagtgattcagattattcatggaacgctcttgcgctagatggtgatagtattgttgctggtaaaatctcttgagcaagttcctaatctcagtgattatctgttacaataccatcttaaatacataccagacttgaaacaacattgcattttctttctctgagtagtgtctagcagcccggcgagtgttcctgaaattaagtatggaaagaaaggtctcgattcagctgggaagccttcatggctctggtcgaatattcaaagcccgatcagatactctgagaaggtaaaagcatatattgctagaccgttttgattcaaatgatgttaggctttttccttatctatcttttgttttaattgtggcaggttatggcagggctttcatctcttcagtttaaaattctaaaagtaccaattagtgatatttctgaaggtcttgccgaaggtaatttacatttaattttgattttgacaataagtattgtttcctagactttggctctgaatactctgttattgttcaaggcaggagccaaaaatcctattgaagccatatatgtatcgtcatccaagtctaaggagaatgggaaatgt

SEQ ID NO: 56131 - DNA, 532 bp, Arabidopsis thaliana landsberg
cttttgatgattcaagtcaatacactcataagttataataacattttattttcaactatatgtattatcttttgacaagctcagtacaatcatttgagaaacgacatgaatgtgcgtgtcatgaccaactcattttgtttaatataataattttgagaaaacttttaactagttttatataatttatgcttgttagtatctcgaaaggttattataataatctcaagtttatatttcctctaaagttgcttatgaatcaaactaattaaattgttttatgcttatataagtatgtctttttttgccatgtttctagtttatatccgtatattatatttctcctatagatgtgatataatttactcgtatgtcgttaattatttaccaacacttataagtagatgataaagctaacatatgatatcaacaaaataactaaaacatgtgatacatatacataaatactcgatctggctctcagaggcccaggcccattatcattgtttaaatgatcaacagatcaaatcaaact

SEQ ID NO: 56132 - DNA, 209 bp, Arabidopsis thaliana landsberg
tttgattttttttcaaaagataccaacctaaagggggcgggggacaaaaaatatacaactttagttgacaccctaaaaacattaaagaatgcaaaccgttccaactattgcccacgaactatgcgatattgtttatccggatgccaatattcactctccgatgttcatcggacataatgctcatagcagccttctgggatttacatatc

SEQ ID NO: 56133 - DNA, 1050 bp, Arabidopsis thaliana landsberg
agttgattctatatgacgttacataccaaacttatgcaaaatctcatttaagtcattgaatttctatctttttgttattgaaaaattggaaagtgaagattttagatatttaattgttagtcatgagttatggcttatggacgagccgttagatatgtttctaagtagtggatacttgaactgaagcttttagtagtagtactttgaatgttttatcagaattgattagaaagtaaacgatgatcagcctaatttaaagacgaaaatgttgatttataaataaaatgtgtgcagttggtgaggagagaaaaaaaagtttgtcgtccaggttttatgctcataaagcaacacatgagtgtttctacctaacagcctatgtcaatacacttacttttctgggccattaagtggactcacctaattttttcatatttataacgttacgatcttattttatgccaatcaacgttttttaaagacatgcgaatcaccaattgtctcatagaatcaacttgctattattttgtagttgactaaaaaattactatttctttccttaaacttttatttggcacttgacagtaagtaatcaagaccacattgccgattcaaaataatcacaccgttcgaaattttcaaattgagttttcttgttagagaatttaccctaaaactaaatcaaaaccaaactgaataaattccataaacaattggaattttctatttttcattaagactggaaatataaaaacgtaatcaaagtcatatcaaaagactgcaaaaccggatttgtagtctttgaatgccatgcatgatgatgctctacacatcttttaggatatggcccaaaaatattaatacgcaaaagaagcccacaataatggccctacttttaagcgacataacacagagaaatgtagaggattcggtgatctaaattatacgcatgcatttgctacacaagactactctattcctcccattttattcttctgcttgctctagtagttgacataagccattcttgggacacgttatgttattttatta

SEQ ID NO: 56134 - DNA, 351 bp, Arabidopsis thaliana landsberg
tataactactaaggaggctagagcacggtgctaatcgaaaatgaatcgaataatttactgtgttataaagaccctaatgcccacgcgccaatggtcctccaggcggaatatgtgctgctaaaagaactcttgttctggggccgattgcgcagtgtgatctatacattatgatccggacaggggaaacgagacgcgtaagcttaatgacgaagtgccatatgggttaggcataaccttggctgtttgcggatggcatcccacacgaagggctaggctggcagatccggattcttggacggaaccaaataaatgtctacttgcggcggtggtgtgagcataaccatgccactg

SEQ ID NO: 56135 - DNA, 405 bp, Arabidopsis thaliana landsberg
aggaaccgaaccagcaacaaaaaggaccaatggagaagcgacttacgcaacaaatggagcgggcccccctggaacgggcacgatgaggaagcaacgaacccaggaacgaccaaggctggaaagcccaacggaccacacagaggaccaagaaccaggagaagatacaggagcaaccgcagcccctgctgatgacaggaggaactccagactgaggagacactcgcacagcggccaagaaatcaagagcacaggggacatatacaggagcaaaggacagcaatacaaacaccacaacaccagaccagaacccaacactgggaccaggcaccgacgggggagacaaaagacccccccctacaaggccaagaaaggaagaaaaccggaaaaaaaacaaaacaaacaagg

SEQ ID NO: 56136 - DNA, 492 bp, Arabidopsis thaliana landsberg
taagccaatctgttacagattacaggttttttaacgagattaatccacggattttttggtcaaccctcaagaagaaaaatatgttgaatgatgggagtgttattttatagacctaagcaagtgattcaaatgtctgacctactttgatgtctttgctaagttggtgcaaaactaatcctaattattttgtatcccctatttgaatatatctccgactccaagtttgcttgccaggcctattcccaaacttcatctactacgaggcaagccatgactgctgaaaatagaatctccgtaatggcgaaaacaatggtagattcgctatttaaccaggttgatcaggaaactcatcaatctcacaactgacatcgaactttagattgcaaccgatgttcattaaacgcaatttcacttttcactatgcataaatctcacattaagaattgcccgcaccataaataatattactgaattgaacgaagcatctcaaac

SEQ ID NO: 56137 - DNA, 137 bp, Arabidopsis thaliana landsberg
ttttttaccatggatactaacttcaaggggggacggggaacatataacccaagcacggtaggcatccagacatggacgcctatacgcatacgtaccatataaacggataagtctgacacaccaagctcacagagtag

SEQ ID NO: 56138 - DNA, 865 bp, Arabidopsis thaliana landsberg
tgcctcttatacatatgtgggtctaaacagtctggtcagctcggagagtcacaagctgcggttgatggtataatgggatttggacaatcaaattcatcgtttatatcgcagctagcttcacaaggaaaggtcaaaaggtcttttgcgcattgtttggataacaacaatggaggtggtatattcgccattggagaagtcgtgtcgccgaaagtaaagactacacctatgctctctaaatcgtaagtgaatgcctttctcttaaagctcttcttctttggttctttgtcaagaagttttgaatttcttacactgtttgcaactctttcacagagctcactatagtgtcaacctcaatgcaattgaagttggtaattcagttttagaactttcttcgaatgcttttgattcgggagatgacaaaggagttattattgatagtggtacaactctggtgtatcttcctgatgctgtttataacccgttactgaatgaggtcagtactatattctgttacttgtgaattctttctgtcttattttacaaagttcttaacacttatgtttttttcccttgagtttccatcagatattggcttcacatccagagcttactttgcatacagttcaagagtcgtttacttgtttccattatacagacaagtaagaatttaactcatcgctttgtcattcttggtgtttagtgagaatgtttgaaatggtactgttatttgctggaaatgtactagtttttgcttttggaattgaaatggagttggatttagctgaatctgatggaatgactgattttatacacctagtatataatgtttgatgttttgaccctctgaaattttctgtcaaattca

SEQ ID NO: 56139 - DNA, 1427 bp, Arabidopsis thaliana landsberg
aattaaattttctaacgtttttagatgaaacaatatatattagatacatggaaaactagataaaatatcatcgctgataatatatatatatatatataaaatcaaaaaaatattataaccagcaaagccataatattttttaaaaatatcatatatgagaattagacaaaacaatatatttgaaaaattaagaatgtcatgttttagtagggacaaaattcaaaaataatttatccaagcgcacaatttaaaaaaaaaagattgaaaattaaatgaacatttattatcgtatgtgttgagccgcctaaagcagtttaagagcatctaaaagttgtctagcttcatgattactcccgaccaaaaaaaaaacttcattgataacaaaaatgcataagagatactagtatttgccacaatctatgactctataatggaatcaaaaatatattaaaaacaaaaatcagactaaataaagctacacatagttagaaaaaaaaacttaaatgtggtaatcactcaaatgtggtagactactgattaagggcctatcatgtagacagatgctagggatcaaaatttcatccttaaagcaaccaaatgtcttagaattagtctaaatttcaaataaggttgattagtaaaatagattactataccaatgtttttttatattacgaccaatgtttttaattgaactgactcaagaaaaggaggagtattatgaaccaatgagctttgacatttgttttaggataaatcccacttttgcaacaactcttagcatcacaaagttatggaatggatcacaaaagggtcccatagatgatgcaagaaaaccgcgtctactatagcaaatccaatctcttaaaacaaaaccttaatattctgcctctttcctaaaatctctcattagtttactcatattactatttgagggaatctacagtgcattgatactaaatagataacacttgttaaacccacaaaaggcccataacaattttgaagtttcctcgaagctaactttggaggctttgagattttaaaacgagtacacaggagtttatctgctgttaagatactaatctacacctataaataagtgctgacagttacaaacattccaacatcaaaatccaaacagacaaaatacaaaatacaaaaacaacaaacactcttgagcaaaaactttgtgtctgtgtgtgttcatggctggtcttaggaattccggtaacagcgacaaagcgcaaaacgatggcaaaggtgtaccatctgcctacagaggagtccggaagagaaaatgggggaaatgggtgtctgaaatccgtgaaccggggaccaagaaccgtatctggctaggcagtttcgagactcctgaaatggctgcaacgcatacgacgtggcagcatttcatttcagagggagag

SEQ ID NO: 56140 - DNA, 488 bp, Arabidopsis thaliana landsberg
tctctctctcgaaaagtagttatcggttccgattgtacgatttcagtcagcaaactaccattttcgtttcggcaacacggtaacatattattcattaatatgaaggcgatgttaacatttataaaataaaatgctactttccttatttcttaaccaaaaaatcttaatcagtcgtatgatattgttgttatctaatttaatcgtagctacaaagattttaaagtgcctcataagaacctagcgaatcaaacctcatgagctcactaacgtaacatttactcatctcaagtctcagtagtgatgatgatgatggtcagatggttttaaatttgactttcacttttaccgaaagcacataaaaccgtcccttctggtttacttatcgcgtgatcaattccggtttactagagaaccggactgagaccattttcatttggctccatctatgatcaacatgtacccaccaaaaaccctataagctcccggag

SEQ ID NO: 56141 - DNA, 700 bp, Arabidopsis thaliana landsberg
caccgggaactgatcataccagagtgttcgagattgtaaccaaacaagtcatcatatatataaacacacacacgaagaaagagttgttatgagagggcctcggaacctacagggatctgatttctgagccttggtgaacttatgaaactcagacctcaagttgttgacgaaggagggatgcactatactcgttttctggaattgttcctcttccatggccctgagcttaacaagcctctgattgagctcctgtaatgagaaccaaccttcttctttctttccctcaggcctatacaatcttagtttctctcccagttctattggatcatagctcttgataaactctgatttcatctcctcctctgtcacatcttcttcttctaactccttcccaaccactgaatgtggcaatccttctgctgctcctccgattacatttgaacggatattatcattgatgttcgtcttcataatgttctgaatcccagataaattggcccatttgctctcagtggttgcttgttgtggtctcatctgccttaagttcgcctttatgtttgttaatggcacaccttcgattctacgagtccctccagattttgataacacattctgcttgaaaagatcctgcatatccctcggcggcggagctgttgctctacttcggaactcgttcagattcctcctgatatcctggtta

SEQ ID NO: 56142 - DNA, 1359 bp, Arabidopsis thaliana landsberg
aagtgatagtaggtcaacattttagttagatatgcttaatattgattcaaactcaaatattgcaattgttagcatcgggatttaacaaggcatatcattatttttaaaaaaagattaaatttgattggtctgaacttttaactctttttttttacgaagattgtaacactaaaaacatatatttgaagcactgaagtgactgtaagtacccaaagttgttgtgatcactgcaatcattaaggtgagtacaattttgaatgtaatatattaactattaagtaaataccattgcaatttgcaaaccactttttctgagaacataatttgaaactttctttaaacccgctaaaaacatctattgatgtaaacacctttttctattgatgtaacatattaattatgtttaattaacaataactatgtgggtttgaacatatagtgatgacaaatcatcaacactatcacaaatcaataaactacatatcaattaaaacattgataatcgactaaattgagtttgtccaaccacgcaaacgcacacgtgtgtgttatgtaatagatgcatatatgtgcaggtagacatgacagaaattgacggaacacagagttaatctgattctttaaaaatgtgagaagctcaaatgcatgtcttcattattttattatatcatcttctcatgttcccaagtcacgtgacattcctcaccctcgatctttttgcatgccatttgtcacatattcttacacaaatacatgtatatgtattaaaattatcaatccagtttcgaatattacagaagtatttttagaaatgaaatagatttgggaataagaagggtttgaatgtttttttgaaaaatagttaattatttggctaagaaagaaaagttgttaatgttacaagtcatgcacatatcaagacctaacatacaatccaatggtaacaattgttaattcacagtttaattaacctttctctttctctcactcacttttccttttcatcaccacaaagcactaattgtgtgaccatcatcttaatgactactatatctctaaacccttaacacacttcctcaacacttttcggtctcttcttataacaaaccccatcataatatatatccaaatctatcatattcctattccctctcttctcaagatcaaaccaaatttctgattcgatggcgaatctgattcgaacagaccatcagcaacatattccaaagaagaggaagagaggggaaagtagagtttttaggctgaagacgttcggagagtctggacatccagctgagatgaacgagttgtcttttcgagataacctcgctaaactacttgagtttggtcactttgaga

SEQ ID NO: 56143 - DNA, 1370 bp, Arabidopsis thaliana landsberg
cagagaaaaaacccacaatcgagagccttagagaactcacaagaacaaagtaaattacatttttcttctcccacgaaaggtacacttaactttcgaggtatttgttgcctattgaatctggattcttagtcgcaacctaaaaaactcgaaaggaggaacgaaagtttttttttttttttttaatttatagatgaagtcttggtctctttgatccttcgattcagtgttcatattgcatagtctaatatcggttgaacctgatatatacaagttctctttaccaacatccttagaagtatattgtgatagttgcttgatgcttttgatgtccctgttgattctcctacgttcgtttcttctttccttgttctatctcatcctttcgaatagtggttcctgcttgttctttaggctttagccagcctatggaaatgagaatattgaaccaaccaaacaatgttgccatagtgccattgtattgatgatgtctatgacattgagttattgtttttgtttgcactctggtagtagctttatgtatttggtcaccttagattggatgacaacaatggtggtgtttagtttaagctagctatcttctttgaatagaaaaaaaaaaaaaaaaattattataaattggtatgaaaacaaaaataaacattagataagaggacttgtattttgtgggggcttttggtaaccactatataaattttgttttgtctttgtttataactctttaattgacaagttaggtataaagtgttttgacgattttttcccctctactttcttgtgttctgataaactttattacatgtcttcattcaaatctttggttcgctctggcttaccaatttacacgttttgttaaaggaagtttgatcagcttcggtttaggccgtgtgattaagaatttaagataaaccttaacacttatgaaagtaatcaagcactatccggtagtgaaagttaatataacatataggattatagtttggccaatatcataacaactaggatataattttatgaatgtacaatatgcaggacaaagtactttgtatcttttgatagagttacatgcactataagagaattaaacatattagaaaaaagactagattatgtaaaatgtcataatcatattactataagactagctagactgaggtcaaatcaatgcataaatttaaatcattatctcttttgaattcgattatctccctcacatttttcaaatttctctactcactttttctataaagcggaaacagtatcggcggttcatatgtagtcggccattacggacccatttaattagataaattattcttagccgtcagtttcatatttcgtctcattctaat

SEQ ID NO: 56144 - DNA, 877 bp, Arabidopsis thaliana landsberg
ccaaaacatatgttagttgtttatcccagagctattttctatcggcttttgtctctttgatttttcggatcctggcgaaaaaaaaagagcggatttttcggatcctggaaatatcagatataggcccgttaaaagcccaacaatttcattagttattatttacgcttttgttgtgtgttttccatattcttactctatccaaccgaaacccgaatccggatccaaatccagatccgaagccttcatatcgtcggcatcaacaggcgacgaattacctcaaactcaaagctaaattcacaggcggagaagttggattcgaaggaacgtctttcgtaaatcaattctgctctgtaactagtttctgtaagtgtttggatcaatattctttgttaagctcaaagttaatgaatttggaattggattttcaaaatcaccgttcgtaaaatgcttcagaaagatgtctgaattctctctttgttactcattgcttctgatcactgtcggttttgtgggtttaagtccgacaagtgtaggagcttttgcttctgagttatgtcggttttattatcttaactatatatgtgttgtgtttttttatacagaattgaaacttaacttacatacaatctctgtttttttgtttgcccttgtgggcagaaacaaacgatgcctcgtaaaggattatccaatttcgatgattatgatgatggttttgatgatgatgacgatgcttttgattgtgactatgatgttgatatagatgaacatggtataaacatcttcccattacttttcttctggtggttaatggtctctctttaacttggtttatgatttgatttcctgttttcttaaactacagaagaagaagctgctg

SEQ ID NO: 56145 - DNA, 137 bp, Arabidopsis thaliana landsberg
tttttctttttatataccaacatcgaccaaccgggggacaggggatacattaccttggtaggcccccaaaacccattacagactcccaatagttccaaatacacgcctcgtcctgagcgacattgctcaaccagatg

SEQ ID NO: 56146 - DNA, 722 bp, Arabidopsis thaliana landsberg
agaaataaattctaaacaaggtttcactctataaaagaagaaaacccacaaattccaaagcccaaattaaaacaccaaaagagcccaaaatacaaactcattcttcaccactaaaatattccaaagcaaagcaacgaacataacggataagtgttatcctcatctagtcatcttcaccctctaactcaccgagaaagaaaagtaaagagagtttggtgtcactatgaacattgccattcataattaccgtcactcaaaattcatcgtaaatcctcacatagacaagacttttgcaaggactcgacaggcaagatcaaataatattacattcatgacaagtactcatggaagaagaagaacgatgggactttgtttggtaagagcaagtgccgagaccggagaagaagaatccgacgatcaaaacaagcctgagagaagaagtttcttgagcttagcagaagctggtctagtcgaaatctcaggccttggtgcacacgagaagtttctctgtcgactaacggtaaattaaatcataaatttatccctacatattataaaccctccaataccaaattttaattgcaatctattaataaatctcttacattgttttgaaatatattggtatggttaagataggaaatgaaacattaattttacataggaaattgaaaccatatgtagttgtgaaacaaaagaaaatcttataggcgtcgcaataa

SEQ ID NO: 56147 - DNA, 1175 bp, Arabidopsis thaliana landsberg
tctaaggtccttactgattttactgcgtgaagcggtgccaacgttctcgagtttctcttttccttgaggggtagaagatactgataatgactcaccttgagaagacccttttgcaactgattcaattagcttcaacttcctcttatcttcattttgctatagagagaaaaatataaacgaaatttgatgagagaaaaggtctcagtgtaatgatgaacgaggtggcgagaaggagagggaatcaattaccttgttatgagtttcattagaaggtgcagaatcttgatacttagaccgcatacgacgaacagaaacagctctttgttgctgcattctcacagatggaaccggattcaatagtcccaaagagcttctcacgcagagttgacggagtcatccacaaacaccagacgccatcatgctgcttatatttccatcttcctcttcttgatcaggcgaatgacgaaaccgatacggattttgctccactttgttctgtttcttcttcatcaactgcttcaccggttcttctggtttaggtggtttcctagcaagatgtggaggtgattctgaagtcaaagctttagctgcaggcaagaatctccccatcattagatcctgagtttgtcgatcagtcgataaagttccaaatggctctactagtatccctgaaccatccaaaccactcgcaccactaacagcactacagttaaagaagaatgactcagttcttgaaagtgtatcagttgcatcaagataagtaccatcactatcatcatcatcatcatcataccgagaactattactctttgcatcctccacaagatatttatccgaagacgatacagttttggtctggtgatcagctccagtactttcaggtttcctccctaactctactactcgctctctaccaggaggaagctttggcacaaaatgtggctctacaaaactttgcaaaaccggtttcctttcgtcttttggctttccaggcttatgttcccattgaaaaggaacagttcctggatttctcacaggacctgacttgatatcagacttgtaaactggtggagaaggaggaatcatgttggttactgaatcaaaagatcttgttttgctctcagattctgaagtttgtgtaggccgtctaatggatataagcggacggttgaact

SEQ ID NO: 56148 - DNA, 1014 bp, Arabidopsis thaliana landsberg
acacaaattacctttgaacatcccttttttctttttcatttacgaataatttagtaatctttatctggcatcgatcagtatgttccactcgaaacagaacggtagttcgataaaattgtgctccacagtgagggatatcaggattaagataaaagttaggagagatgacggaaacatatatacctcattcgatgatgttcttagaaatgttcttaacatttatgagatgtcatgattggttctctaaaacagcttacataacatttatgaatagttgcggttacatacatttgacactaaacagtattttcatcctgctttttatgaaagcaccttttttattttcttttaaacagcattttaaatcaaaagtttattctttctaatatttgcggtcacactagctaatttactcctttaacgtttacttaagaaaattaacataaacaacaacaaaataccattagatagatttagcggatatgatatatacatacttaacgaacatgttggtaagtttcaagagtaattctatcatttttaaaaaaagggtttagtaattatataatttgagaatgagtaacccaaaacccacgaagcctgtcacatctactcctgatgatagagaataaaatctaaagtaggttcctaaaaagttttgtagattatataacttgaattttctgtgattctacgttggattttatctaaaaaaacaaaaacagttttgattggtaaaactcttaccgttacactaagaagtgtactattcattttttttttctttctttctttgataagctgttcgttttattaccaataacaaaactagtaaaatatagtggtactaaaatctatatcactattttgcaccgttgttttttataactctctaaactttatttcctattagctctaattagtaactatgtactgttttggtacatgataaactgctatgatacaaagtttactattttagactttttagttatcatcgatcataatgggcat

SEQ ID NO: 56149 - DNA, 974 bp, Arabidopsis thaliana landsberg
  unsure (1)..(974): unsure at all n locations
atcggtgataggtttaccagtcgcattcggcgtattacatcaactagaaaaggaaaatgttcgtcaaaagaagctttttcaggcccagattgatgacttagtggctaaaggagtcatcagattcattgaggagagtgagtgagtaatctgtagcagatttttaattggtgatcatgtccatgtttgtcaagtgttattttaagctttctttttctttctttcaatgcgtttccatgaaactaaatagctgtttttgtatatgatatgcttcaaagagttcttctaatcgcattctatgatgcttaagagtttctcaataagttcttattaataagccatgatacatctgcttcagctagtagatatgactcgtataatgattttggttattgtgttcatcaactttagatcacagaggattttacattatataccatattgagagagcaccagccatcattaaaccaaattgcttgttgtctcttcctttgatgcttgagcttgtggagaccgctgcaatatttttattcgttttcttttagttccgagaaaaacggaaaattaatgtttgcacgaatagaatcaaaaactgtaagaattgttattagtacctttatgtccaacagtctgagaagaagattcagtgaattgcttaaatatttgagaggctggtgaatctggaagcagatgtagaagatcttgttccaaacaaaatgaaacaatgagaacaatctagnnnnnnnnnnnnnnnnnnnnnnnnnnnnnnntattgtagaagatatgaaatctctcacctgggcattgagagatgtttgcagggacatgacaagcggaagggaggctcattgcacggttggcatcaactttgaaccccaaaccaggatcatccctgtctttgactagagtacatagacattttctggtctgccctttgtctatatttaccttgagtgtgctgcaacatgttgagtctg

SEQ ID NO: 56150 - DNA, 364 bp, Arabidopsis thaliana landsberg
aatgccgcgaccgaggcgtctgcgccacctaggcagcacaccgcatcttttttggtctgtaggctgccgccggcgtgggcgacgatcatcatcgactggacgatgcgcgacacgcgcttggtatgtgagaggagctggcccaacagatagatgagctaaccaatgccttactggtgcgggcgcaaaatgtgcgccacacaggctatgccaatgatcggattgggactctgacgggccacacgggcggacagtaggtcgatgctgatctgacgcgcagacagcaccatcatgtcctccagggcctgggtctcggcgaggtcctccaccagcaggaccaagacgctgttaccggctgccaggggct

SEQ ID NO: 56151 - DNA, 1018 bp, Arabidopsis thaliana landsberg
  unsure (1)..(1018): unsure at all n locations
cctgtgagtgctacttttctcatatcaaattaccaacatatttttactgatggacttcttgcttcttccttcttgttgtgaataggtcgctctgcggtctctaaatttaggaatatgcccaaaattgagtgtgctcaatatcgaagcaccttatatggtgtcccttgaattgaaaggctgcggtgcactgtctgaagcatccattatgtgtcctttattaacatctttagatgcgtctttctgcaggtaattatttgtttttttttttgtttttttctctatttatgtgactgatattatcgtgctgctaatcattttcccccattccagtcaactgagggatgactgtctgtctgcaaccactgcttcttgcccactcattgagtcattggtgctaatgtcatgcccgtctattggctctgatggcttgtcttccttgaacgggctcccaaatttgactgttcttgatttatcgtacactttcttgatgaatttggaacccgtcttcaagtcctgtattcaacttaaggtaattaaggcattaagacttgtatgatgctggatgtttccctttccgtcagcagtagagcatatacattatcttgccaatgaaaacttcttgagttatgttgttgtgtgcattctttgtatatcagctattcatgattcatattgcttttgggcttactttgagactttttattgtttaggtactcaaattacaagcctgtaagtatcttactgactcatcattggagcctctatacaaagaaggtgctttaccggcacttgaggagttggacctgtcatatggaactctctgtcagactgcgatagatgatctacttgcgtgctgcacacacttgacccatttgagcttgaacggatgtgtaaacatgcatgacctgnattggggttcaaccagtgtacatctttttgattactttggggtctacagttctagtgacaatacccaggaaccagctgaaacagccaatcggttactgcaaaacctaaa

SEQ ID NO: 56152 - DNA, 1042 bp, Arabidopsis thaliana landsberg
aacttaagccctcaacggtaacaaccctaaaacattttttttttgcatgtgatcaatgtacaaagttgtttattctgggtgatgatgatgaacgaggagaagaaggagattgattggggagagtctgaggaatctttctaaaaacatgtttcctgcaacgttggaagatgctgtagtatatcagatcaaactgaacaccagctctctctctgttcactatgaacattatgtgatctgcttccactatcttataatacctgcaacaacaaggtattcagattttctcaatccatcaacgtcattagttcatatatgattcacttaccagatcccgggttgtaatgtttgacattccgaatcgctccttatgaaccggctcggatgctcaacaggtagcctcggatgtgtcattgatattgtgttcaatgccccgtcgttctcttgccagtcctcatcccttcattcaaacatgttttcttagaccaatgcagcaagggcttcaaaaatcaatgttaaatttttgagtgtttttgagtacctgtagcctttataaggaggagagacatcttgtgggaatttccattggctcatctgaaagacgcggaggaagagcatcgggtggattccaagaacacctgaagggattgtcatacccatgactctgcgggtgcgtttagtcgcgtagctgaagtagtaagtgtttgggaacgtctggagattggagttaatacttgttgagccttggattgtgagatcaggtaagatccaatcgccagaagcaaaaggacctgcgtttcccattaggcaatcaacgagacctctcacaccggtcttcttccaagaaatgttgaagtgatcgaacccgaaattgtaataagtctttagccatgaaatgtccaaccaatcgtacattatcacgcctatacgacacagctgcaacaaacatatcggtttcatgctcactccatcatctgtcctgtaacagccaccattagaatcaacaattaggataaaagatcttggttttctaatacaggaacat

SEQ ID NO: 56153 - DNA, 301 bp, Arabidopsis thaliana landsberg
tttttctgtttttttaccaacatggaccatccgggggacaggggaaatattaattaagtaggcccccaataccgattaatgactccatatcattccattttacggtcacttccaaattcaagtagattaaccggatgcctatttgaaattttcgccttatctctatcttacaggacagttccgacttttatgatttactaattcatgaagcagtgacgtttacaaaaaaactatcccatctccatgacttaaaatgattgcctcgaatatttgattctaccaccattatctgtacaaaaag

SEQ ID NO: 56154 - DNA, 1522 bp, Arabidopsis thaliana landsberg
  unsure (1)..(1522): unsure at all n locations
gaagatcagtctttgaagaaagaagaatcttcttcttccaaggagtttcagtttctatcgagagtttttgaagagaatgtgaagttgaaggaatactatgagaagaacactgggaatggagagttttggtgtttggtttgtggtggcattggagagaaaagttgtaggaagttcaagagctgcttagctttaattcagcattcacttactattcacaagacggatttgaaaattcagcatagagctctcgcacaagttgtctgcaatgttcttggctgggacgttaacaatccagttgtttctagccaaaaagattctcaggttagtttcgatgccttgaaagaagttagctttcaactattgtagtctatggtttcgaaaaagatgattgatttgcttgtgggaattcaattaagggccgggttatagtttgatagttcaggttactatctggttataatgatcaaagacaagcttatcagtttatttatgttgttctgagggaaggttttgatctgattaaagatgaatttgctggatcattgtgattcttgggaggtttcttgaataattctggtcattcagaaatacttaacttttttttttgttattgctcttgatagacggttgtggaaggtgcatctgagccgccttcagactcgaagattcctcaggagaaacaacaggtcatgtcggttgaagaacacgcaaaggctgcggtgttacaaatgcaacagaatgcatcagaagctttgaaagacatttttgtcaaggatggtactggtgcagctgatggaactgaggagaacggtgatgagaatctgtctgaggagttggagttaatatctaaagtcttctccgagaatgttgagctcaagagttactatgagaaaaactatgaaggtggagcttttatctgtctggtgtgttgtgctgcgactgataagaagatgttaaaaagattcaaacactgttatggagttgttcaacattgtactaaagtaccaaaaatgaaaatacgagctcacaaggttttcgctcagtttgtctgtgaactacttggctgggattttgagcttctaccacgtagagtaatgaaaggcgttgcttctcttgctatatctaatgctaacgagaacaatgagaacacatcatccatggtcgaggtgagaaagcataccaagagaacaagcactctcttatatcttgttatttcacaaattaaattgtgtgaatcatttcaggaacatatgtgcgaagataaagctggtaacccacaggacaacaatgaggctgaggcatgcgttggttagtgtacatgtctacatgattacatctaatttcagtttttgatatagaaccttggttagtgctttcagacattttaagctgcttgatgatttttttaaaagtttgatgcaattaaccagtatatatgttttgtctacgccgcagaggcttaatcatattgttcccctctacgtatcaattgaagagcanagaccaagaggcacaaagtatg

SEQ ID NO: 56155 - DNA, 597 bp, Arabidopsis thaliana landsberg
  unsure (1)..(597): unsure at all n locations
gtttacacctctcaaggctttatttgaatggacccagtcacagtctcactcattttatatatgactaagagttaaaaatcttattggagtacgattatacgaaactgacccaccatgggttccactggttcagtaatcgttttgtatgggtcatgactcaacccgctacacagtccaaacagcacgggtcatgacccgaccatggactgttggatatgtttttttactttcatgtcgcatcgttaaattacgtattgtttcgtttggacagataagaaatgacaaatatacaggatatatgtcttatttatagggattgccgtaaaatgttattatgattattgagataaagcgtataatcgatccacacacgtactaatgaccctagataatgtagacatatcacgtgatgaaaagcgcgttacgtggtctttttatatttggacccatctctaattgccttttaactattcttcaatttatatatcctccatcgtcagttgtcactaaaaaaattacgtgattcaacacagctcatcatattccaaacttgcttagaaatcataaactntttacgcttctgtttttaatcttata

SEQ ID NO: 56156 - DNA, 857 bp, Arabidopsis thaliana landsberg
aattaatctctttttagtcatatttatttatcttaaactcttacacaaaatgttcaacgaaaaacaaataaataaaataaaccatgtaccattgatttggattaaatatcaaagtccagtttttagtggcagttgtataataaaagattgatgattagtagtagatctaattattaattaattgctatgattatcggtttgatgggtcgtcctcgtgtcaccgtaccaaatcaagtaaatgaaactcttgcttacgagagaataaataagtttagtagctaactgcggaactgattgacactgttccacttttcaagatataaaacaaacccaaaatttatagaatattaataacaaacatgcaccaaacttaatttggatcgatgtccgtcggtaattattattaaaatcttaagttaagcattgtcaggtttatggtcaacatctgcaagttgaattagtcggtattaatctctcttggcaatatttgtgagatttactgaaaagttaaaaactaccatccacaaaatgtttaaatagaagataggagaaccaaaaaatctgattaaacgaaaactatcttatgaaatatttttcttcccaaatcgggattattttaaccaatatagtataatttaatggtctttgctaatgtagtgaaatatatcactatctagatttaaatccacataataccatattgttggacaaagaaaaatggaagatgttctcactcgatctagggtcaaaaactcaaaaatgattgttttttttttatgtatcctcacgtttgagactattaataagtttttgtttcactcgcatatttatttgttttgtgtgtaagtttgtcgttt

SEQ ID NO: 56157 - DNA, 1057 bp, Arabidopsis thaliana landsberg
  unsure (1)..(1057): unsure at all n locations
agcccctaagggtcattactctgtcaggatcttctttggactcgttgatcaacctagttttgataaagaacctctctttgacatggctattgaaggcactcagatttcttctcttaaatctggttggagtagtcaagatgatcaagttttcgctgaagctctcatttttctttcgggtgggactgctactatctgttttcatagtactggtcatggcgatcctgcgattttgagtatcgagnnnnnnnnnnnnnnnnnnnnnnnnnnnngctttggtgaaggttggggtcaaggagtgattttaagaactgccactaggttgacttgtggtactgggaagtctaggtttgatgaggattatagaggggatcattggggtggtgataggttttggaatcgtatgagatcttttggtaagagtgctgattctcctagatcaactgaggaaactattaagaaggcttcagtttcaccaaatttttatccagaaggactttatcagtctgcgttggttagtactgacgaccaacctgatttaacgtatagcttggatgtggaacccaacagaaattactctgtatggttgcactttgcagagattgataatactatcactgctgaaggaaaaagggtgtttgatgttgtgataaatggagatactttctttgaagatgtggatatcataaagatgagtggtggtcgttatgcagcacttgttcttaatgcaacagtgactgtgagtggaagaaccttaactgtcgttctacaacccaaggcaggtggtcatgctattatcaatgccattgaggtctttgaaatcataaccgcggagtttaaaacattacgggatgaaggtacacattctttcatggacactttttaatgttgtattttcaccgctcttcgtttcctgcatagattcatataaagtttggttacttgaaaacgagacatgtgtgcctcttgttgtcagctgtctttctactgttgtagaatggtatctggtttatatgtaatgtgtgattcaagtaaatcttattcgtatttgtgctaatct

SEQ ID NO: 56158 - DNA, 1240 bp, Arabidopsis thaliana landsberg
tgtttaagatgtatttgtcaattccgatattcagcacaagaactagacccaacccgaaaaacttttagtaacttttactatttgatttgatacttaaatttactgatgccttgcttgaactgtcttacaaaaatcaaaactttatcctcatgcctcagttcaagtcaaacatattaaaacttttttctttttattagcattagtgacaaaaagagacaaaataacattcaacatagtttttaaaaaactaaacaacaacaattaaactgaaacactaataatagtttagtactattgtcaacaaaatagaactaaatcattttgtttgacaaccaaagggaagaggttaagcactaaataacattaatagataattaattgctgctcataagtcataactgttaagaacagctagttactgacgatataactccagttatgtgttgtgatcatttggcccggtcctggattttatcaaatcccatctcggttgggtcggtggcttgaagctcgtagtgaacaccatccaacactcttctcagtccgctcttcgacgtcgcgtacatcatcttctcccttatccttgaagcctccggcgacctattccaataacaaccacattatggattgattaagtttcagtggttttactagtttttcgacttaagatataaagtaaaccattttttaaccaaacagaatcaattatcttgattggttttattcggttatttgatcaaaccggccttgggttaaaaagcctgggcttaggacatccaaatgaccattttatcctttgatgatcatcgagtgagacgatagaactatatggtgggaaaagggtaaaatcgacaattcgagaaatcgaaaagacaagagatagtgacactaaccaagttatgaagaagatcttgctcatacgacagttatcgacggtgacgtaatcgaaatcaaacacggcgtaacgacagtcatcctccggcaaagaagcagcgagatcgtcgtagctctcgccggcggcaccaaccttgtcgacggtgactttccgagacttctcctcgagtttgtaaacgacgtatctatgcactttcttccatttcatctccatgaacgatttcttgcaatcatccgtcatccacataccactcgtcgcctatataccaatcatccaaaatattttcttttagattcattaaatcgaaagtggaaaaaatagaaaacgcttgtatattgttaccgt

SEQ ID NO: 56159 - DNA, 769 bp, Arabidopsis thaliana landsberg
agaacgttctgaagactttgcagagtttaccttcatcaatcctttctttcttgaaagtctcattctttatgtgggtcttggtgtttgtctaattatctacactctggactctttgttttagcttaggaattccaaattgattcccgcatatgaaatctcgagtgaacgttagtatagttggtgtataagtataccatctctctgattgagctgttactgcggatgctaggacatttttaagatttagataagtgggaataaagagcatgcttatatgatcgcttctagctgattatgttacatatataaatgaggctcatttcagcttgcagagtatagaatccaaccttggtgtcactcaacattgttttctgattctaggtggcttgttgatcgtatggtcgaacttgggttttcaagatcattatccgagtggattggcagcaatctcaagagatctggagactcagagacatggacctttaaccttgacggagctgtccaaatgttcaactcttacaggtttatttcccttcctaagaaccaatgactatgattatattatgaaccttcctcgagattttgactttttactttcctactgcagagagacttcttactggtctttgctagagaacccgccaaaagagacagagataaattttgtgattgcagaaaagagtgaccgatgggacaacgatacaaccaagcggcttgaaacaatagctaaccagagacagaatgtagccgaagggaaggttgcgactca

SEQ ID NO: 56160 - DNA, 1114 bp, Arabidopsis thaliana landsberg
ttggaatgatccagccttagtccatcatcacaattcacacataacaatttaactcacaaaacccaacaagaactatagaagcaaagatttacactttcggatagccaagacccggtctttgaacctctggttgcgcttcttcataatcgcgtgcagatcggattgattcctcaaagtcagtcgagtcactcgccacaggaaggaagcttccaatgtcatctttagcaccaaaccctccagctcttatcacatcttctgctgatatagaagcttccatgttcacttcaccatgaggctgatctctaccatcttgactcatatcattctcattagtagcactgtgactttgcctctcttcgatcttggaccctcccggagataataccctcggctcttttactttacctgcacctttctcggaatgattaattaaactattcatagaatcgagtaaaactaaagtcgaagaagaggatttgtaccatttgagacatctaacgccgcaatttgctccatttagtaagtgaatttgattctccgagaatctaggaactacacgaaaaatcgagcaaagatgtttaaagatcgcttaccctatgtgagagagaagatagaacaaagtatgtttctttcttgttttggggaaagtttttgggatggagactcagtgtgacgtggcgtcttcgtagccgttacagttacacgtgttccctgcagtttcaacttcgtgtcaaaactgacaatcttattaaaatatttaaaagcctaattattaaatttcaaaaccctaattatttaatattggaatttaatttgtatcggaaaaaaggattctgatcgaaagtcgcttaaggaaactatgtaaactttactttagccaaaacaaaaagatattgtacattatccattagaaacttgttgacaaaaggaatatacattagaaatttctaggttacttgctcaacaattaatccacactcgaaaactattagtcgacaagaaaacattggagatatctcaagacatcgtcaacgaacagagacttccagttgcgtgaatctgcaatagcgaacacgactttatcaagaacctcttcattaaaacttggcttgac

SEQ ID NO: 56161 - DNA, 136 bp, Arabidopsis thaliana landsberg
ttttccattttttatactatccacaagaaaacagggggaagggagaattttaattatggaggcacccaatcatggacgcaaatacgcttacgaaccaagctcacgacaatttccgactaaccaagctcaaagacta

SEQ ID NO: 56162 - DNA, 825 bp, Arabidopsis thaliana landsberg
ttcgctaactcactggctacaaactgtagctaaaaccggatcatcattctgaagaatccttaagaagtgttgcagattctggtattcctccaacaatcaacggttgcatccacgcttgaccacttcctctctttgcatacataacacatcctttcgatactgaccccgctacagctttcgtcttcatagcttggttacaaccattacttaaacattctttcttaaccggataattaggacatcctagaacacccaaaagaactttaccattctctatcaaagctaaagcaacagcatactgatccccacgaacaaaccctaacgttccatcaacaggatcaagcacccaatgccttcctttaggacctccaacagagttacatctactaatagccttaagaatttcactagaccccaatggcttaactggcttcggaagcccgtatttggaagcttcggataacgcttcattaaccgcattcgatacagctcctaaaagacctaaagaatcagcctcagagagtgtctcagtgtcttcttcagcaacaattgaaaggttttgatcaccaaacacttcagctaaaacccagctcacaattgcttgtacaccaaaatctgtcaagagaatcaacaaaagtttaaaactttgatacactattgaactactaatacagagaatcatttgaagtgatgaaaagttgcaagattttgtattttaatacacattttgtttcatctatcaacgaattaaagcacatgattattcgattacacaatccaacatcaaaaattcgttttttatttatttaacacaaacagatctca

SEQ ID NO: 56163 - DNA, 576 bp, Arabidopsis thaliana landsberg
aaatctagtaaaacggtggcgggagacggaacggagaacggttatgaaaacggtcagccagtcagaaactgttgcgtgcctctccgtgcgaaaacaaatcccccgttagcgagctggtgtctgacctcttcaatttgggggtgggagcttgacaaggtcaactcacatcacacccttcacctcaacatggagaatgtttgcgcataaaacagctgagaggaattaccatcttattaatagggcgattactcgtgtttcgtttataatcgcaacaagtcgtcccagtactcccagttaaagttgttatcgtcaatcaaccccagaccaccgagatccccgacatcaggtgcaggtgcctgcatattttgctcaagctcatcatcatgcctcttactccaaagcaattgaatgaaagatggcggaactccctgatccagtgatagttcccttctgtgtgcctcccaagcctgaagagtcaggtcaccaagcgccctgaacagagcattctcagtgtctatcacctcagggtgttcggtgtaaaggtcctcgaccagctgccatgcttgcatcacctgc

SEQ ID NO: 56164 - DNA, 785 bp, Arabidopsis thaliana landsberg
gtcaggatcgatgtagagcacccagtagtctccggtgacgggaatgattgggaggaaaggagggacatagaacttgactttgagcttggcttcgtcgcttttaggatcggccttataggcgctgccttcgataaaacccctcttcccgttgctccacgtttcgttcaagacgtgtatggtaccgtcggggttaagggtgtaggtggcgcgagtgtcgacgccgttctttggctgaaaccttgatgggaaagaagcaatctcgtaccaacggcccatgtatctctccacgttgagccctttcaccacttccatctctttcttctctgtcatttctcttctttttcttttcttcttctctaagatttcgatgttttctttgaggtaaaaggataagaagagattctgttctttataaggaaataaaaaaataatatcaaggagatttcgctgggacgagaggatgccacgtggaaagcgtgtagggcaagggttctagtagcgtctagcagttacaaatgtgaataaaggtggaggacacaaatgtcttccttgttctgtgggaagaagatacaatacaatgggccatacagtcacattttgatttgacttcctctagccgtttctaggccccaccaaattatcctatggacatctaaatatctcttcttgttgacacttcaaaatagctccatatgtaaaccaacgatctcaattaggcccattactattcgtatattggttttgaaaaaaaacgctattacagaaactttataaaataaattttt

SEQ ID NO: 56165 - DNA, 1039 bp, Arabidopsis thaliana landsberg
catcttttcttttgtttttgttgttggggattaatgtaccatgttattcataaagaagtttatgactggtttggtgtaagttttgacaagtttgggcgaacttcaactccagaacagactgaggtgtgccaagcaattttcaacaagttgtgggacaacaagtggctttcagagaacaccatgcagcaggtgaatgcttttactccaatgccagttagacttatttgatcgcaagtgcatacatatgttcttcgtaagtaaaagagtctacaccactcagttagcggggttttaactctcatgtctttgtggcccattgtatcttcagctttactgcgatacatgcaagaagttcttagctgaccggcttgttgagggttcttgtccgttcgaaggatgtaattatgattctgctcgtggagatcagtgcgaaaaatgtggaaagctcctgaatcctactgaacttaaagatccgaagtgcaaggtgggctatgcttctcttcttcatggccatcatcccattaagggattgtatttgtgtggttttatactgtttatagcaatacattacagtattcgtaaagtctctctgggacattgcatgcttcttcacgcctgtacaaattcccgttcacaaaaaagatcttgggtaccttctattgtagagatatcaatataacttaaatgtggaaacatgaggcgcaattgcactagttaacaagtgaagacagttattatgcagttctagtgttgtggccgtacagatttattgcatatgcttgtaatatattactggtaatggctagctgattttgtttgtctggagcatactttgtttttctggttcacagagttcactgtataggccattgtgtttgttgatatagctttctacagaggtgcaagactatgtttgtaattactgtgaatactaatgatttatcttttcaaacaggtctgtcaaaacacaccccgaattcgcgacacagaccacctgtttattgagcttccgttactgaaagataggttggaagcgtat

SEQ ID NO: 56166 - DNA, 203 bp, Arabidopsis thaliana landsberg
  unsure (1)..(203): unsure at all n locations
gagcacaacggcaagcgcgaggggatagccgaagcttgttttgagcgacagggggacaaaaaacgaaggcgaaggaaacatagggcgagggatcaagcgtcaccgcgaacgaacgacaaaaggagcagcaggagcacgagcacgcgggaagagacangaagccaggagaaagcacgaggaaaagagaaaaaggaggaggcaga

SEQ ID NO: 56167 - DNA, 1215 bp, Arabidopsis thaliana landsberg
gaactcgatagcatgtcttttgaattcccagaccaagatctccagaggaaagtatatatttcaacatcccataagcttgccaccttttcactggattgttttgaagctcatcaacaacacttcctaaagccgcaatagccgcctctgcaacctcatgggagatctttgcacagatgaataaaagcgatgcacccaagctgatgtcagggaaagaggtgataaactcatcatcatctgttcattttacaaccatgagacatgtgatacgagaacagatgcgtgttattgagaaatcaggaagaagtgtttttgagtattgagagtaacctccagcaaccgtgctcattaatttttcagtgtcattccccgtgattaaaccaagatgtgttaaaccacaggatgtcaagaactgttctaactgaatcaccagaggaatacaagaggccgctttgtctctgatgctaactgaaataatagcctgcaaaaccagaccaaatctaaggtattgaagaaaatctatatgctcataataaaagagaaaagtcagaaaagttccatgatatcgaaacaaagttggaatcaagtacaaaccgttatctgtatcacatagagacaaagtagacaacggacttttgcttcttcttcgttattctgtaaaacaaagaaaagagatcaaatcaggcaaaacgaatattcaaattagagaatttacactttgggtagtgatttagggaatcctaattgccaatttatcaaacttacagaccagttttgaagaaacgtctcgaattgaagaggcaatgcctagagccttatcaaataaatcttcaacttgcacgtctgtttccaatgaaatgtccttcaaaacgttcaggacaattggaactgcaacctttaattgctcgtagtgacgcctctggatcaaaataaatactgaaaccaggaaatttgaataactttttactgctttagtttacgaagactaaattaatatcttcagttacaaaactagttagggatttaaacacaaactttaggatattcatacttaagttcaatctaagccagagtattactaaaattgcaggtgccaagctaaaattcactttcatgagagaagtctataaattttaggattttcatacttgggtcaatcatagcacgagttttctaaaactgcggtggcaggtaaaattcactttatgagtgagtttt

SEQ ID NO: 56168 - DNA, 1017 bp, Arabidopsis thaliana landsberg
tcatcaagaacaaaacctgcacgtctctctggcctgaatagttcttcttgtaaaaagtctggacccctgtattctaacaagaggaaagtgtctcttctaacaacctaggctagccattcttcatcccctcatatccgttaaaccagtaacgttctacataagccggctgaggatcactgagtgtagagaagactaaaaaaaccacatgtatttacaccatcttgcttcagttgtatacccattccaactcacagacagtgttacagtgcaaatgagaacaccggaaactgaatcacagcaagaaaggtaacaacatctagatgataccacaacagaagtgctatacatacacacagccaagcaatggccaagttcaaaactttttcgaacgatagagcagagtgttcctttacatcagtcattggaatgtccacaataatcagccactgaattgtctcggccatggcaaaatcacagaacttccgtttgatatctgatttactatcacttatcttcctggtcttagaaggttaaagcaaattgaatactaacctttattttaaaaaccatcaccaccgagctcatccggttgccaaattttactgttctttgaagtttcttcctcttccatattcttagttcttccagatgcattctcagttgagttcttattttctccatcaatttccattaaactcccttgttcttcaattttaatacgagggtcttgttggaacctcacagcatcagggtcattctctacattagtaggtgcacaaccatcattgttaaaagatggtctaaaagagctgctggtaccatcatgtctataaccaaatcgtcttctctcagcattaacatcaacaccaaatcgttcagaatgaatttgaccttcaaagaaatcatcactatagtcaaccctttctagaggatccaagttattcatgtttccatggtttctatggacaacatgatcagatggtctcctaaatgagttgccatctcttccataacctc

SEQ ID NO: 56169 - DNA, 254 bp, Arabidopsis thaliana landsberg
tttttaattttgaataccaacagagaaaacacaggggacagggaagattaaatcttactaggcccccagacaccaagagaaataacgtaaacctcccaactacaccacaattacttggccacctcgaacaaccggatgcacaattgcatacaccacctcaaaatcttacataataatcacatacaaattaaaagatctacatacacctttgcaaatacttttttctactaaaccatccaaacctcatcctaaaa

SEQ ID NO: 56170 - DNA, 433 bp, Arabidopsis thaliana landsberg
  unsure (1)..(433): unsure at all n locations
tgtattaaactgtagaatatgaaatagaaatcttcgtatattggatttaactacaaaggaaannatangattgacgtcgtgactaaccctgggagacatgtcattttttgactaggacggcgcatcacacacacgtggcatcataatcataacctccgttgatgagacatcaaaagtcttaactgctttaggaaaattcatctatggtacttgatctaatctaagttacaaaaataagagaccttcgaagaaaaaatgttgagaaattatgtgaacccaaaatcgatctccaagcctaatataacaacatcatgtatttactctttttatctcaaggtatatattctgatattcctacgttttcatgaaatagattaactatttatatataccaagaattttggagaatgtttccttaatatgcacagaggaa

SEQ ID NO: 56171 - DNA, 984 bp, Arabidopsis thaliana landsberg
ttttcactaatcttgtaataatcctgactctgatgtaaatatcaaagcgaaggatgtcaatacagcataccgttagttagagtaggtactaaagataaagatttagattagtgaggatcatctatcaaaaatcagaaactttgtgaagaacaactaatgaatgaccgaaccgttggtacgagaagtaaaagaaaacggaagaaagatcaagcagagctattgtagggaatcattttaaagtgtactataatacacaaatatcgataactcaattggtaaagactcttgcacaaagcgtaaatctcaccagttcgagtgatacttgagaaggtcgatataaaatgttatagtcctgacctaatgtgggcatagatgtacaacctattagtcattcacaaaaaaaaaaaggcctaaagaaaagagttatcaaggtagtgaaattttgtaaggagagacttattgcatgccaacgatatatattagtcattattaaaataaaaagtgatctgactaatcaaccttgagctggaaaagtcagaatgagataagaaaggataaaggaagttggtcatcacaataattagaatttactcgatggaatttgaatttgggacataacacgagggattggccgaggaaaactacattttatcgagacatcaacgttgattttgtacgcgacgatcatttaccatgaagtatgcaaaatgtggccgagaaattctcgagtaagctgtctgatcaatcgctgagaggttggtccatcgcttcatgtaagctgtcttgctggtttatccgcattttatggttggttcatccgcatttaatggctagaaagctgcctcgctcgaccaagcaggtgggtaaggcggacagtttcctacttatgattgtggtaaacttacctggcagcatatatatgcttcctcgtaaattaactgatgttagtcgcattgttaagcaactatatatagtgatgaatcg

SEQ ID NO: 56172 - DNA, 453 bp, Arabidopsis thaliana landsberg
catgcttacataaaaccaagaagatctttgttggaggcttgccacctactttgactgatgaagagttttttctttactttgaagtttatggccctgtgactgatgttgcaatcatgtatgaccaggctaccaaccgtcctcgtgggtttggatttgtttccttcgactctgaagatgcggtagacagtgttttgcacaagactttccatgatttgagcggtaaacaagttgaagtaaagcgtgctcttcctaaagatgccaatcctggaggtggtggacgatcaatgggtggtggtggctctggtggttaccaaggttatggtggcaatgaaagcagttatgatggacgtatggattccaataagtttttgcagcatcaaagtgttggaaattgtttaccaacttatggttcttctggttattgcgctggctatgggaatggtagtaatgggg

SEQ ID NO: 56173 - DNA, 1309 bp, Arabidopsis thaliana landsberg
acattgattccagtggagaagagtgcttcaaggatgccatgagggatatctgtaagtatgccaacatcgttgatggtgagatgaccatagtagccaactagccatatttctccaaaaaaccgttgaatgcagccgtgcagggacggacgagactagcattaaagctaggagcattaatccttctccatactttaaaaccaacctaacggaaaataatattgagaaagcaaaatatatagatagggttgaaaatgggcttcgttataatgggcctagactttggttgatttcggttcaactttaatttttgccttaattgaatattgaagaagtgactgttggataactcccttaagtcttaagatgcaagaaaagaagctgaattgattcaccaaatacacataataaagtttcaatctgtttcttcttttagggtttgggagatttttaatcggagatctcgaaaagatgatagatttcagtcgaatccagaaagagcttcaggactgcgagagaaaccaggattcttcgggtatccgggtctgccccaaatccgataacctcacccgactcaccggaaccattcctggtccaatcggtactccttacgaaggcggtacatttcagatcgatatcactatgccaggttctaaccaaattcttctactttttttactttggggattatggtgttgattgaagttaggggctttacttgtttttgctttgattggttagggcgttttgaaattacatgtgtgggtattctagttccacttgactgattgtgaattggtgtagaaagttccgatttttagggtttattggtgttttcgattcgtgttgtgttgtgctcatgattaagcgtgtttttcgattgcagatgggtatccatttgagcctccaaagatgcagttttcaactaaagtttggtaaggaagatgatgactctgattcttatgttcatcactgcaaacttattatgtatctgtagttttcgagattgtttatgtgaaacaacttaagcctagtattatcataacataagaactggttatatatctatcgtggagcttaaatcagtgttttgtactactatttcatgggatgaatgttttggtagtgtgtatttgtttgatgatctctatatatggtgaaaagttttaatcttcgttgaagttgttttacggttctctttaactttctcttgatagacattttaccatttatgacaatatcttagaaactgcattgtgcgctaataaggagtttatttctgttgattgatctgatcaaaatcaaaagcaac

SEQ ID NO: 56174 - DNA, 547 bp, Arabidopsis thaliana landsberg
ggctgacgcccgacaccatccgcgccttcatcgagcagctggagctgccggctgacgccaaggcgcgtttgctggcgctcacgccggccacctacaccggcatcgccgccgaactggccaaagccatctgatgagcaccacacccgccatcgaagtgaccgccaccccgggccagcgcctgggtatgccggcggacgtttttttgcgcgactactggcaaaaacgcccactgctgatccgcgccgccttccccggtttcgagctgccgttgcaaccggacgacctcggcggactggcctgcgaggatggcgcgctgtcgcgcctgatcgaacacgatcgcgccaacgatcaatggacggtgcaccacggcccgctcgacgaagacctgttcgcgcgcctgcccgaccgcgactggaccgtgctggtgcaggacgtggacaagtgggacgccgacgtcgcccggctgttgaaagactttcgctttctgcccagctggcgcgtcgacgacgtgatgatcagctacgccgaggatgccggcggtgtcggc

SEQ ID NO: 56175 - DNA, 282 bp, Arabidopsis thaliana landsberg
gattatatatttttgattaccaacacctaaaacccacgggacaggttaaataatactttactaggcccccatacacgaaggaaaacacgccatcattccatctacacacctctccctagaccaccttgcataaccggatacacaatttcatttaccactctaactctttcattatactcagttaaaacttacaatatctacatacacttttgtaaatgacgtttccttataaactatacaatttccagccctcaatgtaatgccctaaacatcttctacttc

SEQ ID NO: 56176 - DNA, 557 bp, Arabidopsis thaliana landsberg
ctgatgcgtgtctgtgcaccatgtgtgtgtgtgatgtctgtgaagccagaacagggtatcagagcgcctggaactggagttatagatggctgtgagccaccacataaggactgagagtggaattccagccctctggaagagcaggcagtgctcccagccactgaggtatgaactggaaatgatgatcaactatagcaaaacaaacagcaaacaaaaccaaaagtgtaaaaccttgaagagcatgattccatggctctgctaagttcatacacacaggaaagatcacaccagctggacccaagctgtgccgatttcatgttggtcagtccttagctttccttgtaaccaggagccacttattaagtttgaaaactgagcatcaatatgtctgcactatgggtgtctgaacacataatctcagccccatggggttcacatagcagccagtgagattaagtctgcagggagcagatgatatgtgctgtgtttctcctgtctggatgaccactcaaatgagaagacagtctagagcgttcactaaggtttgcatcagcaca

SEQ ID NO: 56177 - DNA, 986 bp, Arabidopsis thaliana landsberg
gttttttaggttattggtaattctcttcaagcaatttataagcaatggcttagtctgatgtcacacaatagattagtaggtagcttctgaataatgtttagtttagtacacgaacaacagttggtatcaatctcctaatctttaaataagcttgtaaatacagttgttgtcaatacattagatgtgctgcactttgtgtattatgctaaaatcctagggactagtattgatgttttgtattgaacaatttttcctaggctgtcactagagtaaagccgtatatttgcacaatgccactgaagatggacgagggatggaatcaaatccagcttaacttagcggatcttactaggagagcttatgggactaattatgctgagacattgcgagttcagattcatgctaactgccgccttaggcgcatatattttgctgatcgtctctactctgaagaggagcttcctccggaattcaagctgtatctcccagtgcaggtttggatttcactgtttagttactatcttctccttttctcgttcactttgtttacttacaaagcatgctctttttcttattgcagaaagcatgataagttcattccgaatgctgctgccgttgtcgtggtatacaggaaatctactgtttaagtgttgactaattcagatagagcaagagcgtgatagttttagtgtcgcttgtagcatcccatggaacttggagtttgccataccttgggcatgctttaactttgttgtgttaaactcttcctgtaatgggattatatagtctcttaagattttcaatgaatattgtacatgatcttgggtcaatgcagacaagtaacatacatgcttttgagtcacatgatgacacccttgtatttaactgaattgcggaaataatcgttctagctagttgcagaacaatgtaaggtaatccaaagggaacgccaatttcaatttatttgagtggaaaaatatcggcaa

SEQ ID NO: 56178 - DNA, 575 bp, Arabidopsis thaliana landsberg
cctttgccgatagtgacgcccattaccagtgtggcgccggcatatacgatcacattgtcaccgatctcgattctgcgtgtggggatattgcccttctccttcggatgtccgtgtgcgattaggttctggtatccttcggccctatctgtagaaaccggttcgtgtgcaaaatcgataacgctcacattatgactgatcagcacattgctgcctacctgaacacgttcgcccgaccagatccttgatccttcgcccacaaaagaatatgaaccaatgtggatctcgcccccgtaggacaccacgagcaactcgccacggatgaaactgttactgtctatccgtatcgcatttttttttcggctgatattgacaacacgcgcatcgttgccgaaagaaacattgcttccacaggtagtgatcttcctgaagagaaaggtcttgacgaacgattttatttttgaaggccaggaaataaatgtatagatcatacgagattgtttggtaaatacgttatcgccttcctattttttttaagcgatgcaccgcgccgagaacggaacttataaaccaaattt

SEQ ID NO: 56179 - DNA, 890 bp, Arabidopsis thaliana landsberg
  unsure (1)..(890): unsure at all n locations
agtttccaagtcaaacatcgtaactactgtttgattttccctcatgcttgcagttttcatggatatctcaagatttgtcttcttgcactttccaagtcaaacataaagtaactactgattgatattccctcgtgtattaccctctttcaaatgacacaattgggcccaagtagaggaatttcatagtgaattcaaaagattaactgtattccaccgtcgtattttgataacatttagttattccttttcttttttttcttctgcaacagtttttttttaatacatttagtgttggtttggttcaatgaaatattatatgttacttctttttttggaaataaattattcattctttctactataaaaggaattgttcatgcttttttgatacaatagtataccatttcaaaagataccatagaccagttattacatgaatcgccaaaacaacactaaaatcagaaaatcagtatattttggtatagtctccaacatacaatcataaaacctctgtgaaatttaaaatctatatttgacatttcaaagtttaacaacatagttctaaataattacctaaattttaagtcaaatgtgaattatattttactcttcgatatcggttgttgacgattaaccatgcaaaaaagaaacattaattgcgaatgtaaataacaaaacatgtaactcttgtagatatacatgtatcgacatttaaacccgaatatatatgtatacctataatttctctgattttcacgctacctgccacgtacatgggtgataggtccaaactcacaagtaaaagtttacgtacagtgaattcgtctntttgggtataaacgtacatttaatttacacgtaagaaaggattactaattctttcatttatg

SEQ ID NO: 56180 - DNA, 554 bp, Arabidopsis thaliana landsberg
gtatgagcaaagtaacagcttgaagataaagaagccttaggtagcttactcgtttggaactgagcaggcacggattgaaatatcttcccaataacaactgataagatagtcatcaaagataaagcccccattgaacctaaaaggaccttgtcaagaaattcaaggtcaataacatcagcgttcaccgaataaataagtacaaaaggatcaaagagagtgagagagaaatattagaagaaaacgtaccagtgttttctcatactgcatggccaacaaagcagcaatgaaaaatgtctggccaaccgaaaacgacataagtgagatcacagaatttgggtaacataaaagaaatctaaaggtggtatgctacaaaatagcgccgacatgattagatagatatataccttgtctccaatctcagaaacaaatatgagtgagaaggcttgtgtgaagcctgactttgctactgctgctaaaactgacgatggtcctccttttacaaagtgataagagaaaataccaaaccacaactcactagtacaagcgctattgac

SEQ ID NO: 56181 - DNA, 904 bp, Arabidopsis thaliana landsberg
  unsure (1)..(904): unsure at all n locations
tgttgaaggaaggtctcaggcaccattgtttctattgaaattcttgggtgatatcttcttattactcagtacgcatttaaattaatcatcagagggattatatctacgcatgtttagtattggagccttaaggattacgttgaatccgataccttttattcctttagattattccaggtttggccaatgttcattggaccattaaatatattgacgcacatgtgacatgtctattgttgcatttagaggatagttgggtaaaggtatatatgcccatgaacaaacagaaaacggtaaacgagagtcactgatggttattcgatcgaactagatacctttaacaatggatgatatggcgtgttttgactacaactttagtaaagaaagtaggaaaatatgtgtgtataagttcaatgtaaggctaattatctccgttgtggaatggtctcttcaatcgttatgatagaaattgcatcttgcttggagagataacttgtggttttgccttgatgaggattcgtcatgttgaccttggaccactaaaaaatatcgaagatattctccttcatatgataagaaggattcaagagattatgatatatagtaaaacttttataaactaatactggacaaataaaaaaaaaatgttataaattatttatattttctagtttcgagtaggagtaatataaaaactaatacaattcgataagatagaaaaataattattttttgaaaattttaatgtaaatctaagtttctaataatataataaattaataattttataaactgcacatatataacacaaataaacatatgattttagtgttatttgtatttttttaagaaaattactgatattacatactttttggtgttatgtgttcgaactttanaatat

SEQ ID NO: 56182 - DNA, 2069 bp, Arabidopsis thaliana landsberg
  unsure (1)..(2069): unsure at all n locations
aataatttgcttgtacaacttaagatccaatttaatgtatatatgtcatgcatgtcaaatttcattattagtggacgggagctttattcatcttggcaataattttggttttaaagaactcgaccgtccccattgatgacatgcccaccttacgcgatttgtaggatgagaagattactttaaattcccccatttgtcaaccgtatggaaaccgtagaatttaaaactaaatttcgaaaaaagtctttgaatttaaaatatttattttatccttccttctcttcccaattcccatacactatatatataagagctcgtcactcttctttcagattcaaaacctcctgatttcattctttactactaataatcattttttgaaaaaaataaaaaagggacatggctttgccatcttcaacaccgttacaaaccaccggaaagaagacgatatcctcgccggaatataacttcccggtgatcgatttctccttaaacgatcggtcaaaactatcggagaagatcgtaaaagcctgtgaggttaatgggtttttcaaggtgataaaccatggagttaaaccggagataataaagagattcgagcatgaaggagaagagttctttaataaaccggaatcagataagctacgagccggtccggcgagtccgttcggttacggatgcaagaacatcgggttcaacggcgatttgggtgagcttgagtatcttcttctccacgcaaatccgacagctgtcgctgataaatctgaaactatatctcatgatgatcctttcaagttcaggtacgtatacatgtattactatttttttcgtacatattacaaatctttttagcatatgttttgtgtgtatatttattgattcttgaacctactttaatttcttgaatcatattataatagccataaaagaaatatattttaactttatgtcaaaaatttgagtaaaacaaaattaaacataaaggcttaagctaatgtatcaaccaaacaaatccatagtatgagttttggttaacaaattcatataaaccataagctcaatgaagcatgagaaaactgacaaccatttatatgtgtgtgtgtgtatgtgtggaaatggcaatcgttggttcttggttgcgtctacatattattattttttaaaaatatatattctatccatttctgtgtgtgtcacattgaaagttgacccaactgaaattgatgtggattgtgtgtgacaatgtgacttgtgagaaccctaaaaagagagggagagattgaaagtgagatgcaatgtcgaataatggataatgaccagaagacacggcttttaattattatcagtcttgttcctttattgtcattaaagttgctcatattgttttttccttttgttttaaaattagtacaaattataatcataccaacttaatgccggttcacctgatagtttgttgtgatcaataatctatactataatagttggactttgttattaggtcatagtagtatattggtatgtggttacaataacgatggcaaccatttttttctgtagataatactaaaatattaaaattgggaaagttggtttttgtaaccttgactgttacatggttgataaatcaaattctctttttaaaaaatccctaatttggtggcatataggttacgtataataaatatattttatctaattcttggtggaaatcgaactataaaatatcattcatgggctccatagtagttataattatttgaaaaattcagattaaacacacacatacgttacaaactaacataataattgaacagacttggtcaattagtggatactgtgcatgaacacagacaatactttgagacgtcgtcaaagaatcaaaattggagacgtcaacgagtaaagatttgacttgttattcctcttcgtcatttttaaaatgacaagttgtaaataaaaagcaggaatcatggggtcctcactttccgaacattcctcttgctcatgtcttttctttntctggtattgggcattaatcgnaataataataataatttgaaaatctt

SEQ ID NO: 56183 - DNA, 733 bp, Arabidopsis thaliana landsberg
ctaagagtattgtaaactgtacaagtgcattttctgaaaatcaaagttttcttggacatgactagagattctttgattagagtcttctggattttgattgacgttaagatatttttgatttagacatatactaaatcctaattaattaaaattatagatcgaaaacattatggtctcgtaaagtttagaaactatggacccacgaagaagtgtttggcgaataagcgaaggatttaatttagttttgggtatatagaaaacgaagtgtaaagaaaacgtaacgttatggctctttctaaattgggtttgttttaagtactcgtaaccactttcaacacattcactgtatctagtgtgttgtattatattgtttgagtcgtcatatgatgagattgtatatatataaagaaaagtcttggacctttttgatatggtgatccatcacatcaactacgtaatggtaatactaatgctctacgatagatgctatatttacctaagaaaaccgattttttaagaatgcactgaattttgctatcaatcagttaactattgataagtcatatttagatttttattttgtttcatttgtaaacagaaaatcacaagacgttggagacatcttggcttgctcctggcacctataaaaaaatgtatgtttgcaatatattagggacttattaaagtaggcccaatgggcttaagattccaccaaattagcttgacatacact

SEQ ID NO: 56184 - DNA, 669 bp, Arabidopsis thaliana landsberg
tttgagatcctcatttgctttcctgattcacccaacaacaactctagttcctggttctctgcttttagtttcttcatctccgataacttcccctctatctcctttagtcgactctgcaatgcctcgatctgctctttggatccgttcaaagccatctccaattgtagtttctctacctctaccatctctactttttcttccagttcagaaattctgcgaagcgaggttttgagttcatgctttagttggttaacgtgagcattagatttctctaactccttgttactctctgaatgttttcttccaggttcagaatgcggcaaagcagcgagcttttccatctcgagaaaatcatccatcaaaccaatatctactgaagtagccattgaacttttcccaataatcttctctgatggactctgcatttcattatcactaaaagaaactctcccggaatagtctgattggttatctatagaagatttgaggtcactggaattgtctgatctccgaaccatgactctcagattcctgcattccgcttcaagtttagtgaactttttgatcccttccaactgttgtttacttgcagactcagcagcctgagtgcttaagtccctctctatagctctaatcttgacctcctcagattttgaaagtagttgaagc

SEQ ID NO: 56185 - DNA, 1172 bp, Arabidopsis thaliana landsberg
tcctgatgatgtaaagcaaggttgaaattttgggcacaagctgtggcatgtactgtgtggttatgtacttgaagatgagatttggatttgatgaaccaaaagctgaggaatcaatggaggaggaagaagatggtgaaaccagacaatttgcaggagtgaaatctcttatgagactgacctgcttgaaaacaaccattgttgtagagctctttgctcacactgtatgtataaaaagattaatgatctaagaagattttgctaggacattgttgtaatggatgattaataagagagaaataaataaaactttgttctttattgatgtttcataagcattttgtggggttttgttacagaaaatgaggttcacagattcagacaagcatcttcttttccatggatggttttggataaacatgaaaggtaaagaataagtatagaaagtggttttcattctcagtctcagacatgtttgatgcgatgctttttgctttcctgtcctgcaccaaagcagtccacattatattattccttgtggtctccataagcatttccagagaaaatagttctgattcgtggccataaaagtgtaatagcaatttcacaagattctgttgctttctatgtttcacccatgagcttggaggagttattacaacctaactgcccctaagagtttggcaactgttgcagtccatgttctaactacagatgcatatgttcacatgccagatatcactttatttaatctctataactttcaacctattaattagtttcttgtccaaatccagagagggaaggtgagatcattaggagctcgtacgaaaactcacctttgacatatatgttcaagcagatgccaatagcttgacgatatccttctgcgaaaagaagaacgagaaaactacagagtaagctcctttaatgattagagaaatgtatgaggggaaacttctactaacctcaatttcaagaggtgatgtagttggagcatatcggtcaacgacatttccttgtctgtctaccagaaactttgcgaaattccacttaatagcatccccaaacaatcctcctttttgttcttttaacaaattgtaaaggggacaagtgttctttccatatacaacaatcttgcattggaaaaagagatatgtaacaactaggaaagt

SEQ ID NO: 56186 - DNA, 133 bp, Arabidopsis thaliana landsberg
cttatctttttttataccaacttcaaaaaaacaggggaaaggtataatactattttactaggcacccccaatcgaatataaacaccccatccttccaactataggcaaattcctgaaccacaaagctcaaata

SEQ ID NO: 56187 - DNA, 567 bp, Arabidopsis thaliana landsberg
  unsure (1)..(567): unsure at all n locations
tggtcaggtcgaatttttaaagacagcccttccaattggttgttcaaggcgatttttttaatgaatttatcggaagacgtaatcttactattttcaatgcataattctttgacctgcattttttctgccggaaaatccgggccaagatcggcttcgcgcaatacatgggtgtggcaggtaagatgggggtacaatttgcagggagaataatccatcaccagggtttcgaggttggaaagggtacacaagaccgcaacagcagtatcgggattggaaacaggctgccctgaaaggtccagctttttaagtgccgagcaattccagaacaacggtgaaatatgtttaattggattgttgtgcagatccatttcggtaagggcttgtaattctccaatgtgtcgagggatttctgtaatataattgccagaagcattgagggacgttagttcggtttgagtagatacggcaactggaataaaatcaatattacattggctaaagctcaggtagtgtaaagagttttcgcgaagattttcaagagaangttttatatcgagtcgcggattg

SEQ ID NO: 56188 - DNA, 463 bp, Arabidopsis thaliana landsberg
tgaattgtgcattatggagacaagatcttttatgtccaaagtggtttaatctcattatatattatgattcactattactcatgtggacttaaaagtgccatcgtagtcgctttattcattagatacctaatggacttcataattatattggtatttattttttgacttttataattacatatatattcattgttaattcttcagttatcttttaaacaagttaagatatgatttatcttttaaacataaataaatttagctaattcatcttataattatatccttgtcggtgtatttcttgtgtagaatgtatttgtaatcatttgtacaatatgaactatgattttgaattaattaacttgtcactagctaattttttaactctattataattatgggcttttaaattgttaaggcccaatttgtagcttcatgtcatctctacattctattaaaaccaagt

SEQ ID NO: 56189 - DNA, 1242 bp, Arabidopsis thaliana landsberg
caaagactatcctcgcacccttctgcagcttctatcaactgtttgcagaaccaaggaactgtatttgtattatgaacctcactttcacttaacttttctttcaaacttgaaaagcttggaatagagagtccatcacagccctataccaagatttatggagcttataagatataattgctcctccttcagtggtattaacaggaaaatatggaattcgaaacctatatgatatgctcttatatagtacctggaaacttgatatgatccctttacttattaattcctcaacacaagaccttaatatttcataacgaacatgaagagttggagggccaacataagcttttatgtcagctcgatccacgaaagcaacatctgcaacaaatatcttgatctgtgacatctcacaaaacgtgaatattatgcggaagaacaaagatctattatattagagaaaaagtcatgaggctgaggacaggatcaaaataggctaccaatagcagtagttatgtttgatgttgtaaggattatcacattcggtgctgatttcaatttgtccatttgggtgagtagtgcattcacaacctgcaacatatgaatagggggattaggttttcaagggttaagaattgatcttttcacaaattctaggtgtatacgaaatttagaagctagttggtctacccggatagaatctgacggttctgagccagacaatgcagcttttcgagcagcagcaagactttctacttcatctgcaggcaaaacaatctcaggcctacacaagaaataagcatgcaaatataaaaagttatgaaaaaatcataactcaccgatcaaaacaaataccagatttccatcttcctccaccatctcttggattttttggaaaagcttggcaacctatattgtggaattagtagaaatgttgagaataacagaaaattccaataaagcttttcttctaagataggtccgatcacttcacaactattggtgaagtttgtgctatcactactagacacgaaatggattcccaatcagcctactatgaaatcccagaaattaacggactgtgatcagcgaataaagtagaatgagtattgaaaatttcactggctgtgatcaactgatcaataaataaaggagattagctatttttccttggaagataaagtggcagttataagttggtacttctttacgttagttgaaccaacaactacaaggtagccacaaatc

SEQ ID NO: 56190 - DNA, 505 bp, Arabidopsis thaliana landsberg
atggcatctattacacacaacatcccgagacacctcctaaaaaaagatacgattggccaaaggcttaaacgcccaaggattagggtttcatattattcgtgaagttcacgtatgtgtgtctgatgaagatcatttctttggtttttttttctttataatttgaataaaatcggtcactgtagaaatctgactctaatgtgtgcgtaagaagtgtgtaacgctcggcggtggaccttatgttacaatccgtacttcattattctgtctgtgataagaaataataataattgaatatgtagcctagttttatgcaaaagttttgaatgttttcaatttacaatccaactaaaaacggaataacatctcaaataatttacaataaaatcaaagatttatattctctatctcagattaccgtttaatttcataaaaagtaacataagaaattatacctttttggattcaaaactgtttcattttttggttaaaatattatcatcccata

SEQ ID NO: 56191 - DNA, 1396 bp, Arabidopsis thaliana landsberg
cagcatattctgggttaagcccattttggtcttcggttcttcttcagatgtatttttgtgaagttgttggatgacttccaattttcaatatcaaaagttaaagtataaattactgaagtaggaaaaaaagaaaagagtttaatggcatgacgaaaagtttttgaatatttttgaatttggttttatatataacaatctggatccgccaccgtcgaattaatctccggaaagctcgtcgaaagatgtcgatgggaggcgacacgacgtgggttgggaagaagccgatcagacgcatcggtggattatctgatgctctctctatcgcctccgatctcggtttcgccgtcgctcctcctccgtcgcaggtaacttctcttgttcactttaatctcatccgaatcggaattgcgtctccggttagttccattagcttgagtatagcatatgctttgggttgtatgctattagattgactttgcagaacaatgcgtatgagagatctataatttgaaggagattatgtttctgaggaatgaggaattttagctgcttgttagttttgcgaatctctggaccatatgttttgattagatctttgatctcttggcttttatatactgaatctgaatttttcatcaagtagagaatatttatggttagttatctcttcaattggctcaatcattttccgatgtaggaagaattacaaagctttgcgtcttcgaatggggaaagaggtgatgatttgataagggtattgagagagttatctgttgttcaaaggaaaattgcagacttgcaggtcgagcttcaagggaggaaggtatctttctcatggttttggtttctttttcaaattgaaataagatatggatcatagtatttgcattgcctgaagccttatgataacttattggtatatctcatgtaacaacttttgttagatgctttgtatataacttcttttgttggcgaatttcaggatgataaaaatgtggcgcatttgactcatgttggtgaaatgcaaaagaaaatcgagactttgtcaaggattactcaaatattgaaagatgttatacaaaacaaggtaggatcatttttcctttctacttacctctaaaatcttctctctcttttttttctggactaaggtttatgtatctttcgagttcatttatctctcttttctgtctttaagcgatatccctcttattcactatcgttctgaaaattgagaaaattccttaagatgttttcgaaacattagcttctgagtacgtcttaagactgccttatcttttagtcaatttgtgaccctctagttgaagtttattacatcatttgtctgtttatataacaggatcgcatcattgctcgtctccgaacaaccttattc

SEQ ID NO: 56192 - DNA, 279 bp, Arabidopsis thaliana landsberg
tatatctttttgtataccaacctcaacaatctgggggacaggttatatactactttacttggcccccaaaaacgattacaaacaccctatcgttcccactataggcaacatcactaacgacattgctcatctggatagccaactttgcacccatcactataactctttcttaatactcacccaaaaattctaaggtggggagggggggggggaagtgcttttttctaataaactatacacactccataccctcaatgtaatgcccttaagatcagcttc

SEQ ID NO: 56193 - DNA, 863 bp, Arabidopsis thaliana landsberg
tgacatcattcatggtggtctaatggtagatacattcgattcaatactatttcaaatatggttagccattctatatgatttaaatggtaaagaaacaaaaaagaaactcagctattaaagtaaattttgttttgcctttttaagaagtaactatgttagatcaagtaatgaaaattgttgaaggcaaaatgtgagccgtgcaaaacaaatttggctagagagactaatgaaagaaaagtcataaaagtctccttaggaaaatatcaaaaatattgaaagtcaaatctttcaatgattcaatcaacccattaaattttggtgttccagttaccatcacttgttttcaaggattgctagcattttggccatttttggtccgacaagcctcacaactttggcttttatcttcttctcattattttttcttacatttctttgctactccaaaaaaaaactcccaataactgtcgattgatatttccatcacagtaagtctttcatacgttttcttaacctttttaaaaattcatttatcttaaaatagccttttgattaagcagacttgtattctagaattctcaaagagaactttagaacaagtgtactcatttattaaattattgtcagaaaataagtatgatgttactatcagcattcaatcctattacatgaattgattcatatcaaacaagtttaatgcacgttaaaatcattctcactcatttcgaacctttttttttcttttcaaaaagttcatagtaagaagaagtttctatgtaagttttctttttcaggaaagattctagaatatcatattattcagcccacgcctgtgtttgtcttaaaagaagctttttattttt

SEQ ID NO: 56194 - DNA, 842 bp, Arabidopsis thaliana landsberg
gccacagccatacccaatctattacattccagtcgagcagtacagttcgaggcacgttcaagcaccgcctgtgaaaccgagcaccgttttaaactatcaccaagttgattccccggtggtccgcaccagcagccctctagcgccagagttttcctcacaggtttatcctctatccaaacccgttgattcatcggtacagacatcaagtgaagctactcttaatactacttcaagagatgctttcatctataataccgatgtcgatgacgacaacgatatagctcatgctcaaatttacaaatctcagcctccagctcccacattaccgtctcagtattaaaccattatgctaaccgaagctttcagtcaggtacagacacactatgcttgagagatctaagaatcccatccattctcatgttgctgcactttcaggtatttgtctttacaattttgttttggttcccatacatattatacaatatacatgcttctgcttttcgtctctttcattcaagtgatccttgtttcaccttctttactcactcttgttgtaataacacgaagaagtttacgtttttttcatctttctagaaaacattttataaagaaatttatgatattggagtactatttttgttgtcctttgattggtgagaattcattgatgtcataagatgaacatattttgatgattgtattggttaatctgcggaataattatgcttatcttatatgttttcccagcaatcgcccaattagcaaaaagaataaaaactttcgtaagtttaaaattttcttatttttgcaaggaaaagttgacgtttctctctcaataggcc

SEQ ID NO: 56195 - DNA, 1015 bp, Arabidopsis thaliana landsberg
attctagactgttccactggttacgagatcataagagtgtagcattgctgctgcggtggttttcttggcaatttgtcagtatcaagtattgcaacttaactcctaaatccagaatatgacattctatatattgattgaaaattatattctaaaggccgcaagtttgattccttatatggaggaatacatgtttgaacatattatctattatctacaaataattttaatagaaattttatgaatagaaaaatgttgaatttaatattttaaaatttagcatagcctgttttattttactttcgcatttttaggatgtatatttcttttttattcataatttctttaattttcttagtcattaaattaaattctttgtatcttgtatatatgtgtggattaaaccaatcccaaaaacgcgtttacatattacttttaagtagcttaaaatctctcacaatcagtaaaatctctcaccttccttaaacaaaaatcaattttcaaaaaacttcctccttttaacaaaaagtgcaacgtactagttttaaaagtcttttactcttttttacaacttttatgatttttcccaaagtgcaatgtactaaaaattaaacatttgtagatctctcgaagcgatccaccatcaaccatatatatacccacccaccctccattcttaaagcatctaacaacaaaaatctatcttcaaaaccctaattaattgatttacgatctcgcttatcaaaagatcgatcaacacaaaactggttaaaacctgacgcaatatttggttgaagctactttacaatggaaaagcaatggacttctggtcttttcagctgcatggaagacagtgaaactggtagaaattctatataaatttaatcaagttgtcctttaatctttatacatatatagatctattgtcaggattgtataatgatttgttccttttggtttgtgctgcctatgcttgcctcacatgtttctgcccatgcgtcactttcggacggatcgc

SEQ ID NO: 56196 - DNA, 1793 bp, Arabidopsis thaliana landsberg
tgtcaaacatgatcattaactctcttatccactaaattatgcaatcaaattataaactatcaacctcaaatgtggttactaaccttggtcaatgactgattgtttccctctaatggattcaattgcagatttcaagctcctctctgatatctgaaaatccttaaacaactgtttcccaaaccgcttatcatcagcaaaagcaagaaccaaatgctccactgacacataagagtcctttaaatctttcttaaactgtcttgctctctggaacagagcttccaaatcacgccccaacatcgaaccagcagcatctccatacacctgaaatcacaaacttaattttcattagcctcacaaacaaagaaacaacaaatatcaaacccttaaagacattacattacctttggttggcgttgaatgaacttctctgttgcttctagaacctttgtgttatccacaccgatcttagagaaaatcctacgagctaaaccattcttctgctccaaaagagctttcattagatgctctgtctccacaatctgttgcttattctcttttgcaacatctggtgacgaaactatcgattgccacgccatttctgtgaattcttgctgtgtaagctatacaaacatcaaacccaaattagcaatccagtacagtaaaatccttccagtgtcaattccagatttgtgattacttaaaaatcctaaagtttcagactttacccttccattagaagaagaagcttcacatcggacaacgaacggccgatgatcaagccgccgtgtgagcctcgcgctctgctttaatttgagagatttgaaggaactaggcttcgccggaaaagccgcagaagggttgaagatgagaaaacgaagaaatccttcgagtctccgttcctacactgactacaccactaaacgccgccgtagcagtcgtcgtagccgtcgccattagctcggaaatttaagaacagcaagcaattgaaaaaggaagatcaaatacaacaggtagtttagcacaaattcaccaaaacggcgagatgtttacttaagaaatcagcaaagagaaacgcttttgctttctcgtgtagttttagcgagaaccaagagaaaaggtgaagtagaaaactaataaagaagaagaagaagttgctaaacgacgccggagtcttcgtgaaccctcgggatgtacttactactgagaccttcttctgacacgtgttcactctcagaaaacttaggatttttcgaagtagaattaatatgaaccgtccaaaaatatagcagaaaataataattaatatatagtttcccgaattttgggccgttgataacgagattggcccactacgactgttaacagaaaccaaacattgttaaccacggaaattatgtcaagttatatttcgtgatgattcactttattccgtgcaaatttgtttgttacctaataatttccacggtgttgcgaatccgaaatacaatagaaaccaaacctcaagcgatcaaaaagccaatcatgtcatgtcatgtcagaaaaaagaattacaaggaacaagagcaaaaggtattgaagaaggctcaagaacagaatgtgaatctcccaagcttttttaactctctctacttgtcttgcacaattgttaacaacgagctccaaaacataaacagacacatttgttctgtttcagatcacctttaggcttcttcttcttcttcttttctgttttaaaccattagcaaagcaaatgatcttcagattctcatacaaatgcataaccttaacagatg

SEQ ID NO: 56197 - DNA, 2071 bp, Arabidopsis thaliana landsberg
tgtagagttttgtttaagtgttacatgttgttccgtaaggctgagtgctgacaaaggagaagtttcatgttggctgcaaattaaaagtatacatgttgtagtacaactaccaaaaagaaagcatagaaagaagaaaaccctaggataaagaattaaaaaggggaacaaagatttatgctgtttcttctttatttctcattggcaaaacggcagaatcttcattaagttgcgttttattatttttccatttcttatagtagccaacttccaactacaccatttaacccggccgttttttttttgttgctatgtaattggaaaatatcctataaatcgaaaattatgatttacatgaacaatatctaagatttaggatacaaacaaggaagacgatcaaggatcttgattcttgaagatagaagcaggcgcaaatgtgttgtgaattatgcagcatcttacttctttgcttccaagttgcatataaatcacggcttgatcagtaactagcttccttagtgtatatgtgtctgcatctatcatatacagtatgtttgtaaactgcgtttggtgtaaaatgtaaatataatttatagaaaagaaattaaagtagtggaacatggaaatcaccgttcagatattcgctaaagacggaattcttgttttcgtccatttttttaaagaatttttaagtaatagaaatcatacattacattacgtaatttacgtgcatcaccatgcataacgtcattacatcactaactaccaggggcagatccacatggcagtaaagaggggcagctgccactgtcaattttttttaaaaaattaatgctattttataacactttttatatctgctcctgttaatatattatttattgcctccataactttttttttcttctaaactcacgtttctaatttttatatccatcagtttttttcttttgtgtaaaataatattgcaactaaaaaaccacttcatctaaaaacaagacaaaacccaatttgtgtttattaaatttgttgcccttacaaatccagtttttaaaaacactatgttagggttttatttgttcatgagtcatgacctaattgtgaaacattgactctattcatttttgtttctctttttcgatttcagttaaattttgattttgtttattctcatcaaacacaaacacaaaatctccattcaaagtaatgttttttttttttttttctctcttttattaactttttaatttcagtttctcactttctcttactgatctagtgtctctcctttttaatttaagtttagaacattgtttttgcgtagtttatttatatcaaatatctgtaatttttgggtaatgtttagaagtataaccaaaaacattttctcatacaaatttacaatttagaaacacatatgattttttattttgtcgacaaacatatatgacacataatataaaataaaaaaaatctgaggctatcatgagaaaatttatgagtgaaaatataggcaaatgcagtcaagtgatgatgtcctttcaatttcaagagttggtagagaaaaataaataaatgacatattgaggatcaaatgaattaagtcagagagatgcataagaaaggtactaggtagaccaaggccggcccaatgtgttttgctgactaaagcaaaacaaaaacaattaagcccattaaagtatagttatattgcctcggaagggctcgaacccatcatctacattgtttaagtgaacacggatcggaagtaggctacagtggccctaagggaaggtaggcccattattagtgacctgaagcccaataataatgaatacgcacagaaccttttaagaagaagatgacagaatctctagagaataaaagactaaacacaaaaatagaaaatattgaaaaatgagatgagagagagaggaggagtctctcatcgagagtagggcttgtgactccctccctactgtgcctacttctgcttcttgctctgaggacactctacacagaccacacctactataagacacctttctcatacttgagatcggagtcagatcct

SEQ ID NO: 56198 - DNA, 576 bp, Arabidopsis thaliana landsberg
atgatgaccgaagttgatgtggaacaaagggttgagagaataaataaacggcgaattcgtcaatcttgtgccattaatatttttaatttaggagtcattgttccgcatattgcgacaagctgaatttaatgtggaaagaaaaacgcattttaatttttatggattgtaaataaaataaactctctttttttctttttcttttttgaagaaaagcagccgacctcgcaatatttactgttatgttgctacataaatttcatagagacaaaatttgtctcttctcccactctcgtgtccaaatcgttttgttctcattacactagagactagactatcatccaatcatcgttcaacatttggatggtcgatgcatgcacgcatatatatatatatatgtgtaatgtgtgcacatgcatatatatagccatatatatatatttgatacggtatgtcaaattaaatacaaatgtcaggatgctcacatgtatattattaatgttaaatcaaagtaaaattggtcccattaattgatttcaaaaaaaataaaaaaaaattaaacaactctagaattgaagc

SEQ ID NO: 56199 - DNA, 286 bp, Arabidopsis thaliana landsberg
cttatatttttgtataccaacctcaaaaatatgggggacaggtagaatttaaatttagtaggcaccctataacgaatgcagacacgaaatctttcaaaccataggtaaaatcctgaacgagcatgctctatctagttacaaaatttaactcaacaatataaattttacttaatagttagtcaaaaattctaatatttacatatactatgataaatgcttttatcaatataactttacaatttccagacctcaaattaaagaccagaaaaacatctttttccccctt

SEQ ID NO: 56200 - DNA, 159 bp, Arabidopsis thaliana landsberg
tataaatttttttataccataaaaaaacagacgtgggggaaggtaaactctaattaacttcaaacccccactcgaattacaagaccttaagcattaatctactcaaatagatataaatcacctagctcaaattgatgactgattcaattttagaacata

SEQ ID NO: 56201 - DNA, 554 bp, Arabidopsis thaliana landsberg
  unsure (1)..(554): unsure at all n locations
gaactcacaaatctgcctttttctgccgctgcctcccagattaaaggcaagcgccactactgctcggctatgcctagttttcttacctgtagaagggaggttattatacttacaggactggcatgagaattttatgaggccacatgtttaagaagtgtggcacatggcaagctttaaaaattgttaacattggaggcctgcaaggtggctggcaaaggcactgctgccaggcttgccagcctgagttccaggactcacatgtcaggaagaaccagctgccatacaatggtctccttcctccatctgaaagactccgagaggagcccctcactcaggcctcgggacaatagtggacacccaagaactcaggagagaccaagcttgatgcaaaccacacaaggctttatttggggaaagccagagctctggagacgactcatatcccacgcaggggtagaggagtcgaccacgaggggaaaaggggcccagtttttataggccttcanggggaaaggagagggagggagaaaggggatttcagatctaaacatgtc

SEQ ID NO: 56202 - DNA, 985 bp, Arabidopsis thaliana landsberg
ccgtccattatatgcagttgctgatgtcaagcaagcttattaacaaaaatcctcccaggagtattggtacgtcaattgaaactttgttaaagacaggagcgttgaaaacacagtctggtttggatttacagcaggtaagagttggtcgcttgtttgggaagcttttaatcttagtagctaaagtccattaagtatgatgtagtttgagagaacaatactaatatatattttctcaattctttaccagagagcaggttacactgttcaggctgagagattgaactttctccgtttcctttcatttttccgggcggttcatcgaggtgcttcttttgctggacttcgtacaacaactgtgaggaagctgcttcctgagtaggttctttcactttttacctgtcaaacactacatgtgctgatgctgtcccaaaattgtagtcttcacatttttcctgttttattgttatcttgtagatcttggggttttctttgccctgttcacactcctgatggaacaccttgtggattactgaatcatatgactcgtactagccgtgagtttctctacctctcttcttcacacatcattttgtgctattcagtacgacatcttgaattcagcaatattattctgttatcttgacatttggttagaccaagttggagttacatagtttatttaagctttaaaatattagagagatttagatagaatcacgtttggttagagtgtgttatatttctcaaggtaacttattatagactggagtttcaaatagtattgttatattagagcatattttatttcgtttccctttttctccatttatctatagtttctatttgtggatgcgattaatatgcttaaatgtttagttcttgtcatattgtaccacagtggggattgtgtacactcgtaataccatttaatatgtcacttttttccagtaacaactttgcttattgtgttctgattggtcattgt

SEQ ID NO: 56203 - DNA, 590 bp, Arabidopsis thaliana landsberg
  unsure (1)..(590): unsure at all n locations
ccccctccccccccncccccacccccccccccgggggggggaattgggttgccccaccggcggcccttcgacaccgcccccccccccccccccggnccaagccccacccccctttcccccccccgcggcgcccccgccccccaaacaaacaccccccccccccccccccggccccccccccccccccccccccccccccccccccccccccccccccccccccccccccccccccccccgcccccccccccccccccaccaccccccccccccccccccttctctcccccccgctgtcggcccccccccccccccccctccccaccccacaccacaccccccccccccccccccgcccccccccccgccccccttccctccccccgccccccccccccccccaccccccccccccgcccccccccccccgcccccccacccccccccccccccacccccccccccccccccccccaccccccccgccctcgcccccccccaccgcccccgcccccccgcccccctcacacgcgccacccccccccccccccgccccccccccccagctcccccccccctcccccccccct

SEQ ID NO: 56204 - DNA, 1358 bp, Arabidopsis thaliana landsberg
atattaatttatcaaataaatcgcaacctttgttcccaaaaaaaaaaaaaaaaaaaatcgcaaccaacttttacaatatttttatatttttaaaaagataggaatcatcttctttttttttttcttcttttgtacacatgacaaaccccgatcgcccgaattttaaacgtagcattttgatatgatttgcaagtcaaatccaaacataccggaaccacttatctataatatgaaccagattttattcatatttttcaattttatgcccgaattatcaatggattcgtagaacatattctactgtctctagaagcttttctaacacttgttattggtcataaaatgaaataataggataaattagacatattgacaaaaaatactccaaataatatatttttaataacctctctgaaggaaaatattttaacaccccaaagaaaaatctaaggtggacgtaattggccatcaaataatcaaaagtttctaaacacagaaaaacaaaaaaaaaacataaattaatattatttgacaaaaaaaagatggaaagtatagaacctttgtgccggcgtcgaagaggtttggtcggcaaagccttgcatagatctctttcttgtggtaaataagtttgtcttttactcctacttgttgttgatcttcaagaattcttcggaccagaaacttgtagttactaggaagcttgtcttcccacacggcatcggatctcgacgccctatgaaatgatttatttaccctagcaagcaggcagatctccggtggctccatgtatatgaacattgctgttatacagttctcaggcacatcttcgaggccgcataactttccggcaaaaggttcggatcggacgatgctcgatgaagccgcccccatatattggtaaagattagatgatatagtatatatgattttctctttgatctttccttttctttgatctgtatgtattcaagatttgggtttgatgtggtggagaagtagaaaatatatggatgaaagagatgggtttgacatatttacgattcttttgttctttgtctaatgggagaagttaatggctttcttggttttaaaggagagagagagagagagggtattgtatgtgggaaggggaaaataaattaatgtgaacagaaactatttaattgttttcttagtaagaatatttgtgatttggcgcagcttatagatgtcgctaatttatcaacaagttccagtgttttttaactagattattcgatgatttattatgactttgtcgtgcatatttgttggactactcgtttcgcagtgctgacaaatattttatttaatatcaattccaataacaacggcgtaaa

SEQ ID NO: 56205 - DNA, 1439 bp, Arabidopsis thaliana landsberg
caagactcccaagctggggatgtgtgtcattatcatacggagagatgacaatatgacaagccgccggcgcgaccagcacgaccaattgcctgtgacaaagacatatagttctctcgagaatgttatatgtacgctgatcactaggctcaagaaggaaaacccaaaaaaaatttaacctgaacgtatagttccatactgcctggcacgctgaagtgtattacctaaagcagactcagaaaacttagaagcatgtatatacatgagatgcgaatagttgaagttatgttcaagcattctaagtattggcattagacttacagctcctacatctcccttgtcaagtcccatgccgaatgctacagttgcaacaaccttccaaaacttatataaaatatttgaatactgaaatctgcttaactttttcagtgatagtttgcatgaataaactggacataaagcgtatggaaattagtgaactttttttctcaccactctaatcttgttggaacaaaatgactcctgtatgcgaacacggtccttcgcaggaagaccactgtgataaccctggatagatcaagttaagcttgattagagtgtaattagctatagatacaggtatgtcggagatttcaatatggaaacaacctttgcattgatgttgttatcgcgtaaatacttgcttatcatgtcagtctcatactgcgcaaacacagcccaaagttgcttaagttagcatcatgcatgatacagtaagaaataaataaaaagtatattgtagagcgtgaaaaaaagccgaagataagtaagtactctcacctgaaatttgcagtacacaatgatgcttcgaatctccttatatggaggagactccatcaaaatcaatagatctttcattctgttatattttcagatttcagtcagttacaactcgaggacgagcaaaagagtaaaaatattaacaagacacttacctattagctccactcaatgagacagacaactcaaaattgtctctgagttgtgacttctgaatacgattggttgacggtatctctagtgaagacatgacagcctgaagagtcattgtagtggcagttgcggtcatcgcgagaatgcattctgccttgagttcagaaaacagcattgatgccttgagtctcatatatgaaggacggaagttatgagacctgttcagaatagctcttaataaccaagacaaacagaacaaggaaaggcagtagatactacagttaacagagaaacgcaatctaccagttgccaagaagctcaccattctgatacgcagtgtgcctcatcaaccacgacaagtgacacagataaagacatgcgaaacattgacaaaaattctacattcagaagtctctcaggagatacaaagagaacctgaaatgaaaaacaaacccatgacacaaatgaat

SEQ ID NO: 56206 - DNA, 636 bp, Arabidopsis thaliana landsberg
  unsure (1)..(636): unsure at all n locations
cccccccccccccnncccccccccccccccccccccgcgcgggggaactcctctgcccgcccccccccccccctttcggcggagggacaacccccccccccccccccccccccnccccccccccccccccctcttccccccccgggcgcccccgccccccacccaccnnccccccccccccccccccccctntccccccccccccccccccccccccccccccccccccccctcccccccccccccccccccccccccccccccccccccccccctcccccccccccccccccctcgcccccgcccccccctcctctccccccccccgggtttgctggccccccccccccccccgccccccgccgccttccacaaaaacaaaccccttntccccccccccccccccccccccccctccccccccccncctctccccctcngtcgccccccccccccccccccccccgccgtcccccccccctcctccctnccccccccctccccgcccccctccccccccccccctcctccccccctgccccctcccctccccccccccccccgccccccccccccgcccccctctctcccccctctccccccctgtcccccccccccccccccccctcccccccc

SEQ ID NO: 56207 - DNA, 166 bp, Arabidopsis thaliana landsberg
cttatatttttgtaaaccatactctgaaaaacagggggaaggtttgatttaatttaacataaccccctggctcaaatttaataacgcattctactccactgtgagtaaattcctgacgtaggatgtttaaactatttctaaaatttatgcatggatatatatattc

SEQ ID NO: 56208 - DNA, 621 bp, Arabidopsis thaliana landsberg
  unsure (1)..(621): unsure at all n locations
tactatataaatagtggattcaacttaatttccaatcatatttgagcaattttaattattatttgttcagtttttttcatggttgtggttggttgcttattcattccgtaacctttcggcagccaaaaatatagcatcagaagaaaattttaaatattatgattctttacacttcgcaattttattgtcttcttttcttttgtggtcaacaatgacatggatggctgatccgaaccaaatttcctaaaacaaatctggaaagtttatacaaagctgaactactttttttttttaacagaacctgtactattgttttaaaaaaaaaaaaattacacaagctgaagtataatcattagactactatttttggttttgaatttccactattatgtaaaaataataatattattttaaaatagtgataatatgtaatcaccattataaatttgtctcaaattaccaatttatctgtctaaatttatatgaaatcaatacaataatttaactagtatcgtattcagtttgagtcggtttactctattttgaatatcacaacaaattntattacanaatattcatgatctaggtttatttttctttttggtttattattagcaatta

SEQ ID NO: 56209 - DNA, 138 bp, Arabidopsis thaliana landsberg
cggatccaaaccacaaaacgggtccttttacaaaaaacacacactataaccattgggaggggttttaaaaaaaatttcggtatctcctctacccaaaactgtatacttaggtggcctatctacccttaccaggaactc

SEQ ID NO: 56210 - DNA, 622 bp, Arabidopsis thaliana landsberg
atcagtttaccttgcacgggtttttataagaggactacttttaagatatactgcattttataagatgtatgtaattccacttgttgatgtttgtaaaagtgacctagactatgagaaaaaaaaaaacactagtataaaataaaagtaaaaatgtttattattatcatcttgtcatcacaaatctggatagtttattagaagcaagattacatatgggattcaatacgtaaacttgatcgtggagtgttacaacgagtacaaacacattgcctgaaaatacattgtgtgatacgacaacccggacatgtatcgtgacaggtattgtcgttgttgcaagaccctccacgttgtattgttacatctccactcgttcttgcttctccctccaataaacctatatataacatagtttgaatcattacgaatattacgcacttaggttccatattcgtttcttattacgaatatgatcatcttgatttgaattaatttgtcttcttcgtttttttcttacaaaacaattattttgtttctttggcttcgttgttacttgttaaaaagataaactatacttaagattaacagttaacttgcatgtggacagaaaatattatcatgaaaa

SEQ ID NO: 56211 - DNA, 437 bp, Arabidopsis thaliana landsberg
tttgtttttttttgcagggtatttttctaggcgggggctggggctattggagaagagtgatttccatcttcatgggctcttgtaattttaatcaattgctttggaagcttacaccatacgttccaaagtttaattacatgaaaactgaaattcgccaccaataagaaaaacaggcatattactatgccacacggttacgatccaaatataaaatctatactctattgttgtgcaaatctttacatacaacgaatattcgttaagttcatgcatcaactaatgcaatttggctaaaacttatattgatcgagcgtaagtttaacaattagtcaaattattaattagtgtcacatcattatatatatttattttcttttataaaaggactgacatgcttttttctctattctgttgaattaggctacttctatagaaaa

SEQ ID NO: 56212 - DNA, 512 bp, Arabidopsis thaliana landsberg
gattggaattggaataggtgttggggtaggtggaggctctggtcaaggttccggcagcggaagcgttagtggtggcggcggcggtcgccattaatcaaagctcttattaccaatctcacgtttagtgtcttgacaatactacttcttgtcattctatttctcttgtattgtttcaagactaaacaaaaaaatatgtctgatacatttttcacttcaagatgtgatttcttctatttttgtgtaagaatgttttcaaaaaaaaaaatctaataagaaaatattgaatacggattgatcttaattttggacttaatccgttttctttctttatctctgaagacatctaatcagctttctaagaggaacacataaccagcattgtttcaacaatatatctttctttttgcaaatacaaatttcaattgaattaacttgtgtaacatatgtacgacccatatatcagttttgaggttctatcgccagatatttctctacgaaagcaacataataat

SEQ ID NO: 56213 - DNA, 502 bp, Arabidopsis thaliana landsberg
tttaaagtaagaaaacataaaaagctgggattgaccttattcttgaatgtgtatcatggctaaatactaattcaaaagcttaacattttcttcattataaaatatgtgttatttacatgagccttggattctgcaatccactccatggtggagtttaatggacccatcaattggaagttgcctcacacgaactgaagtcagaaatgttaatttacatgattctcatatacatttaaaacaaatatacctctttacgtattgttatcatgttatgagtgatttagactttagcaaatgttaattctgaataataattttctatcagtaacacagtttcaaaaagtaataacttttacattttattataatatttgcctatgcttagtggaaatgtacaaaatgtctatcttataaaattctctatttgattctattggtatatcctacatataaattcatgatatgtgacactttaatttttgtgttcaaatctatattttat

SEQ ID NO: 56214 - DNA, 852 bp, Arabidopsis thaliana landsberg
gagacacaatcactgtggaatttgaggtttcttcgcgttccgtttacgtcgtgcctttctgctaagcggcgatggcgtaacaccttgtgagctttcgctactaggagaagtatcgtccttggaaacctcagaattgataccatcatcagagatcttgcaatcctcgatatctgtcttggccgtcacgttttcctcctcagctacctccttacgtgcctaggaaggaaaatattaggtttagttttactataatacgatgcgggcatgcggctaaaaccctaaagaaaattacgtgggataacttttgctgtttcttgttcttagcaggggggctggtctcttctgaaatggctgcagaaggaggaggaatgcggagctttacgagctcatcgataagggcggagacgattggctttgaacggagggtgtcttcttgttccttgtttagtgttttcccctgagaaatcgactcttccatgtcagttatacggttgtatttcttgcggagagtacggagacgtttgctgatgagagccgagatttgtccttctacggcggccatgatgtcaagatgagcgatgagaacgtctgagatagataaccacggcggagaaagagaacaagaaagtaagtaagggttttgttttccttagaatatgggatgggatacaacttagaactacatacatatatatagtggagactttaggtctctatattagttattgacaaatgtttagtgtatctctataatatattttggatcggcctagatctttgtatagttatttccatatatcataattgcatcttttccatatctttgtgaatttaaacattttttattaatgt

SEQ ID NO: 56215 - DNA, 692 bp, Arabidopsis thaliana landsberg
ataagcgtcctcgtcatcatcttgagatgatcttacctaaaccctcaatgccacggcagcgatggtagtcagtaagatgatcgtcgtggttctgacggatagctcttctccaccgttgggatcaccactcgtgctgctagatggtcccatagtagtactgtcaggaaacgttatcgtagatgaagtcggcttatcattagtgggtagtgtgctgtttgttgaattgcctgtggatggatttgtggtgcctggacttgctgtggttgaatttccggtggatggatatccggcagtgggggttccgttggaactacaaaaaggttactcttataaacacacttaaatcatcatcacaatttttaagaagatataattaatattttggtaataaatcagtaataaagattctgtcacacattagtagacaaatgactgaactatttcaacgactagaatcatcagagagctcattactgatctaaagaaaacactaagcaaacgaaaacagagggaaataaccctaatctaaactctaaggcaaggtgatgtgaaacatacctagaactagataaacagcttgacgtagctgcaagaacagagtaaataaagaatcagcaaaaaaaaaaaaagatacacatttgatgaaaagaagttgtggttttaatggaaggaatactcgaaggaggggaagt

SEQ ID NO: 56216 - DNA, 962 bp, Arabidopsis thaliana landsberg
acactgaaacccaaattcggaaagctagccacaaactacacaaagtaatcttcgaatcatggacataaaaagtcaatttgaaacaaatcataagccaaatttaacgaaattcatactgcgcacactaaatccgggacaaactgcgatcggatgaatcaacctataattatcattcagaaactaatgcatacaccaaaatcaaatcaaagcaaacacgaaacgagtaggtcgattcagagatcaaaacctaaggcaatcataaagtattacaaaatcgactcaaattggattgatctatggaaattgaagaagattgaatcgaagcaattatgaaaaggaattggatcctaacctcggcaaaatggcatagaagcagactacctcgactaacttctcctgagagttatcggatagaaagagagagagagagaccaaatcgcggacgtaaagttactacttcgatccagagagaataaacgcagagacgagagaaagaagattttgagaaagaagagacactggagcggagcaattatgttatttttaatccaattagaaagtaacacgtggtggatgatgtgttgagtggaggttttcgattgggatttagggacctaaaacttgattagtcaatgatatatgtattggatccacatatatttttcagccgttagattagacaagtattgccattaatatttgataatgaacggctgagattggatcttagagaaagcaacaagtgtatgaatgaactgtcaaaaatagaaaacctcgtgggccttttctgggctaaatcttttagattttgatagaaaatgtggatgggctttcatcgagctccagttgcgcagcgctcttctctaatatatcttctccacggtaataatatgttaggtgggctatgtgttatcagaaaaatattaaaattgtgattattattcgtaaatacattgcttaaa

SEQ ID NO: 56217 - DNA, 490 bp, Arabidopsis thaliana landsberg
aatccttagccatagcttaaaacatgtcattggttggaagttttttttgataattttcaaataaattttttttcattgttaatttgtcggaaatttgtttttatttgcctgaccatcaatttcatcagaaatgatattgagatttttcttcttgtgaaattcctcattctgccttggagattcataggagttattaacaaaagtgtacgaaacagtctcaccactatacgaacgccaagaatatgatcttacgaaagatgtttttaccattgacttcaaacccgtaacactaatttttatcttaagttacaaagtgctatctcagatttcgaattccacctcttgattactataaagcatttgctgtaaaacaattttttttgttgcatagaatatttttattcataaaaaaattatggctactttggttgatgttttagtataaaatcgcaatagagaatttaattgtatttttagaatgcatgatata

SEQ ID NO: 56218 - DNA, 385 bp, Arabidopsis thaliana landsberg
ttgaacggagctaattgaatagagcatagaacaggagattttattacgaactattgaccttcaatacatacgaagtttaattgcggaggtgagggatagtcaaacacattcgaaaagataactgttaattacgtggcatcattcaaacgtgcttcattaagaccatccttactgcaagactagcttcataaattctaggtgtgagtgatcaaagaattacgtgaatagtgtaaaagtgcatgctaagcaagagattaagaaagcatctgagcttaataccatatcataaactcttagctataatatctgtcaatagaagcatttctaagcgacaaaagtaaccgcctaccatcaaagtaactctaatgtgctcacatggctataa

SEQ ID NO: 56219 - DNA, 143 bp, Arabidopsis thaliana landsberg
ccccccccccccccccccccccccccccccgccggtttctttccccaccccccctccctccccccaaacacccccccccccccccccccccccccccccccccttccccccccagtttctttgcccccacccacccccccccc

SEQ ID NO: 56220 - DNA, 554 bp, Arabidopsis thaliana landsberg
tatatgtttggttgtgacaccggtcacggggggtcgtaaactgggcccgtaggtcagaggaggtcgcacgtggttgtgacaccgagaagcgagccccgcatggcagagaccgcaatggaagatttgagccggccgaaggtgggctggcggtggaatgtctggttgggcccgcgcgggagagagttgggcccaacaatgctgagaggagaaaatggcctacgggtttgattcttcttttatttttttcagtttccttttcttttccttttctattttcttttcagatttttgttttctaatttccaaattgaattggaaatatattttgtattttcaaactcatataagatgcacaataaaaaactcagcatgtgatgcagcattcctattattttatttattcatttatttattatcctacataagcaaatgcttttggatatgtagctcatacataattattttaaggataatagcttctattggataatctctattatatctgctctacacttatcctatataatactattacttcacgaaagatattacat

SEQ ID NO: 56221 - DNA, 504 bp, Arabidopsis thaliana landsberg
  unsure (1)..(504): unsure at all n locations
ttcttgattctctctagaccgttaaagacgaacatctcttcatacttattgtattcctcatcttggtctcccacattctcaactccaacaattttttgctttccagaaataactacatgcatcttctcatctgctggatcgagtacatagaacacttgtgcaacacattcggcgagaacccacgggtcatctttatatcctactttctttaagtctaccagtgtgaggccgtagttatccactatcaccctcacgggatgttgtacccattggcacttaaataagggtattttcatgcttgggccataatcaagttcccatatttcctctatgaatccaaaatatgtggtcttctgtccatgttggtcttcttttcatgtcttttgatttagtgcagaatgtgtacccattgatgtcatatgcttgccatgatgtcacaaaacacgatggcccagaagccaaattcttcattgttttctcttccaaagagtctncgaatgggat

SEQ ID NO: 56222 - DNA, 540 bp, Arabidopsis thaliana landsberg
tttatgtttaggaaatgtacaaccccatttaataggaagggctcttgaggactctatagagactttattgcaaaaaatacaagagacagactcttcgcgaagaactcgtctctacacgattctccgtacatattctagtgactatatgttgtatcataccgtctcttaattatctttttatgcttgtatccatagtatcagggttaacatggtcttatatactcgttttcagtggaggccggccgccggaaaagggagaccggaaacgggatccggcctctccccgacgatggcatggctaactaggtactcatgttacttatggcaacctagctgtggctgtgcgtgtgtataattgtatagtcgattgtgtgcaagtaagagagtgggatagatcggtgggcaataagctgtagcagtggtaaatagagcatgcagaaaagataaaaggcaccgaccgatctgtccatgtcgccgaggccagcactagactaggagtgcaagcaaaccaagcaaacgtccgcaccccacgggaacaca

SEQ ID NO: 56223 - DNA, 1139 bp, Arabidopsis thaliana landsberg
atattttctaaatccctcatatatatatatatatatacataacatgccgtatgtatataaacattcgatatagagctcttattttctccgatcaatacgaattgaattttatgtatgaatgatgtaatatatgaagacggtagatatatacgtaccgagctattcgattttgtaaccacacatcaacttgcctttgtctaagcttcaaaaaggtggccaaatcttttttttgcttctgtggtttcataatcagccacccgaaacatcatcagccgacatgatcatcagaaaagattaactcttttctctttcttatttctctattcgtcgtaagcacaacatagacggagccattaatatatacttacaggggttaaggtatggttttgtatgaaactctcttcaagaagatgtgattgttctttcgttagacggagctttttgcgccgccggccacccgagttgctatcatcttcgttgacatgtggtgttgcaccgatcatccactcacgatcttcttccgtctttggtgtttggtttatgtcaaaatctctcatcccgtgatgatcacctaccaaattattttaattggaagacatagtattaaaactatataatatataagatttaataaatctttaatttggatatgatcttaccaagtgaaggagatggagagaagctcggaattgagattgttaaatctaaagagcttgaattaggtgagagggccatggaggaggataaaaagaaacagaatcaagagaatttgatgaagaagatagtgttttttttggaagataaaaggtaaagttgaagttttatatgataatagaaatgtaagtgtgtgttctgtgtgtatatacacatgtgaaagaacaaaagaaaaaagcgagacaaaggagaaagattttgtgataagcgtggaatgtggaatatggaataaggaattaagcataagagaaatatcgaaatatgtaaaatatttaaaagtatgaaacacgacaaaagattataaaaaaaaaaatctttcaagcagggcaaatacgaaggaacaaaatttaagggagaaatataatggccagtggtaagttgatggaataaaaaaaaacgaatagatcttaatcaaagaggagtga

SEQ ID NO: 56224 - DNA, 741 bp, Arabidopsis thaliana landsberg
cccttcatgttctgttccagatgaccgacacagaaatgataacctttactctgcgccgcctaaagcactcatcggtttttttagctgcttttcctagcctcctaaggaaatatattaaggtgtgttggagcaagatagtattctgttcatgtttcttctttatggtcctttctttgctcacttcattgttgctcttctgccatctaggttgcacttcatttctggggaactggtagtggtgcgctccctgttgtttccttgttgttcctgagagatttgtgcatacgccttggatctgactgtgttgatgactgtttcaagggaatgtacaaagcgtatgtgttgaattgccagtttgtgaatgctgataaattgaagcatatttcgtttcttggtaactgcttcattgagcttctcggcacagatatctctgcagcatatcagcatgcatttgtcttcataagacaattggcaatgattctgcgtgaagcgcttaacacaaaaacaaaagtactttctcaataatcttcataaattgagttcttctgacaacaattatgtgttgagaaaagttgctgttaactcttatttacatttggttgttttcacaggaagcatttcgaaaagtgtatcaatggaaattcatccattgccttgagctttggactggagctgtttgtgcctacagctctcagtctgaactcagaccagttgcttatccgctagcccaaataataactg

SEQ ID NO: 56225 - DNA, 529 bp, Arabidopsis thaliana landsberg
  unsure (1)..(529): unsure at all n locations
actatatggaaaattgtatgaaatatcttttatttttttattgaacgactttgtatgaaagatctatggatctaataattcatgaatgggggactttgtctccgactctccaaccaattaatagactgaacttgggatattctaataggcatttaataatatactaataacatttgtattattattataattttgaagttttataatgcaaaaagtcttgtgattaacacatctcactattagagtggtttagtaaaattgatatatggtattgtgtaagcactaaggttatgcaacagttcgtaaacaattatgcaatactacttcttcttgacacaattaattatgcaacattaaggttcgttattctcattaatgaacctggactgattacagactttgttaataatgtaaagctaattactggttaactccggtttacacaataccatatatcaattntactaaactactcttattatactcactgctcaatctttcatgacttatttttgcactattctcttcc

SEQ ID NO: 56226 - DNA, 1076 bp, Arabidopsis thaliana landsberg
accatagagtcttcagaagtttcaaaaggaaacaacctcagatcattctgaacatcaggctccctgaatttcctaccgatcaatctctttaactgagaaatggttgacttgggatgcatagtagcagaggcagcagcagcagcacccatgaatctctgcttctcaccaaaggaaaccatagcaggattttctcggttcgattcatcgttcaacaaaacgtcgatccctcgttgctttgcaactgcgataacacagttctcattcccaacatcaaatcccactacactcattttaacaaacctcaattacctgatttcgtctagctcaaaagaagaaaagaatctctgcatatgggaaaccaaaaccacaattaaatcaaccaatctcaaacagtaagagaatctactgattaaaaaggaatcgaaacaatgcaccatagatttttaatccatgtatccatagaaagtaagaacacaacccgaaacaatctgagaaacaacgcaaacattcaacaaatttgatacaaccaagatcaacttcacaagaatgcgcactaaaatcctaacaggatcgttaacactaaacgaaatcagaaatttcttctctatggtttagatttttctagcaaatcaacaataagagatcttaggtatatatatatacgcattatgaattttgtgctcgttaaggataaatctaatcaaacaataagaagaagaaaatgatgaagaagactataccgatgatcagaaacttcgaaggacctccgatgacttctcgaacgaggaacgaagaagatgagagaaagggctagaaattagaaaaattaaagagacaagggaaaggctaacgaaaagaaaaatttatttgcatttaagtccttattaattccttttaattgatattatatcccagagatatttttggacaacatagcgcaagattgattcacgatgtcgcacgaatgcccccacatgtttcaaactttcaaaagagtaggatcggattttcggattcaataactttttgacttgagattttatttcgctttaaaaggtaggtcatttgaacgtaca

SEQ ID NO: 56227 - DNA, 351 bp, Arabidopsis thaliana landsberg
tattcaccacctgatggtcgtgactattactagcgagtagccacacatatttattgcgaatataaccgatttttttattttagtccttttttcaaaataaattgattgacgtttagacccctgaccgaattattttctgttttggactttttgctcgacgtcataggtcgtggcgtcgatgaaacatagctcggcgccatagactatggcaccgaagcgtgacgtggcagcgtcggcgagggctgtcgtggcgccgacgtggcaccctagtctggcaccacaatcttggtgctgagctaagatttaagtgcttctgccctttcctttctccattctttcctttcccctctc

SEQ ID NO: 56228 - DNA, 349 bp, Arabidopsis thaliana landsberg
  unsure (1)..(349): unsure at all n locations
acttttgccatacacaaactctcatcatctctatcaactaactctaaagtctccaaatcaactaacctgaactctgaactatacttagctaaaatagaatctcgaaaatcctcaggcaaacccaattcctttctaatcaacctcaaagcatgtacacgaagaacaccgtgtttcgacaacaacaacaacttctttaccctcttcatagcatcaacctcacactctctaacaacattctcttcctcatcaatcaataccttanactttctcaganatcttacaccaaagattcttactaanagggatgngtaaagaatctcaaaagcatgagggatccttaccgataaaa

SEQ ID NO: 56229 - DNA, 1188 bp, Arabidopsis thaliana landsberg
acataagctaatacactctcattcagttttatttattaatgttacaccactttaagagcactcaaaatcaaaatacgtattcttatatgatattcattcatgtagtactagtacacataatagtataagatagatggatgggattggaaaatttgacaaccttttgtttaataattccttaaaaccaaggaaagaagaaagaggaaacgaaaaaaacaaagaggaagaagacaaaaccgactatcacgcattgtctggtacgtagagccaaaaggaacaatgcctctgttttagtgttttctttcttaaagttttttcccaaaacacaaacaacatttcacacacacgctattactcacaagataaccaccagagacgtggatagagagataaagattgagagaaccctctcactcccaaaaaaaaagctttagacattttctctaaatccatgtaagtttttttctttggttattgttgtttgttatcttctttgatcatttgctattattttgttttgtttctttcttagtttatcaaattaggaaagttttaattcagctctctgtttgtgtttcttcgtctatatctatttcaaatagtttaactagattcaaaggttttaaaattctgtactttctctgcaaaccctagttcctctgttctttaaccccctttttgttaaactgcagattctctgcatctttcaagaaattccgagtcgtgggtttggttcttctcgttacgagtctctcaaagtttaaatctttctttaaagaaaggttacatttggttctgagtaaatcaaaatcaagcttttggccttcaatggtggctatgtttcaagaagataatggaacatcttctgtagcttcatcaccacttcaagtcttctcaactatgtcactcaacagaccgactctcctcgcttcttcatcaccgtttcattgtctcaaagatctcaaaccagaggagcgtggtctctacttaatccacctcttgctaacttgcgccaaccacgtggcttcaggtagcctccaaaacgctaacgcagcgctcgagcagctctctcacctcgcttctcctgacggcgacacgatgcagcgaatcgctgcttacttcaccgaagcgcttgctaacagaatccttaagtcctggcctggtctttacaaggctcttaacgcgact

SEQ ID NO: 56230 - DNA, 1365 bp, Arabidopsis thaliana landsberg
atgcaggttacttgtttgttttcttaaagatatgtttgtatgtttgttcaccttaatcacttatatctttgatcttgtttggctctcagaactctatttctaaattattttgcaggagccaagagctgaaggtgatgcagaattgtgctcttcagtcaatcaatacctcaatcaaccactaggcatgtaacattcctaccttgttacaaacagtctaggatatgactgcatccttgtactaatgtctttcttactgtttaaccttgcaacttccatgatgagcaaactagctttcttatccttaaaattaaaatacatattctttcgtacattcattcatctggcattttatgtgtcaacgcggatttggtaatagtttcatggtactaatatttataaggagcttccctttccaaatagcatgcacaacaatttcttttcattagctcatgtaatcgtttccatcatgaatatgaaaaaatttgccacaaataggtggcgccttggttgtagaacactggttcaaatccatatttctgcttgcttttatatttcatcgaatccaaatttagttgtaattgtaccatagaaggaaccgcttttttaaatttcctgcgtaaatggatcttgagtgtgactaccaatcagtctaatgcgcttatcgactgaatggtgaagaagtttttaatatatttcaaagatcagatttgcaagagtatgtttgatttcttgcttgtcattgttggtttgcgtattaagaaaagtttgaagtgaggagctaaaatgtgttattgttttttagcactcgaaaacttctcttatcccagatggaatggacgccacaaattgtagcctttttacttataatgtcactaagattctgcaataattcacatattagcatgtaaatgttattttctcatctctttatgtgtattacgcatgcttgatagtgacaatacgtagtcaattgcataagacgaaaaggttgaatcaatctaataaattttcctgtgcaccagagtttcctggtgaagaaggacttgcagctgctatcacggaggagctggaagacatggcagaggataatacatcatctaggtactgattaatgtcaaagtgatagtctcactgtcggttttgcaaagtacataactggcttaccattttatcttcagaaatgggttgattgctttgtggtcagtgtcattgaaacatatactttcttgctatttttccttatgttgcatctgtggaatgctttggtaacttacatcctacttgtgagttgcgtaaatggactttgcacattaaagttgtgtagacatggccactcaggggtcaatagattttctgctaaaagct

SEQ ID NO: 56231 - DNA, 402 bp, Arabidopsis thaliana landsberg
  unsure (1)..(402): unsure at all n locations
ccccccccccccccccccccccccncccccccccccccccccccccccccccccccccccccccccccccccccccccccccccccccccccccccccctcccgcttgttccgccnncccccggcccccacacccacccccccccccccccgcccgcccccccccccccccccccccgcccccccccccccccccccnccccctnccccccccccctcccccccccccccccntcccccccccgccctccccccccccccccccncccgccgcgcgcccccccccccccccccccccccttcttcccccccccccccccctcctcccccccccccccccccccccgccccccccccgcctccccccccccccccccccacaccccccccccccccccccccc

SEQ ID NO: 56232 - DNA, 626 bp, Arabidopsis thaliana landsberg
tctgatcgtgttggacaggactataaagtctatttatacgttttaacaatataacaatacactgtatatgtctatataaagaccaaattaaatactaggttttacatattcaaatgcccattttcattttttcgtttttagtttatatttttccattttcactcgattggatatattccttgcagcctacagttagatcaatctggatgttaattggaccacttttctcttttcgcgtaatttttagtttatttaattgaatattatgtataggtacatgataaagttatgctaaggaagattgtgttcattttatatctttttctatgttgagatgtggaaactcatgcatatagttgataaaattgtcaaataaatgcaaaagaaaatcaaaaaccacacaagatatgattctaaatgtttgccgcttatcattgctacagaaaacaatagtttatttaaccagattattcaaatttttatctaagtactctaaatcgaaaataaaattttaacacaaattggttctaattaatatatatttacactaattatataagcgagttggaacttataatttacttcccacatacaaatgattgcattcttaatattaagaatataaa

SEQ ID NO: 56233 - DNA, 1690 bp, Arabidopsis thaliana landsberg
tatatctctgtctatatctacagctcaaatcaaaacagaggacaagctccaatccaccaatggtgattttgatgtggtgacacatgttgtatatgtaaatgtgtgtagcataggaggcagggctatagagcgagtcgtgtctttatcggcttgagtttcaaccccatgttttcaggggagagaagctccggagagattcgggttgggctcaaaggacttcttggacttacgctctgtgtaggacgatacaagccatatcccatcaaaaagtattccattggtattatcatcgcctgtggctgttcttcgctcaccaacgatccgcttccctgcacctgttttatgtaatatgacttagaatggccataaaaaccataactgaagacatctgtattagtgatatggtacctcgactaatgcaccgtatcgtctgtctagtttggtggtcatgtgaacagcctcggagtggtaggcagaattttcaccaatgaatattaacgttctgcattgcaatttccttaacccttcactaagatccactctcctgtttcaccaaaaccacaaaacatactattttatcagctttaagactatattctggaaaataaatcaacagagagaaactagagaattacccgttgattgcctcaaggaatctccatacatttgtactctgccgctcactaagtaactggatagtcaaagattaaacaacataacatgtcaattttaattcaaactaacaaagcatcacaagattgcaagaatagagaagaaagattttactaactcttctgcattcttgaacaatatctgattctggaacatgaccattaccacgaacttcctatgagaacgtatgtcaaaactttattatatgtcttgtaaaagtagtgtcttcttctggaacgaaaaatgaaaattgcttgaccataccttgctgaagtaccgttttagtaacatttccttaaccactccacatgtaccataatagtaaagcaaattagacatgacctgcataataagttaaggaatatctgatatgagaataagataatcaaaggcataaccccaagtcaaaaaaagaagaagatatctttgtggaaaaaaaccttattgcacaaccattctgaccaagaaggcgcttggcacagtggagagacgagaattaagcccagaactctctgcctgtacttcatctggaagaattaagtttcaagcaaaattaaaaatttgacatcaagttgaatgaaaagcgtaagcgaggtaccattacttacagcaaataaggtcagaatgtatgctcctgctgtgacacccatacacattactgcaccaagtctggacaagagacgacaagaaataaataaggagaaaattctatttctatataggcaaaaaagttttggttttctttcttctgcctagtctccggaaaaagactttggcaacgaaacgaagataacgatataaccagaatctaggcagctcaaggaaataacaatcacaagtaaaacttatgtgatagatgaattcgcttacccgaaataattaagaacctcgactatctggtctgctaagtcatcagctgagagcaaaggagcatcaacactgatcattggagatcccaactgcaatgactcttgaagaaagcaattaataagggatatgaattgcattatcataggac

SEQ ID NO: 56234 - DNA, 1082 bp, Arabidopsis thaliana landsberg
agggaatgattgcatgaaagtttcattggaaaagagagcaaaatataatggatttttcatcttcttcatgggttgtatagtgtgggttctattatatgaaaggtcgactatgttcctttagctatacagaaccgcaggttgacgcccagataaaattaaaagaaaaaccaaaatgaaatgaactcttttgatggatcattagatcatatatatatactgatcatcatattcacaccataatcaactatagttaatttggtaacgggtccattatttgattgaaatattataatcttttgggtaaaggatcaattattttgattgaaaacgatcctcttcttcagaatcaaacgcgatgttgtcgtcatatgacgtagtgaaaaaatgtatatttgtggaacgtcttttataagctcaattgttaaggtcatggcgagtgatatctacaaactttaatcccactcataattattaaattatattattatatgatcaaaaacaatatatgcatgagcagcctatcaaacttggagccttcgtttttatccatgcctgactttacacctctatcattcccatgcatgggtccctttctccacctctgttgctctctctctttttaacacaatagaaacaagagatagcgagaaagagatgtgagattgaagcaaaggaagaagaacacaattgtgacaaaaatagggcttttctatttgactttttttttttttcactttcatttcattccaaagagtggaataaaaagacacttgtgcttttcccttccattgagtatgtgatctcaatatcattgctgcatcgatttcccatttatggagtaaactcatgttttgtttttgtatttatatatacggagaaaaagcaaatcctaagtaattataataaagtttgattaggtattatcatggatgctttcttttggtattaggattagttttctagactacataataagaatttcaactgaaaacgtttgtagactctagtcttaatccatgtaaatttttaataattatagagtagacatgttcaacgaaaactgatctctgattcgatctaac

SEQ ID NO: 56235 - DNA, 350 bp, Arabidopsis thaliana landsberg
tgacaactttaaggtctgtcctcacgcctataataaaagtcgggctgggggtgttaaccgtacaattatgctgcccacgataaagtccttaacaattttgctgtctcttggtaaatcagaaagctttgagcaacaaaaaaacaattatcttgtactaaagagaaaaaaaaaactaaacagtccaaaccaaaaagttttcttcttccatagttactattaagagctgtgaaacgaaaatcgttacgatagtgcttcaatggcttatgcggcacgcaccattaatcattccaagaaggtaactgcttctcgattacatttttcctccgatcattttgctatccctttatttt

SEQ ID NO: 56236 - DNA, 565 bp, Arabidopsis thaliana landsberg
ttgattcacaccgaattcaagcgtggtgaccacgctcacatcagtaaagggacctgttttggggatcatgttcacttcggccatagcgccaacgttcaccggcaccagcgttgagggattggtttcgatccgctgtgtaatgggcggttgctgcacagcccacaactggttcatgcaggaaccggttaaaaagagcacaagggcgctcaataacctgatggatccaattttgacattcggctttttcataggtactggtttggttacttggtttttagcctggtatctttgatcttataatctgcgtatgttttggcggcaacaaattttcctttgattaccgagaaataattcgattcatcgaactctctttgataatcgatggatatgcccgatttatagttcctgaagattgtttcaatgcgcggggccgtggcaacagctccttcttcagtcggatctttcagcttaaccttgaaatatgaaatggtctttttcatcaatccttttttgtcaaagttcattttaatgtgtgaaatcttcatatattctttgaactcgactt

SEQ ID NO: 56237 - DNA, 109 bp, Arabidopsis thaliana landsberg
caaatacatgaagcaagctcgtgaaaaaagactccagtacataaagcaagctcgaaaaaacggtaacaatgagtcaggtgaaacattgaaatcaagaaacatcataggt

SEQ ID NO: 56238 - DNA, 570 bp, Arabidopsis thaliana landsberg
  unsure (1)..(570): unsure at all n locations
tagagatgctgttatgtgatgctttgcgaatacgtccatagttaaccgtcgttgaaagagagatttgatcgaatttaacacgagtctcagactatgcaaaactggtttttagaggtgggaaccaaagcaagctcaaacttagtaagatcttaagagtcaatctacttttgatctcgtccggacttgctatatccctactaagaagaaagataatcttgttttatatgtctcaggagggacataaagataaacttgtttttttttgtgaaacaaaaagataaacttgtttaaaagttcaagttagagatgatgataatgtgttttaaatttatataaattcgatgcaggtctataacaagtcaataatttgacaaaaaaagagagaaagaaaaacaagtcaataatttaatttcaataattcagntgtcgcatgtaataagttaagtagtaaacgccggataacaagattttgaacaatataaatgtactttacctacgatcttgactaatcgagggtccataattggattaaaaaaaacaaaaaaaacttcaccaccctttaacactcac

SEQ ID NO: 56239 - DNA, 1539 bp, Arabidopsis thaliana landsberg
gaaaatgtcataagacggaatctcgtcgacgacggtggaaacggcggttgtcatagctctctgtcgtcccatgactgagactacaccgtggccggcgtttgtttttccgtctttatctttaattgccacttcggccattagtgcatcgactaaaacgtgtgttccttctgatgtcccaacatctcctataagatacatgtagaagaaactttattagtcctcgatggtggaaaaacattgttgtaatgatgttttaaaataaattttgtttcgataaaaccacactaaatctgtgtttatttttatgttgttaagaccttaaacaaaataaaagtaaatatagtttttcttcaagtatgaaatgttttaaagaattatttagaatgaacaatatttagaaacactcttgaaaattcagaaaacaaggaaaattagtgtctttcatatctagtaaaactacgtaccattgttttcgatttttggtaattttacaggtctgtcctgaccgccaacggtatatcctgaatcagccactcttaccctcttgctgtcgccacagtcgccgtcttcggcgattatgggtagagtagtatccgttttcatgataacaactcctctttaagtgttcgaaaactaacacatccgttgaaggcagaaagtattttatatacctaacacatgcttatatatacacaagctcatatcttgtcgtgtactattattaaaaatgaaaaaaatgaaagaaaaaaacgtaaaaaaatgaaatgacggtctagagacggccacttctatcgtgatacgttttttcatggaacaaggaaagcacttaaatagaaaccgtaatctagacatcttggtagaccacattgtttgtgattaaatatatatatatttttgtctgctagtcaagtggtttgcatggaagattgaatccgtcaaattaaagagtcggtgggaacatcgaagatttagccatcgatcaggctaataaattctgacttcaatagtactactaatatcttcgggcatcaatcaaagattataacaactctttaactatccgtattcaaacctaaaattataacaactttaaacttatgtaaattcaaaataatatgttagttatttatatttcatgccaaacaaaccgccatcaattgatgcatgtatgtgacataaaagtttttttttttttttagtgtgtgtgaatactatatatccaaagtacttaatatacatattgataagtgacagagaaaaaaaagatacaactccattaacttattattaaatccaataaaatacgtagtacaatcaattcattaagttttctattcttgtaaatcttcaaaatctaaacctggttgagaaaatatctgttcttttccatcgataagtattcgtcgaatagttcaaatgcgccaggcaattataattatatacgttaaatgttagtggaaataaacaaaagaaacatcatttgcctgcgaatggaggtccgtccactaacggacacatatcacgagtaaaagacacacg

SEQ ID NO: 56240 - DNA, 941 bp, Arabidopsis thaliana landsberg
cctggaaggagagatctatctgctctcagaacttactgtggcctttgagaatatcaaaattaacgtcttccccaaaaataagattaagaataaacttgtttgatttgctgttaccaactttccatgtaaacccatctccatcaaaatatttaaagataacgtttcagtgtgaagattaagtttgagatataattatgttcataccagaactgatttgtgatgtttttatgtctttgattgccaaaccataaggagacgttatctatacgtcacatgtttgaatttataatttgcagaattgatatgagttcatttcaaattacttttccttggaacaccaaagtagatagactttaggtagattactctgctctgaacttctgatgtacctaactcaagtttctcaaacagaaccattcttgttgctctgttttgaaacctaactctgtttgtttttaggcaaaactagtctctgaatgctatatgatcaaacaaaaatggagtttgtaaaccctagaataagtttgtcttctttgctttattctacacagttacaaacaaaagcaaggtgttgtcagaaaataactatatcatatcaccgaactatccttgataaaggttacttttccccatcctccagaataaaagccaaaagaagataaagcaaagaattaaactttagaacaaagaaaaaaaagaagggtttagtgttattgtattgatttgatgtgataaaatcgccgtgaggtatatatatggtatggagttaacataggatataatggtatctaacaagcaaataattgatcttaatgtcttggaccaattatgtcaatggcgttacgtaatttttaattctctagtttaaaaataaacaatgattttcagcttgatgaacttgtcatcttgcgcagagaatcattggaatataaatacctaag

SEQ ID NO: 56241 - DNA, 492 bp, Arabidopsis thaliana landsberg
tattgctctgcatatggtaaagtttgctaaatgtgcttgggaaaataagctccacactgcgatgagaacagtccagattaaagcttagataacgcagatgcttcatctgatcgatagatgctgggactaacaacgctcgttcatggtactgtctcgttgtaacgaccagcgcccgcagtttcctcaggctcctgaacattctgtccaagacttcctcgttaactaaggcgcgacctgaccgttcctcagcatcttcagctgcaaatgttttcctcttgttttcgctgtactcttcgacgatgatgagagtgcgtagatttaccagacctagaattttctttgtgatagctgatctactgtcagtcccagtgccaacaaagagatggcgaacctcctgcggaatatgttttggtgagctatttgaaacgactctgaagcattcgcttccgctgaccctctctgccagctcgtgtagcaggtcatgaatcgtga

SEQ ID NO: 56242 - DNA, 776 bp, Arabidopsis thaliana landsberg
tgtcttagtagttcagttcagagaatttgtcatgcttatgtatttttttatcaatagttttcacgttttatatctacaataagaacccatccaaaaccattcctttttacaataagattaactcaaccctaatacatctagtgactagtgtatatgaagtagttttttccgtatattcgaacatgtatactttattcaaatttccatgtactagtagagtatttagggtgtaaaacacaagtacattataatcaaactaaacactatccgacaagttagatcatagtagatgatgtggtccgagaacaaaacattgaaaactaaaaggaaagcaaaaaagaagaaaacaaaaaaaaaaagtaaattagttattgcacaatcagacaaatagagaggccgagacgttgcgtcaatgtttttggtttttatattctcccaatagattggatttggggtagagagagagagagacagaagtgagttgggacagtgaactttaaataagaagcacatgggaacaaaagatgtctggatttagggattgaagatgaattttggtagggactctgctcattttcacccttacatgttgatctcgtctttccttaatcttgtcctaatgctcccacgacatgccgggccatgtgcctcctccgttcccaactccttcacgttattactcaaccaatctatttctacttcttattcaatgcacgtacatctcatttttttgtaattcaaggaaaaatattatcatactatgtgctctgtgtgtg

SEQ ID NO: 56243 - DNA, 844 bp, Arabidopsis thaliana landsberg
tccgaaaatggtcgcgttggagctggttttgttggagatagagacggagacaatgatggtgcagtcgagtgttttattgatcgttgtggcattgaacgggtttccttcatgtctgcatcaccaatttatacacagagcaattataagaacctgaaatgcctccatagaccatagtgtattagtaaacaaaagagcacttacaggaatttcggaatgcttagtaatttgtccggtatgggtccagagaagaggttattctctatgtttctgtttcaagaagacaacaaaaactaagattttggaaaagttactcactgcttaagtacttatactttgtgagagaaagaaacatacaagtcttgaagaggaaggccttgaagaacgtccagagttcctgagagctgattgttctgaacacgtctgcaaaactcagactatcagctttgtgaagaaagaagccaaaagagattcaacattgtaatgatcaaaacttacaatgttgtaagagttaataaattctccatagaaggaggcaatgtgccgcttatattgttagatgatatatcactgcacaaagatatcaaatcacaaaacaatccatagaaacaataactgttaacaaaactacaaacaagaagaagcatacagattaatcagcccgacaaggttttgaaacacgtcgggtagctcttcagagagaaggttatcgttcaaagacctgaaaacaaatggtatgattcttaccagtcattagcacaaagcaatggaaaaaaaagaatttgggagttatctgaacttacatgtcattcagaaaactcaatgttcctagagatttccggatgct

SEQ ID NO: 56244 - DNA, 1305 bp, Arabidopsis thaliana landsberg
tggaattccagcatctgctagagctagagtcgcggcattgatacaagctgatcttgttcctgattacagaacataacactaatggctgatcagagattgaaagagatcaaaaggtcaacttcagaacagaggtttagtttaattttacctccatcagccttgtagaacctgaaggaaaatatcgatctgcataaaggaaacaattcatcaggaagcaagcaaaaggaggaggaagaaagaaaatttagatttcaatatcgccggagagtaaaaagtaaacctgagagtgaggcatcaattcggttaatatgcaagcttccattgtctgacggatgacaagagatagctctgttgatcgcctgaccatcataatacacaacaattcaaactttatgattttcgtaagaaaaagcaaagagtctctcagctatatagtaaaatgtaacctgtcgaatttctgtcttctacggtcaccagtactaaactgagccatactatactcacacaacacctaccaaaacatacaattagcaataagcattccatattcaccaagaacaatactaaacaagatcaaagcatatacataccactgcatggtcgttcttcttttgctggctcttgttttgaatctgaaggagcacattaacagaaataaccaattcgctgaattatacaattaaagtatcaatcttgataggtgagtaacagagtaatcaagtacctctcttggaccataaacagctgcaattactttggtattacccatctcgaagacagcagaactggaaacaaagttggaattttttgttcatataaaagtgccgaatatagaactgagatacggaaaaagataagagacagattttgagttttacccgtcagccttagaaacaactccaacttcagctacgatttgcctcatctgagattcattacaagcaatcacgaatagaccgattaacttgtgaaggcagtggcttacaaagacagtgaatagagatgcaaacatacctcgttgaatcggcgaccatctaatcgaagaccttcagggtttacgtactccattgttgtgaactctaggtagagataatcaaggatgagagcaatgaaagacagaaacagaacaagtttaatactttctgatcccacagaacagggaacaagagacgaatttacctctgccagtactttagcggcggcgatatgacggagggcgatggacggcgtcgagagaactgaaagagtgtcgacaacataaagattagggctttttggttcctttttgtgaattaagtgagattt

SEQ ID NO: 56245 - DNA, 726 bp, Arabidopsis thaliana landsberg
actccctcactcgatacgagaatcatgactctctcccttctcaaatgccagctcttcgatcaaccacccgttctttcctcgatttttataaggtaggaaattctgagaaattatcaatttcgcttatcggagaaacgttgtttatagatctgtcgttgttgttgtggctttgcacagttcgggaataagaaagcaattgaagatgagcgtgctagactgtaagcttgcctttatctagattcaattctttttgggttttgctcctattcagattcagcattgatttgctatctgtttcgacatagatcgtctcaatgagaagttgattagtggaatttgatgtgatttagggcagtaatgatgagatgaatcggggttactttgctgatatgaaagaattcaaggaacatggtggtaaggtataatcatgcaacttcttccactctctctctcttattggtaggatccactatcacagatcccagattttgtcttctttgcaacgccaatcttaaagggtggattgttttcattagctatggcttatatcatctgggttcgcttgtacttagttatgcatgatttagataccgtagcctgtagggatcttgtatttgctttatgaagtttcttaactgtcaattgatgtttttgtagaacgcagctgcaaataagactataattcctgccgcttcagccatcaaatttccggtattagcagtgacc

SEQ ID NO: 56246 - DNA, 540 bp, Arabidopsis thaliana landsberg
  unsure (1)..(540): unsure at all n locations
tcttttgaaactctttctttttgtttcttttgcaagtgtcaaattcaagttctagtgtcaagattcaaacctaaagttgatcaaattaatagtgccctcatttattttaagacaatattctgtttaaatgcttagtttaattcaagattccatgtttatcattttattttaggaaaagttaaataatttcatatgcgaaatcttaattagaaaatgtaatttgaagctttagagttcttctccaaaatatatagtccaaccaaagagtaatgtaatccatatcatgatcttttttaattgatcttttattagaaacacttttaaaaatttggaagaagttttcctaaatccattcgttaggattttagattgttacaaaatctttttcaacataacacanaagtagcgtctagcanaagatatgatgattaatggaaatagtgcaatactccctcattctaaataaacaaatatcttggcttgaaatcgcagtggaaataaatagaccatgaaataccaatggtgctaatagtaattact

SEQ ID NO: 56247 - DNA, 519 bp, Arabidopsis thaliana landsberg
gattattgattttttggatgcctgggtagagcatctccgggtgttggctaaaaaaagatccctaaactcatgtttagcaagttgctaaatacctgttgggagtaaaaaaatagtttagtctccaacaattcctaatgtttagagagtaatttaattttgaatctggatttggtcgatccatttttcttttgagaatgggggagatttggtgcgtgttacaaaaactagacgcctctagatcttggtactgaaacctgtagacgctgcaaattgcaccaaaatagtagtaccaccaagtctgtttctatatgtttctgtctcaaatcacagcgaaatagcaggtgcaaatcacaacaaaatagcataactgttaattgtatgaacccattagctgaacctaagcataaatgtaaatgtctaaaccatgatttaaagggaagaaaataaaagagtgaactctaattcttgcgaagagctacgatcttggcctgcaggttcatgtagtacttcttttgcaac

SEQ ID NO: 56248 - DNA, 378 bp, Arabidopsis thaliana landsberg
atggacgcgatgctggagctgatcccctatgggcgcgtcggtgatccggaggacgtcggacgcgcggtcgccttcctcgcctccgatgcggccgactacatcaccggccagacgctcttcgtcgacggcggcatggccctctatcccggcttcaagggcaacggctgacacgaaaaagggcggcccgagggccgccctttccgcattcccgatcgaagaacgacgccgctcagcgcagctcgtcctcctcctcgttctcctccggctcggtgcggcgcatggaggtgagcttggcgaatacggcggcggcatccagctcgccgtcctcgcgcgtcgtggaacggtagttctgggtctgcgcggccgagagcaagcgct

SEQ ID NO: 56249 - DNA, 1554 bp, Arabidopsis thaliana landsberg
  unsure (1)..(1554): unsure at all n locations
cctttagttcttattaatttacagctatatttgtttgtgataaatttacaccagtatatttgaatcatcatcttgtaagtatataaacatattaaagatatacacttagaattcgtatcataatagtatatagtgatgcagaacatatatgcggttgtctcttttagtggacaactcattcgttgttgtgattaatggatgaattattcgtggtaaattttgacaatttaaccacatcaattggttaatctccacaaattgtcggttaactgatcttaatatatttaattgcaaagaatatcatcgagtcgatacctataagagcatcttactaggagcaaattccaagatagagcagcttagtttataataaagtagtgccaccttagcttctatatcattcattcaatagtttatttagaatagtaacaaaaaaatgaagtttttgttaaatatttcgaaagaaaacatataacaaaataaataaaactaaaacaaatagagaccaaaagatgagacatatgaggaaggctaagttagttgttggaggctgctgtccggattacgccgccgtggggtcctttagccaactgttaaaattaccaatgagcgacttttatgctcgtatttttttttattttttttggtttgtgttacttatgcagttatgctagtttcttaaaaataaaataaaaaaatgaaaattttctaatattgttttcactataaaacttctctgataatttgtaggatttaggattaaactgatttttggaattaaaaacctagtaaaaactgaaaatgattttttttgtatttttgtttttttataattgatggctgctgattgcaatggggatgttggcaacaaagtcaagtaaactatggaagtaaccggttgagccggtggcatcacgaatgacttgaccgaaacgtggccatgtgttgctatagttaagcaatgtggaagttactatcaaagtatgtttgagcacaataattccaacattttgttgtttatcggttgtcgagtcatatttgttgtttctttcattcataaaataccattggaatttggtaattgtattataaaagtgttgtcaatgaaactctggaggtgtataatttctgatttttttggtctttcttttctatttttcttagtagaaaatataatataaaacgtatttttgtgtggttcattagaagcataatatctgagtttgtacgattttctttaagtttttagaccaatttacattttagtggcacatatctccagtctcagtgctatcttttaatgttttttttcaccttccaaataaaaactttactctaaacaaaatatagtcaactactgttagatgaattctcttccatgtgagtggtagcgtatagtagaaatatgtttgaaattatatggttatactattttgtcgtttcatcgcatttttatatacaaaaataaaaatactatatatacaaaaataccaaatntaacccanattaaatatactactgtatatatcacttaacanatctcaatactatact

SEQ ID NO: 56250 - DNA, 424 bp, Arabidopsis thaliana landsberg
tatgatctgacgaagctgtacatgggaaacaacgggggtggccggtggcatcccgtccgagctcggttcgtgtgagaagctccagctgctggacctcggcggcaacgcgttctccggtggcatcccgtcggagctcgggatgctaccgtcattggagatctcgcttaacctcagctgcaaccggctttcaggggagataccgtcgcagttcgccggccttgacaagctcggcagcctcgacctgtcgcacaacgagctctccgggagccttgagccgctcgcggcgctgcagaccctcgtcacgttgaacatatcctacaataccttctctggggagctcccaacactcccttcttccagaagcttgccctcagcgacctagccggcaaccgccatctcgtcgtcagcgacggctccgacgagt

SEQ ID NO: 56251 - DNA, 545 bp, Arabidopsis thaliana landsberg
tatgtttcacacttccattaattttcttaacaaagtatgggacttaattatagataaagtgtgttccccaaacggagggaaaaggagattttctcttctttttttttcccttctgtttttgtctttccttaattatttctcctttgttttgtttctttgaacccaaatcttgttattttgtttactgagtatgatgaacttaacaattaatttagtgacggtctaagaagatgtcaagtgccgtaattaccagctaattaagtactcaattccatatttgaaatgttatgttactcaccatttcctctttgtcgtttttatgattgggtcaaatgttgcggccaacaccagtacaagtatcacagatttaaatttagcttatgggatctttcaactagtgcctcacttctacttgggtgtgactcttttcgatgtattctttggagtgaataattcgatatttgagtttaacatgttcattattgttagagtgtgaaacagtgaaaggtgtctcttcgtcaatgattttctttttttagtcgggg

SEQ ID NO: 56252 - DNA, 572 bp, Arabidopsis thaliana landsberg
atatggagttttcaccagtataccctcctgtatagggatatcaacgttcctcttcttccaatggagcatctttttgttccagctgatacttctatgacactcactggcttaaaatcagatactacatatgatgtaaaagtacgtgctcacacgagcaaagggcccgggccatatagttcaagtgtccagttcaggacactgcctgtggatcaaggtaggatttgtctgcttatggcctttctcctttaaaggaatatcgatctttggaaatcaatatattgaagctgcaaataactgatcggcccattcatattaataggttcagctctacaagcaggtaatgtatgtatgacttaatccgttttgaaaaccatagacttcagttatagaatgccattgcaaggctggctggttgtacttctatgtcttcaggtaagataaatattggatagttggctgaattggagagaaaggagagttctttttgagaatgggtatttaaatgaatgctctaatcaggtaggcaatatacattgctgtcttagatcacatttctgctttggtctatgtag

SEQ ID NO: 56253 - DNA, 900 bp, Arabidopsis thaliana landsberg
agactctttatctcttttcatatcgcaactctcttctcatcttcttcctcagcaaggtaaaaaatcctttgatcttctcttcaatgtttcaagattattattatatctatctttaaatcttttttgtttgcgtgttctctcagagctatgaaagaccatgaaagagctatactggaagaaagaattaactattacctagcgaaacgtaccgaaagaattgtttttgctgagcttgatactggaggaaaaataatcgaatgtccaaattgtcacgttcaatttactcctactctcggtaaaatatataaagaacaaatctcttttattatagattttttttattttctcgaactattttttaacattttgatttggttattactataggaaactggatcgcggataagtttgcatgtaaaagctgcaaagctaacttatcttttagaaacagcacagcaaaaacagcgagatgtccttgttgtactatctcacgtcctgtgccaagtatgtgttcttgaaaaaaatcaagaaacttaattttttttttgtttagttcaaaaattggatctatggttctgatttgtctaatctcatcttttgtttcataaaaatgttctttagacaattttacaatgcttgtgtgtggcggatgtccagtgagcgtcgttcatcaaaaacgtgataaaactgtgaaatgttctgagtgcaaacatatcaatattccaactgtaatgtctttgattttctcttatgatttaaatactgtttgtaaatttcttcaaataactataatgtttgtttttggtttagtttggaagaacttatggggttcgtccagagaaccaagctcgtcctccgcaagtttaccggattgttcctcctcaaggtaacggggtagct

SEQ ID NO: 56254 - DNA, 116 bp, Arabidopsis thaliana landsberg
acactaaaacaccacttcccaatctactaacaatcttaaatcatcccgtcacacatcatcctaaaccaggaactaactctccatcacatacatagaccctttacttaaaccaccct

SEQ ID NO: 56255 - DNA, 561 bp, Arabidopsis thaliana landsberg
  unsure (1)..(561): unsure at all n locations
ccccccccccccccccccccccccccgccccccccctcctcccccgccccccccccccattttaccccccccccccccccccccccttccccccccccccccgcccttccacnccggcttctgttgcccaacaacccccccccccccccccccccccccccccccccccccccccccccccccccccccccccccccccccccccccccccccccccccccccccccccccccccccctcttgtttgtttccccccccccccccccnccacataacccccccccccccccccccccccccccttccccccccccccccccccctccccccctccccccctcccccccccccccctccctccccccccccctcccccccccctccccccccccctccccttcccccccccccccccccccccgtcccccccccttcccctcccccctccccccttcccccccgccccctccccccctcctccttcccccctcccnctcctcccccctcttctccccccccccccccctccccccccccctcccccccccccccccccctccc

SEQ ID NO: 56256 - DNA, 237 bp, Arabidopsis thaliana landsberg
  unsure (1)..(237): unsure at all n locations
ttttgttggaggagttcctttgattccagtctcggtatgaaacatttgtcctatgatagcattgtaatccataggagcatatccatctacactatctagccaaacttcaacatccaaatccataggagcagagtttgtcatgttatcgtacaataatatttcccaagcatcactataaatggatgctgcaaattccataactacttcgncttcttcttcttcttcttctccctccat

SEQ ID NO: 56257 - DNA, 871 bp, Arabidopsis thaliana landsberg
aaacaaaagggaagtatcaccaaagacataagccctaacagtgttacctattctctatcacattatcaaaatcccaaaatggttcctcaaaaactctgatttgccatatccaattattcttcatgacctttcccaataaaagagagtaataattacagagagatctaatgtttatcctatatgagaaaaagtacctgtgtgtgtttcacagtttcatcatacatcatcatgctcagagtgttttggtgcggtcatatgtagataggtttaatatcatttggtccaaaacttgctgagcatgttggacacttcttttgtcgagttcctgtgagcttttgcacacatgggttgcagaacaaatggtagcacttcgtaatcaccacctagtttgttaagccaaagaccaaaaccaatcagcaatcacgcacgcagttgactaaaagattcaagggatcatgatttgagcatcttgctgagatctaaataatggagagcagtgactctttacctcttttgggcgatcgttgcaggccttacacttcagaatttctttaaattcactgagttcttgtcggagcttttgaatggccgatgatccttctatgagagaccgaagacgagaaactttctttttggctatttccatttcctcctctatccttctcctattgaacctgatatacgcagaaaagaacgataccttcatcactaacacttgtttatgactattaattaggatagagaagatggagggagcaattgatttacctttcaatctccagttccagttctaatgccccataatccagccgactttgctcaactttagaatgggactcctccagccttgacctagcttgttccaagccat

SEQ ID NO: 56258 - DNA, 403 bp, Arabidopsis thaliana landsberg
  unsure (1)..(403): unsure at all n locations
cccccccccccccccccccccccccncccnncccccccnccccccccccnccccccccccctccccntccccccccccccccccccccttctngtcgtccacccccccccccccccccccccacccccccccnccccnccccccctccccccccccccctctctcccccccccccccccccccccnccctcccccccccccccccccccccccccccccccccccctncctcccccccccccccncccccccccccccccgccccctccccctccnccccccccccctccccccccctctntccccccccctctccccctcccccccccccctccccccccccccccctctccctccccccctcccnctccccccatcccccccccctctccccccccccccc

SEQ ID NO: 56259 - DNA, 444 bp, Arabidopsis thaliana landsberg
tgctgataatttttatcctggtaaaaactgatccgggacgcctgtgcggcgtttcgttcatcgaactggcctgctccttgggaaagcacatatacataggcaggcaatgctttggcataatccttctggtcataaaagctctcggcacggtagaaatgtgcattcagcacaaaacggccgccggtgaatattgccaggtaattggtgagctgggtggcagctgcagcatattgactgctcccgaaactggattcccccgcggcataggtgatagaatcttccactgaagagctgacggtgcgtcctgttgatttcaggaagttcaggtaagcatccggccggccgctattgacataaagactgcgcaggctctgcagcgcctccgtggcttgcgggctgataggggcatagctataccaccttgtggtacttatcaatcgctga

SEQ ID NO: 56260 - DNA, 1083 bp, Arabidopsis thaliana landsberg
  unsure (1)..(1083): unsure at all n locations
atcgtatcggtgtatattgatatattgtatatttttatttagtcgacatgttgacaaagaaaactttattgacatatatataatgtaagaaatactggtctagtactgtctgtttttgaaaaaacaaataagggcctagctatcttaaattgtaaatttgccannnnnnnnnnnnnnnnnnnnntccaatattgtaaaagcttataattaatgttttctttttagttctaacaaaagtctccaaggttttcttcaaaggtataaattaataaaagtaaaatgaaatattaaaacaaaattaagataaaataatatttccgctgaacattgtttgtaactgaatttatctttttcgggatttattaaaaatcacctaaagactatcttaaagtagtaggcacggttctgtatgtaaccattggattttatttccatgactgatagaaatttagttacaactaccaacagtaatagccaataggtaaatgtgtagttccaaaagagaagcctctttggaagcttaatttagatctcaacgaacgaattacacttactaacatcataatggaagtgtcacagtatttagaaagttcaacaatttctttgtaagaaaggatttttgtttttaattattataaacaacaaaaagcctgtgaaatttttgtgaatcatcaaactctattatgcaccaacaaaattagaactattaccattctaatatatcgtttaacgttttaacaacataaattgttttgtttgaccagctcaacaacttgttatactccagcaggagcggaacgttagttaccgtgtcacaaccatttatttttctgaaagtaaatagaaacttaaagttgatatcagagcgtttggttatagcatttacaattggcattaactatctacaccggtcgattttattgtatgtggcctttcttggcctttaaaaggacccaacatatctcccagattttgggcaaggcaacaaacataatcaacttaaatcttatctactttctatttctttttaatcaaaattaccgttcttaactatggcgaagtggtttttcactatcttcaagg

SEQ ID NO: 56261 - DNA, 941 bp, Arabidopsis thaliana landsberg
  unsure (1)..(941): unsure at all n locations
aatgtaatggctactaatgtggttgaagttgaaatattttcaaattttatgataccaataaataattggggatgtttggccatttcttttatttttatagactggttatatatataaaacttaacaaattaattactgagataactaactgtgattagatatttataatttgatgtagacacgcaaatagtttcgctcctagacgatactatcgagaaacaacttcgaaattttttctccggcgccggtggaattcttactcgtcggcgtcgggaactctctgcttctcgattcatttgcaaactctttcgatccctttgtaaccttttcatccttctagcttctctttttcaaaattttttttctcttgaactcttcttctccatgcctaccttctacggaacttcagagatccttgatagaacattgtggtggttccccgtgagccatctgttagatctgctcaggtcgttggtattgaagtcggcaatagagaagcctctcgaatccaaatgttctctagccttgaaactcgagcttagtctcaaattctcatctaaatccttggaatttagatgcttcgcgaccctcgtcgttcactgccctcaccggaactctctgactgccacgtcggaactggcgatgaagatggcggcggaagggttatccctaaacctaatccagatgttgctcttctcttatgggcttagcccacaatttggaagtcaacttttaggcccacaaagtctccagtctcggcccaacttaaaaaataaagtctcaacctttttaccagactggcctaggtttgtttctccaaaattttctacaagccactaaaattgaattgtctgcagtttgaacggatngaaagtggacttctattccatctctgcttcgacacgntctttaatctggctttgtatcattctcaacattag

SEQ ID NO: 56262 - DNA, 1099 bp, Arabidopsis thaliana landsberg
tctggtgtaaaggttaagaccttatacatctctggtgtttttgctgctttgttctcaggttcatcgcagaatctgatgtaccttacagtctcaaacgagcttccatgggcacaatcattcatggaagtgcagaacaccatgaacgcagaaatcaagaacatatttttgtcagacgggttaacggttctgaaagagctagaggcagttgcttcaggtgtcaagaaactctaccctgcgatccaacaaggatcaatagatcccatatcgctgcagccactgaaggactcggtcacagaattatcgaatgggatagatcttgtttcgaaagaagtggattgtttcttcaagattctgttatcggggagagacacattactagagaacctaaggtcgatgggtgcatcaaccctacaggcaacatcgccaaaaaaggctgccggaaaaaattacagaggattctgataaactataaatgtttgtacagatggttttacttcaagtgttccatcttcttggtattgaatgtattattaggtttttgtgcaatcgtagtcgtttgtatgagatgctttgaaagtagtagttgtataagtaaaggttttaccaacttatctatatatattatgaatatctttgaagctatcaagatcccaacatttatcaactgctgctagatccgtattatcgacagttagatcgaaaattcacagagaaaagagatcaaagacttcaaatcaaacagaagattatcaactgctgatatgattttcaatatacagttacattcgactaaaagattttaaaatatattaccggtttgattttcttgttagctagattattacatttcagttacggtttattctcggttgtgcaaaaatgaagttgaattagttcggttcggttcggttgatattgggattgagtttgttccggttacattgacttgtagaccaatatgaagtcgtcgtactcagagaaaagacgaagaaaaaagcaatgtcgtgtgttgattttcactcacgggtaaaaagagaagacgaagactcttcttcttctgatttgcccttcaaaagatccaaacttcacacaaattctt

SEQ ID NO: 56263 - DNA, 481 bp, Arabidopsis thaliana landsberg
  unsure (1)..(481): unsure at all n locations
ggttagatagaattgcctgccgcacaggaacgtaacaaggaaaacttccataagaaagancacggtcatacgtaaacgcaagcgtattcccctggagaaaaaattcgggccgtcaaaagataatggtgccgggggggtaaaacgtgaacgtccgggacaaggtaggaaagacaggaagggaaaaacccatatagagcacgaaatagatgagaagaaaatccaggaaaagatccgtgagacccaggctaagcttgcgggagcatcccgcggtaaaagcctgaaagcaaaatatcggcgtgccaaacgggaagaattggctgtacagcaggctgcacatgcggcagaggaaagcggaaaattacaggtgactgaatttatttccgtcaatgaatttgccagcctgatgaatgttagttctgccgatgtcatcagcaaatgtatgagcctgggtattattggtttccatcaaccaacggctgga

SEQ ID NO: 56264 - DNA, 519 bp, Arabidopsis thaliana landsberg
  unsure (1)..(519): unsure at all n locations
ttttggtatatggtttctacagacaccaaaggatgggcatggcattgctaacacatttccattgaaaataatgacaaacaagcaagagatgaagtactatcttgtgtatacaactctattgttactactacctctttgttgctaatgacactactatttttatggtccgatactagaagtgcaagcagtgtttctagaattatagcatatgttttgcgtgaggcacctctattccaattttcaacaatacatcataggggagaacctcaaaagccaactataggcttctcctaggtatagtcaattccttggtggaagagaaacatggaaatgatgagaacactaaactagaaaatagaaaatatatcaatggcttgagaagatgccaccagaaacttgtgttagagccttctttagtaccttccganatgtgatattctgctaaacaatatgtatgatttaagccttaaagcatatgtaccttctcttcttgagtgtctntgggttggtatagatgga

SEQ ID NO: 56265 - DNA, 569 bp, Arabidopsis thaliana landsberg
  unsure (1)..(569): unsure at all n locations
ttttgtgtgtaatgaaagagctgcaaaaactcaagaggacgaaaaaaagcatttgagattcttttaacgcagggaaatcatttttttgtttgaccaaacagtagaaacatagtgacttatacctgtgaggatcgacgaaaagtgattgatcgagaaacgagaatatgtcttcttgaaggaatgattcatagttgttggcctctgaccaggtcattagaggtctttgatcagccatttcgattgaaagtggatatagatagattgtaacgttcgttagtcttagaacaaggaaaatgaatcgtgtgtatatatacataaacaacttaacgtacatgcatagatagagaaagtacatgataagtgggaagtgggtatttagttctccgagatgatgagccgtcaaaatcattatatgttttctgtaagttacgagagagatagtaagtagaaattaatgattagtgttgattattntggttaatagggataattcgtttattaaaagctagtaatatcttctaataataggccctaagtttgtaacgttcaaaaattcataggcccgccca

SEQ ID NO: 56266 - DNA, 1063 bp, Arabidopsis thaliana landsberg
gatcttacgtgtcttgcagtttacagataaaatcacttcaatgttgcccaaaaagcattcccagcttgtgttagttcaaaatttccacttttctttgaaggctgtcatcctggcaaagcaaaactacttgctcacaagcccaaaatgaaattattgttttctcaagtgctgagaaattgctagtatattcaccatcgggttattaataattgatgcaggaatgatggattgcttacattcactgaaaactttgtgaaggaccatctgttaccgacaatgtttgtggactataggaaaggcgtacagcaagctatatcaagtaaaccccatatactatagagatttgatcatagagttttttgctattttagggtaattattctctaaatgtataacatagaattgcatcttgaaaagtgggctgttagtttggccccaaagacttggagttttgccatcacaaagtcgtaatagaagcatttgctctcaaaactaattgaattggtctgccaatatagggtatggcagttttatgaaaagttaaagcatctttgagaattattgcagatatctttaagattcttggcatgaaatattttataggaatatttacatttcactaatttatttaaaacaaagtaccagtaatgtcggtgtgtaattctgtataaattcaaggttagaaacccatggttctgaaatcattttgcaggccgtgccgcatttcggccgcgtgcacatacaactacttacaccgcaaccgtagaaaagggacgacctatcttacaaggtcttctagcaatagatctccttgcaaaagaggcaagtcgtctatgctttaaaactgcaagataaaagtttttatttttcataattttcatcttcctaaaagaatggattagttgagtggttacttccagttcatcatttaatccatttttgttttctcaagtttcaagatatttgtgttttgatgaacctacttgctcttcaaattttataggttcttggctgggctcaagccatgcctaaatttgctactgatcttgtgaagtatgttcag

SEQ ID NO: 56267 - DNA, 132 bp, Arabidopsis thaliana landsberg
acaaacagaaacacaaacacaaacacaaacaccgaaccagaacaagacaacatgaccaaaaccgagagggagcaataaaaaccaccacaaacgaaaagagacaacacacaagccacagagaacagacacaac

SEQ ID NO: 56268 - DNA, 154 bp, Arabidopsis thaliana landsberg
gccttttttgtctttgtttttagccaatttcttttttttctttccgccatgaattttacaggttctcttttcgaaacacgaacattcctctttacaccagcagcaacctcttctaagaccttcgggtagttaggatattcaaactttaaagcat

SEQ ID NO: 56269 - DNA, 415 bp, Arabidopsis thaliana landsberg
  unsure (1)..(415): unsure at all n locations
aaataagaggaaaagcccagaacgaagaaaccgaagaggacctcaaaaaacaaaaaagccctccgtggacagggcaacggcagagaaggaaggacgagcaaaaacgcaaaccccggcgcacacccacgaacgccncagaagaaaaacctaagccaccacccaagtacagaaaaccacctgaccaccacgaggcgaccgaaacaccaagagcgcgacaggcccaaccacaacaacccgctgcagcggacacggaaccaaccgggctcaaatcaaggcgcctaccggcagaagcagaaaagggcggcccccagccgggggaaccaacccaacaaacgcggcagaagctccctctagcctgcaacctgaaggaaccgacgccagcagcggaacctgcggtacagaccgtacccagaag

SEQ ID NO: 56270 - DNA, 662 bp, Arabidopsis thaliana landsberg
ggttaaagaaatagtcttgcacaataatagaatgaacagaatacatatcttggaaagtggtttctttaccttaagaaattcttggggtttacataacaaaagctgaggcatcttgggtataaccttccccattcttttatctctaacacctaatttatcaaattccttcaccatcatctccatattgctggctgagcaaccgagaagcaaaggccatctcctaatggcgtggtcaatatccattttgagcacctaagaaagtaaaccaggtgttggtagaccaatcatagaacaaaaatgataaatacaacttagcaaacacaaaaccaccaattttctgatcaacgtgatgtattctgtcttgtcaaattgtgcttaccgattcactgtaaaaaaatgagccgatgtgagaatagttctcttgtatgcttggtgagagaatccacggatacttcagcaacaattttccagaatccttgttcactacacttacctgaacttatacaaccccaatttgcaataatcagcaatcacgagaaaacaaagaaagtgcagctccatgctaattatgaacaaccaaccaaccataccttctccatagctgtggctacccttcgtttgatctcctcagtttttccgagcatgatgggagggtacaaaag

SEQ ID NO: 56271 - DNA, 1477 bp, Arabidopsis thaliana landsberg
actcgccatcgtcaattcgactttgtgagtctccctctgcgttagttcatcagcgtcggcgagatgaagcttcaggtccgaggcgtggaagcgaggaatctaccggctatggatctcaatgggtttagcgacccttacgttagattgcagctgggaaagcaaaggtcacggaccaaagtagtgaagaagaacttgaaccccaaatggactgaagatttcagttttggcgtcgacgatttgaacgacgaactcgtcgtctctgttcttgatgaagataaatacttcaacgatgacttcgttgggcaggttagagtttctgtttcccttgttttcgatgcagagaatcaatctcttggcactgtttggtatcctcttaatccaaagaagaaaggttccaaaaaggattgtggtacgtcctccttcctctatattttgtctttcactacattgacgcaagtttcgaaatttcattttcattttcattttcattttcatgtttgatccatcttgtccaggtgagatacttttgaagatatgcttcattctgaataactcggttcttgatttgacttctagtggggatcagacctctgcttcgaggagtcctgacttgagactagaatcacctattgacccctctacttgtgcctctccttgtagatcagatgatgcttcatctatcccccagacaacctttgcgggtcgattcactcagatttttcagaagaatgctatcaccgctacacctacacaatccagtagtaggagcattgatgcatctgacctatctgagatctccaaacctgtcttttcccttgagctgtctgaagatgaatcatcttctacttcctttgaggaattattgaaggcaatggagtcgaaagatcagggtagtgaacctcctagtaatctatcaggaggtgtcgttgtggaccagttatttatgatttccccatcagatcttaacattgtgcttttcgcatcggattcaagtttctatgcatcattgactgaactgcaagggaccacggaagttcaaattggaccatggaaagcagaaaatgatggcgagagtgttaagcgtgttgtaagttacctcaaggctgcaaccaaacttattaaggctgtcaaaggcacagaggagcagacatatctcaaagcggacggagaggtttacgcagttttagcaagtgttgccactccagatgtcccattcggaggtaccttcaaagttgaagtgctttactgcatctctcctgggcctgagctgccatctggtgagcagtgttcacgtttggtagtttcatggagattgaattttcttcagagcaccatgatgagaggtatgatagagaatggagctcgacaaggtctaaaagacaacttcgaacagtatgccaatttgtccgctcaaagtgtaaagcctgtagattaaaagtatattgggctgaacaaggagcaagctctctcttccttg

SEQ ID NO: 56272 - DNA, 944 bp, Arabidopsis thaliana landsberg
ctgaacgtagaataaaaatagcaggtaataacctttcaatattttcaaggataatgatgctcattggagatttatatgcatcctcaaagacctggtctcattcacaccaaaaccaattgtcagtggatagaacagaataacaagaagtagaatgtttccagtggacagaccttgacaatgtgagcacattttgtgctctcagaaagaccaatcatagtttccgcagaaacctacaaaataagaaatcaatatcacacaaagagtaaaagagggtacggactaaatatactgtacaaagaaagatagacacttactatcttaacatatgggaagtcactatcgataccaattgttgctgctaaagcagttttcccactgtccagacaaaaaagttaaaacaatcagcaacaggttataaaacagtaagccaaaataatgtggctataactacggaagataccttccactgggcccctccagaaggcaagtgactagaggacttctagtactaactttaacttgctcgactagaagcatagctcttttgtaaatgtgattatgccgatgaccacaatctaccatcccattgagtctacatacatgtcagaaatgtaaaaactaaggcactggcaaataaaaatccaaaagtaatgcaatacatgcatgcgaaattgtcgctggaaatacaattggatcagacagaaaacaaaagaaaatatgtatgagtagtagagtactgcgttttcagaccatgactcacggaaaagaagagaattaagtttggctaaatcagcatatcaatgctaaaggcccattcgatcaagaactatgccaattcgtcaaaccaccacacactcattaaagaaaattacctgcagcgctctaggtcatctgtggaggctccaaatgcaggttgaacttcatagatagcgtggagaaaatcc

SEQ ID NO: 56273 - DNA, 305 bp, Arabidopsis thaliana landsberg
  unsure (1)..(305): unsure at all n locations
caaaccacgcgaggcggcggcaggagcttgtcaaacggaggaggccctcctggcaaaaacagggcnaaaacaccaggagagagcactagaaccaancacccggccgcggcggggacaaccaccggagggcgacaccgacgccagaacaacaccacnnnngcgggagaaggaggnanncnccccgaccaccgaaaagaacccaacnanncgacgccancccgnggaggaagccccccgggaaagggcacgagacccagaagcacagagcgcgcaaaagcccccgcccccacgagaggcccaaggaa

SEQ ID NO: 56274 - DNA, 1296 bp, Arabidopsis thaliana landsberg
gtatgtgatctttggtttttgactaaattgcattacctggtctggtatatatggtatatgcataaaaaattcatgcgggcggtagtgagaaaatcatcttagaccttgtttcttgaactgcttatgtaggttgttttaaacacctttgatgctcaaccactaagcgaagaagagggagaggctaatagtttggaggaagaggcagcaacttttaatataaagtacctaacaagtagtaaattgatgggtttagaggtaagtatgctgtggttggacatgcgcacttctgaacttagcagttcactcacttttttttctacctttcgccacagttaaaggattcgagtttccgacgacatattcttctccagtgcctcattatgtttgattatctaagggtaaatgtctctcaagaattattgcacggaaattactctctctggtattctggtataactgaatcctgtttccttttaggcaccagggaagaacgacaaagatctgccatctgaaaccatggtcagtgttttttcttgtttaatgagaaaattcctcttgctttctttcaaaggttcacaaacctagttatatctcagtattcagggttttatgcataattactcaaaggtattgtttatcttttcggtctagaaggaagaacttaagtcatgtgaggatcgtgtaaagaaattgcttgagatcactccgcctaaagggaaagaattcctccgtgcagttgagcatatactggagcgcgaaaagaattgggtatgtgtgctgctttctctcttacctgctgcatgattttctggcttgtagttgagggccgttaatgatcttctacaatacacaaataacaggtctggtggaaacgtgatggatgtccaccatttgaaaagcaaccgatagataagaaatcacctaatgcagggcaaaagaaacggtatggggaaaagctgaccttgtaatctaactgctttgtactcatagatggtgtccgccattcgaatttagaatacattacgtggaagaaattgagaagatgttttttccctagtgatctctggtcgctagtccattaaagtgagaaacaactaataaatctgcattacgagtattaggctcaatatgggttatcttttgcttttacaggagacaaagatggagattgggaaataaagaactctcccaactttggagatgggcagatcaaaatccggtatgcattataattctaaaaatccttgttcgttgttcatattatgccacatgcttctccagctctcctgtcggatc

SEQ ID NO: 56275 - DNA, 1474 bp, Arabidopsis thaliana landsberg
caaccgcctctttggtggagcagcctgtattgagatccaaaacttcacaagggatctcatcaaaaggataatctttggtgcttcggaaatcttctgggagcttctggttcaggtagagattcagaaacaaaccccgcctcctagcgatggtggtgttcctagattagtcagttttgtaactgattactgcaataaacttattggagataagtacaagtcaacactaactcaggttctgctcatacataagagctggagatcagaaaggttccaagataatcagcttatggttgaggttttaagaataatcaaagccattgagcagaatctggatgtatggatgaaagcgtatccggatcaaacgcttgcgcatttcttcggtatgaataatcactggcatttatacaagaacttaaagggtacaaatattggggatcatttaggagattcgtggctgaaagaacatgatcagtacaaagagtattacgccactgtcttccttagagacagttggggtaagcttccaagccacttgagccgagaagggctgatacttttctcgggtggacatgccacggctcgtgatcttgtcaagaagagattgaaagcattcaatgatgcgtttgatgagatgtataagaagcaagcatcatgggtcttaccagagaaagatttaagggatagagtttgccagcagatagttcaggctattgtgccggtttacagaagctatatgcaaaactatgggccattggttgagaaagacgcgagttcaagcaagtatgtgagatacactgtggtagctttggagaagatactcagttctctttacatgcctaagcccatgagatatggaagcttcaaaggaacaccgccaagtgagaaattcaagaatgatgttgaccttaggcgtactacttctgcagttgtctgattgaagccatgttctgttctcgaatgttgtattaaaatgtgtccacattggtatgatctccatctcctggaagcagaggtattgttacacgtatataaatactgtcaatcaggtatagcttttagtcattggtcaagtccctttagctcattagtttcataagacttcatgttagggaccaagcgggtttagattattctatttaatgtattaatctgaagaacaggattataaaatgtgggattcctataatatcgaaagaaaaattgtccctataaatcttcttgttcttagtgttgtgcaacatttgtaacttttattaattttaagacaataaaggaagattcagcaaaaccattttatgtgttcgttctctattgttcattgcacaagtcgctatttggtttacaactcaagagaagtgcaagatccaacaggaatctgaatttcgccccagtgcccaggaagaatccactctgcaacaaacttactcttttggacttcttagcccttgctataagttattttgcaataagacct

SEQ ID NO: 56276 - DNA, 1146 bp, Arabidopsis thaliana landsberg
cacacaactaaccaaataacaaaacaaacactatctacatagttttaaaatttcaacatctagcataatcaaattttaagcttgggcaacctatcatattaaaaatattctaaaacatgaaaatatggaaagaaaagaaaaatataaactatacaaatccactgtagttaaaagtcggaattctacataattattcggaatgggggatatataacttgttctatctggcacatcattaaatattaacaaagtttgttagatatttctatagtattgtgtaaaaacagaactaaattctagtattcaaagaatttgttaatgcagtgacgttacatactagcagatccgaacaattaatatagatgtttaaaagtcttcttttttagtttatttgaacacagtcgaggggtaatataatttatttgtcatagacctgcttcatgaatgtaagtcgtcgtctaatcacgatttgagtcattggtcgtctaataattttgtaacaatttgattcgacgctcgagttattggcctggcaattgtcatttaaaccttacattgagagaagggtcactggtcacatatgtacaacagtacaagtcaagcaaagccacgttcaagacatattaattaatttatgttgcgataggaaatgagaatgtgaacacgactttgatgccaataatggagaccattttttaaaatgaagtagttgggacgtagcttccatatattaacttcttctggacttttaaattcaatatatttatcgttggattcgtgcttgcaggcttacagcatcaaatgaatactgttgactagtagaagaaaacacccatcgtgcttgcttacattttttgggtggccaggtcatactattattggtaaacattaactgataaataagactatttacttaactaatagataaccaacccaaattctattttcatgtttctgaaaagccaagctctcaggtcatggtttagaatttcgtgcttgaaaccttttgtttcaatcaaagaatttcgggttaggcattactttttcactttttctaatagaaggattagtgtgaagaaagattccatattggaaagatggaaaggactaaatagtatacaaggcacatgagcccttctactaatt

SEQ ID NO: 56277 - DNA, 162 bp, Arabidopsis thaliana landsberg
ttggcgggcggcacaaagaactgcctggtcaaaactggaacacgtaacgtaaagatagatggcaacggtggagaaggtatcggcgcactgttacctgaaacagatcgccgatgttgacgatgagcgcgtcggggcggggcttgacggccacccagccggtgt

SEQ ID NO: 56278 - DNA, 430 bp, Arabidopsis thaliana landsberg
tcatttggcactaatcagtctcatggaaacggtgcatttcttctgtcataagcacttcatggtttgttatgccccagctagcagttggaaacatcagacggttgaataaaatgaggaagaaacatctgatggtaaggtcatcatcctcgcctttccttaaacgatcctgtagaaatgtcacattgaacttgtctttagtcaaaccaagctctgccctcaagttgcttgctgcaactgcttcgtcaatccccaatgttctccaccgccatgatttggtacaccaaggataagatgaacaacgtcctttgtgatttgtagtttctttcctggaccaggatgaattgtcatgtgcttgtggtcaagcttagccatcaaccattgaaggtgtgatctactacacagcgcatctactgtcatatcatgaatgtta

SEQ ID NO: 56279 - DNA, 476 bp, Arabidopsis thaliana landsberg
  unsure (1)..(476): unsure at all n locations
cccccccccccccccccccccccccccccccccccccccccccccccccccnnccccccccccccccccccccncccccccccccccccccccccccccccccccccccccccnnccccccccccctncnccccnnncgccccccccctccctctccccgtcttgagaancnacacccccccccccccccccaattatcccccccccncccccccccccccccccggcgccccccccccctcccccgccccccccccccccccgttctccncctcccccccccgccccccccccccccccccccctcccccccccccccccccccccccctcccccccgccccccccccccgcgcccccccccttccccccccccctccccccccccccctccccccccccccctttccccccccccccccgcccccttttcccctcccccccccccccccccccccccccccccccctccccccc

SEQ ID NO: 56280 - DNA, 1431 bp, Arabidopsis thaliana landsberg
  unsure (1)..(1431): unsure at all n locations
cagacctatggttccgccggcgtacagttgacaaaattcaaacaaatcttcaaagacaggacattccttttccagattatctgcaacacagtaacttaatggcagcttaacatgtagattacaaaaacaaattaatgaagacacaaaacttacatctagccatttcattggggaacaagttctggttttctggattaattcgttgcaggaactctacatagtcaggagaatggaactgagccatctcgataggatatgctttgtgtggacgctgaaacaatagagaacatatacagatttcaatcgagatgtaccgtgatatcataaacaaaaagaataaaaggatcaagaacaaaaacaagaaacatatatgatgagcaagagacactaacataaacttccatcttgctatgcaggccatatgcaaggataagatgatgggtcatacaaagcctgtgaggtttcatcgggtgattcggaccaaaatagacactccccacatcccctgcaacccaaaaaaaaacattcagcataacatcacaatctcatataaactgcctcaaaggctccaatcatcaacaagaatataatctgaaactcgcatcagagtttgaatcatgcagaaaatctgaagtacgaaaatgaaagttatataactatcaagtctataaaagtttctcagagaggaatctcgaaagaacacaatttcaaacattatatgcaatgccaaatttaacaaaagttctagggtttcatattttagcaaagaaataacaaagacttgaccaaaccaatcaaagaagtcaacttcacaggtactagagtcgtcttcaccacaagaaggcttctatcttaagcttaaactcaggccaaagaatcgaaaaaatcagaaacttcacctaaaacccttgttcttttcatcaaaaaccctactcaattctggagtatttccaaactaatcgtaaccctttacttattctagactatagatatgaaagatttcacctttcgatgcatcgattgagcaataaagacaaaaactagtgcggttcaagtggataaaacttgctcaagagttacatcaatctcaaggattttggagtttctttaccataaataaagaagaaaagggaaagaaatgaatataccatcataaaagtaagagattttgtccttggaacgcatctcttaaagaagaaaagacacgaagatcgtacgaaatcaatcttaaagaaagattatacagagatatttcaggtctgcttagattcagtnnnnnnnnnnnnnnnnnnnnnnattgatgaagtcgcagagatttcacgattctccggcggagccgagaagagagcagcaacgaagcgaaaagaagaagagagaagagaagaacaaggggagagtcaaaagtgaaacgatgtcgttntagtgttctga

SEQ ID NO: 56281 - DNA, 113 bp, Arabidopsis thaliana landsberg
tttgttcattagttacatgtaactttcacatggatggtcgtgaatatagatggcctataacggtaaaaaggataggattaactcgttatctttccgttcattactatagcttg

SEQ ID NO: 56282 - DNA, 452 bp, Arabidopsis thaliana landsberg
  unsure (1)..(452): unsure at all n locations
ccgagagagtatacgagcgaacgcgcaggatcaccactactaaaagcttcatctaaacaagagccttcttgaatnaangccaccacatcctccaacggaacgggttctcccccacccaacacgaanacccggaggnnccctttgagagtcgcggctatcttgataagtgcgaagtaaaagaatgcggtttacagttcctggagcctcatgagacatctgagtttcggtatctgtcacctcatctgtacttgggtggtagttggattggaaatagtagtagtagtattgaagaaatcatccatgtagaccaagaggaaagcatgagtgatagtgaagaaattatctatgcggaccaagaggaaagcagtagtggtattgaggaaactatccatgcagaaagagaaggaaccaacaggaggaaaacctgcatgagacggattaagggttggagc

SEQ ID NO: 56283 - DNA, 478 bp, Arabidopsis thaliana landsberg
attctgtagagaaattttaagaggagaaacccaattttcttttattttgtaacgaatctcttttaaaaaaatctaacaacagaattatatattttcattattctatcgaatccaacgaaatttcaatatacagatatctatatacaaatatttaacctacatgtgtgtatcatatggtttaagcacgttacctgtaacgtatgtaattaaatcaattgcgtagaatcacaagaaaaacattattatataattaactattgatcctataattttattattttcatatatatatagatatatagatagatgcaattagaccaccaagaaaacaaagacttatcgatcatgaagatcagacttagcataaccatcatacttttatcatacacagtggctacggtggccggacaacaatgcggtcgtcaaggcggtggtcgatcttgtcccgggttcatctgctgcagtcagtacggttact

SEQ ID NO: 56284 - DNA, 186 bp, Arabidopsis thaliana landsberg
ggaaaggaaggcccacgcacgccgaagacgcgacacagaacggaaccaaaccagaagctccgatcgaccacgacccagagagggccgcgggacgaggaaaaggacaccaccggggcggccgccgaaccccgggccacaaagcgagaacgggcaaaacgccgcaaaagagggcgacgggcccacaac

SEQ ID NO: 56285 - DNA, 334 bp, Arabidopsis thaliana landsberg
agttttaaatttactcaagatgagctaggcattgttaatgaaggaggcgctggctcctatttaggtctgccagagtgtttcagtggatcaaaagttcagatgtaggattacattaaggacaaactgcaaacaagactaactggctggaattgctagtaactctgtgtatgggaggaaaggagaggcttcacaaagcaaaggcggatagacatggcggcttatgcaatggcttgttattatgtcgctcaaagacaacctgagactatctgactaggcgctatgataagtttcaggaggaatgcaccttgaaagtaaaaggaaaacttactgagtg

SEQ ID NO: 56286 - DNA, 499 bp, Arabidopsis thaliana landsberg
tcggtttttccgctgtagtaaagcgtctctacgaaaagcattttttcgaatgtaaaaagagtaatgcacaagtgttcaattatacctagcatgactaattcaaaaatcggaagacttcatagttcatagttcattcaagcatggttaacttaaagattcacatatagtccgtttaattaaaagtcaaaatatacttttaaaccatttcttgcaaaaaaaaaacaaattaaagaaagaaaaggagttatgtataaataaaaaaggagttatggtaaatgagaatattatgtagcaacagaggaaaatgtgggcccataactttaatacagaaaagcccaaatccataaatggcctaacattttaacccaatcggatactttaaacggcgtcgtttatctatgaggtttaaaagcctcctataaggtatggcggcgaaagtgatatatagacatgaaaaagcaatggtgttaaatttgtttttacttttatgtgaaacatt

SEQ ID NO: 56287 - DNA, 379 bp, Arabidopsis thaliana landsberg
tgtttaagaatagccgggactttctccacaagctctttcgcttccttcagacccaaacttgtgaacgttctcacttcttttatcactttgatcttatcagatgcattaaacttctccaacttcacatcgaaagccgtcttctccttcttctcctctacattcccagctccggtatcttgttttgctccaatgccgtccgatgaaatcatctgttgttttggaagcctcaggtgttcattgagtgcaggaccaatctgttttctttcttctggagataaagcagctatacgctcagctagctccatgattttgcttgaaggctggggtctaggaccatacggatcataaactgacgggtatttgtatttcttgggtttag

SEQ ID NO: 56288 - DNA, 407 bp, Arabidopsis thaliana landsberg
  unsure (1)..(407): unsure at all n locations
ccccccccnccccccccccccccccccccnccccccccccccccccccccccctctccccccccccccccccccccccccccccccccccccttnccccctccccccccccccccccccccncccccgccccctcccgccccgtcctccacccccccccccccccgccccccattataaacnccnctccncccccccccccccccccccctcccccccccccccccctccccccccccccccccccccccctctccccccccccccccccccccccccccccccccccccccccccccccccccgccccccccccccccctcccccccccccccccccccccccccccccccccccccctccctcccccccccccctcccccccccttccccccccccctccccccc

SEQ ID NO: 56289 - DNA, 574 bp, Arabidopsis thaliana landsberg
  unsure (1)..(574): unsure at all n locations
ccccccccccccccccctccccgccccccccccncccccaccccccacccaccccccctcctcgcccccctttcccaccccgcggttcttcccgccccctttattatattcccccccnnccccccccccccccccccnncccccccccccccccccccccccccccccccccccccccccccccccccccccccccccccccccccccccccccccccccccccccccccccccccccccccccccggcggcgctccctctcggcctgctcggnncncnnnccccccccccaatatatattaccccccccccccccccccccccccccgccccccccccccccccccccccgcccccccccccccccccctccccccccccccccccccccccccccccccccccccccccccccccgctccccctccccccccccccctccggcccccccccccccccccctcctccccccccccccccccccccccccccctttctccccccctctcccctcccctcccctcccgcctccctccgccccccccccccctcccccccccccccccccctcccc

SEQ ID NO: 56290 - DNA, 171 bp, Arabidopsis thaliana landsberg
agcagccacctaggtgaaggaagcagacccaagcacaacacaacgcaaaaaccccaaacagccacaaaagaacaccagacaagacaccgaaaacagaaacaaaaacaaaacaatgagcggcaagatgaagaacccaacccgaggagaagcacacggagaaggaaaaagcgg

SEQ ID NO: 56291 - DNA, 966 bp, Arabidopsis thaliana landsberg
tgagcagaaaaacaagaaaatgttaagtttgttacctcaagttcctatgtagtgccgaatagatgataacgcagggatatagttcggattttatttttggttgaccaaaattttcggggttttggtacgtagatttttgaactacaaacaaaaacaggctaaatgaatcattttcccaccgccgagaaccaaactcctggtcttgagagactcttccttttgaagttacccactacaaaaatcaagctactagccttggataggtcgatatattcattttataggaaaaccaagaataccaaatgaagcattttcttatattttctgtctttgcatggtgaaacttgaaagaaagaaaaaaaaaagagagcagaagagtaaattgctaaatagagtggcaatggaggaggagtatcatggatcacgtgaacgatttcaaggaaaatgatcggaaagagggaaataattgcaaatttgggtatgggccgttttacttcttcaagcccacttaaaacttgccaccaatttcaacaaaaccaaatagtgtttcccattcagatagtaaatagtgactcaaataacgttaacatcgagaaaaaatgaaaaaaaatctgtaagccatttatcatacaaacaatatttttttcttattttaagtagctggtttcttcatgcttgattataaagataaccaaatatcactttctttttcttttcttttcaattaatatcattaaataaaaagaagaaaagctgatactaataccaaaaaagagcaagatatttcaaaattttgtattatatcgtttaaaatgtcagcaatttgtttgcataattaagaaaagcactaggccaaacctttgttcagatatctaaagcttaaacgaacaaaaaagcttaaagttgaagttagtattttttttctttaaattattttctatattgacattttttcacaagagtatt

SEQ ID NO: 56292 - DNA, 1264 bp, Arabidopsis thaliana landsberg
tgtgactggggtatgtcttgatttgggtgggttatttaactagatcaactaaggttatgttttcaacttgttgaacctggtgttaattaaagttattgtaaaatataaatctagcttgatggggaacacttgaataagtggtgggatcaagcggttgatgaggaggtaaaacaattacagagcaaaattgaaagcgagatataagcaattcaacatgtttaccaaagtcctatcttggaatcaattcggcagtcaatgcgagaaatgcgtgctcaaatcattgatcttgaggatcgaatagctcaaaaagaaaccgagaatggtaggctgaaggaccatctacgtaggaggtagttagggatacctctttgttgtgttaagatattatgtatgctatgtttaattgtttaatttatgtactctttgttatgtatggtgtgctctcaatatcagttgcactctcaataccagttgaaccaactaatttgtactttaaatactagtggaacccactcagttgtactctacatacttgttgaacccagtccaacacttgaagcaatcactaagtaaacataattaacttacttttgttcccaatcaaacctaaaaatacatgtgtccaaaataacataaaaacaacatgtgcccagaattatctagaataaacatccacacaatctacaacactctcaaccttacttatttctctttcgcttcacttttagttccataataggtggcttaatatgttgggatgcttcctttgtttgcttctaaccagttgctattacaggtccacactccaggtttttcttcatttttccattcttgttcgcaattggggaaatttgtttgggcactaggttgtggagacatgaaacttcactataaacaactaaatcatgtggttgcactgcttccttaactgtcccataaccaacctcattctgataataatatgtctgtgtcccatattgcttttcctgctctctttgctctgccaaatacaattcaagagcttacactcttacatacatgtcagcaagcttctgtgtcattttctcaaagcctctggtcattgcctcagtgagtgacttaatagacgcaagaattgtagctagatcagggcctacatatgtagggaattcattccgagagacttcttttccagggaattcatttctacggacttcagattcaatgacacgtcgagaatctaagtccatctggtacaaatcattccaaaaaatattcttcttcc

SEQ ID NO: 56293 - DNA, 1729 bp, Arabidopsis thaliana landsberg
aaagacactacgtcttgcaacacatttttttgagcgcatagcttctcgtttttttgaataggtaatacccatatgtgaagcagcttctaggtagtcatagtctgagagaggcttatcttcagatgggaatagtgtaaaccctctctcctttaaaagcttaacaagtttaggcctgtacaaactacggatgtcgatcgggttgtcttcaactacacggatatatctctgtttgttttctagtttcaccagctgcaccagacagtttaaagttaaactgttgtctcaatcaataatatgtcgacaataaattttagacttttcacaacctttgtctcgatagagtctgtgtccacagcgttgagttcggcggcagcctcatcttctttctccagtataaaacggtaaagcttatatgtgagtgaggccatggttgaatttctatttatctcttccaaactcctcaccactaaaacggaaaattgaacagaatcagagttttaatatttttagaaactaggaataacagattaaacaaatattcgcgtacctttctttaacttctcgatcgtatcttccagttgcgatgtcatcacatcgtcgatgttgagtatggaagtatcgacgatgttgagtatggaagtaccttagtatcttccactagcgatgtaaacgcattcaatggagggatcgagtctgagaaagtgtagatctcacgcaaggaagagcagggagaataagagggaaaattagggtttgtgggatgcttaattctacattaaccttttttgttggggctttatagtatataagataaatttgttggtttctttttcggccccttatttttatcttagaagaaaaactataatgggcctcaggaccgggcctgggaatactataatttatttattcatctgataatctgatatcatcaaggcatatttaaaataatatgtttgggtaaagttgagataaagatataattattgataaacttaatcaaagtaacttcgatcctactacattttttcttcagatatagcgtgcaattcaagaaaatacaagttaagagagaaaacaattctacgtatgtaaaacaaatatatagaaaacaggtaaaatttatatatggggttgtactatggtcttgaagagtgaagacgcgaacaagttgcaaaaaaaaaggaaaaaaatagagagacgttgcatcaacagctaggttttaggtgtaaggctatcaaaggggaccaagaaaaaaaacacaccaaagaagtgtctcgtaagaaactaaagggtaaaaaaaatctgttcacattttttgaaacaatatataaaagaagtgtccaacattcaagaccgagaaggagaagcacctccttcatcaaataccacggtgattcactcagatggatcagcatttcctttgttttgtcctcaggaaatcattagcattgtggtcgactagaggaagggttaagagatgaagaagaagaaagaataatcaatgcctatatactaaattagtttaacttagaccatctttacttattatctgatattctgattatttgataaagaagttcaaattcgacgtttcttacacaattgccttaaatctaaatatatatcataaattaagatatttacagtatgcaattaaatatacaatacagaaaacagagtccatgtagccatataatgttatattaactgctcttcaccttaccta

SEQ ID NO: 56294 - DNA, 529 bp, Arabidopsis thaliana landsberg
ttcacatgtgttggggggccttctatgccaaatatcactcgtttaacctttttgcttcggcagaagcaagtgtatttcaggagcatttctactgatggacgaagcaagcctttggtcgggaaagcgtgcaaagaagcttcacccatgcgtgcaagtggaaaaggtgctagacaaagctgatagcttcggcgacaacagaggaacttcggacgtaagctaaaggagaaagcgacaaaggcccgaacccgcgcagccaaggatggacaaaaatatgttattgccctaatgacatttgtaaataatgtatgtaaaaccctgaagggcacgattgtaattatgtacaatgtcagttcgtctcccctattaatagatgaatggtaccttgcataaagtacctttgaccagagctacaactttgtagtgcttagcctttgaagaatcatcgtgcattctattactctggagtcaatggtatgtttgtaaatatatctaatgtaacgagagacatattgaaaatgccagggcaaca

SEQ ID NO: 56295 - DNA, 434 bp, Arabidopsis thaliana landsberg
ctgcatttccacttccaaagtatttagtgaattcatttgttcattgtatttttttcttggtgaggaatcataaatctagaaggttcagagtgttgtttcgacttatgttgatacatgtttatgcgtcactatctgcttagttcacattttgtttgtcccttaacattacagttgccagcctggtcattaacttggtgcttgtagtatcagttgcatgcatttgtacacactatcatatatgcttataacttcatgaaatggaaaagtgttttggaatctctaccaccttggagccagtgtggcttgcctctttagtatgatggagtcatttcaccatgcagtttattttttggatgaacactaactacatcttatctgtatatgaccccaatgtggcatggcatttttgcctcatcccgagacaaatacattgt

SEQ ID NO: 56296 - DNA, 186 bp, Arabidopsis thaliana landsberg
  unsure (1)..(186): unsure at all n locations
gagcccgggaacaagcacacangagagcgcccccaacgagagccgaagcngagacgggaaggcgaaccgccccgaaaggaccaaccgaaaccccccaacgggcggaccacaggcggangaccacccacgggcgaggccagggcaaacgcagagggcccagcgcgccaaggaaaagaaacaagaagg

SEQ ID NO: 56297 - DNA, 183 bp, Arabidopsis thaliana landsberg
tcaaattaactgtctagctaattcctcgcgaaaattgcgagggagaggcaatccatgttgacgcagcaaacgccgcgagggagcttgcgagtgcgcagtcggaccgtagtaggcaaaatccctcgcaaaaaattgacgagggaatttgcaagtaaatattgtctggagccaaaccctgcgagg

SEQ ID NO: 56298 - DNA, 157 bp, Arabidopsis thaliana landsberg
ctattgaggggagagcattcagatggatgaacgaaagaaaacggtcacaagcactcacctgtgcttgcacgcccaatgactgggttcgctgtgtaaccagagacgcgtttgccctttctttgactcacgcctgcatttgttactgactgtccactac

SEQ ID NO: 56299 - DNA, 1482 bp, Arabidopsis thaliana landsberg
taataaatcacatgcgtctgtttgaaacattatatgaataagaaaaatgggtctcaaataacaacatgatgtatcaaagattcaaaaatttcacgtgttatgaaatgagtttagcaaaagttcactcaagttcttgaaggtctagtttggaatgcaaattagccaaatctgtacagttatactgaacagatttaatgttagtcggtccgtaaacaaacttatgggccttagataagcaaatcaaacttctttcagcccattgagcattctcgtgatttggttattgtatatccaatacgtgacattacttttgcctcaacgaaagagtcttggcttatcatttcatttattattatagttgaaataattttcaaagaaaagaaaaaaatatgtgataaataccaaaccgttgcataagaaaagcaaccacacattttacatgtgtgtgtgagttcacgaagaaaatatccaatagccaaactaattaatccacctttgaaaaaaaacatgcactattataaactagagccaccgacggtcgacggatgtctaattgtatatggtcctcagaaatgaaaaaatcaaaagaataaacacgtgtgaattaaccggtttaaccagtagcaccaaccgtttgtaccggtcagaaaaaagccccacatgctttaatcaagcaagcctttaaaaacaggaaaggcaaagagttaaataagcctctccaaaagtgtgtctgtaacattaccaaaacgaaaccttccttgtggattcccacttctttcttctgttctcttcttcctcttctttaaattggatgttttgggcaagaaacagagagaaacacgttaatttgagagtttgtcattgaatatttggtttgcaatggaaagagattttctgggtttgagcgacaagcagtatctaagtaataacgttaagcatgaggttaacgatgatgctgtcgaagaacgaggtttgtgttcttgtctcgagaatcttttattttaatgtttcaagaagagatcagttttcacttttaacatagccgtataaagttgtttatttaaatataatttttcagattccaaaacttgaaaaaaaaaagattccattaaatcttttataaaaatgagattggatagattagtcaaattgacgaccataaaaaatgatacttatagggttaagtacgaaggcagctagagaatgggggaagtcaaaggtttttgctacttcaagtttcatgccttcttcagatttccaggttggttcatcttaaaatttaacttactctgtatcagtttcagatgttatggctaatctaatggttctataagctaccgcataatcatggtcgtcttttagcatgtgcaagaggagtactcaattatggtcttgattaaaaagaagaatttacattcaaattatgttaaacacatcaatcacatatttatagaaaagttgttttgtaagagatagccaccg

SEQ ID NO: 56300 - DNA, 792 bp, Arabidopsis thaliana landsberg
tattattttcaaaagttttgaagttgaagaaacactggggcgtaggtcatatttaagcttaaaattattattttctatcagtatactagtcgaccaactattgttactggtttagaagcaggttcagtctttatcagttgggttatcaagaaagtagaccaagcacacactttagaaagcccattaacaacaatgagcaacaaagactaatatttcagtttacttataggcccataagaattgagtaccaaacaaaccttaactagctagtagctactcttatatattttaccgatagtctttgactctttgttataacaacggatcgattttaacaaatattctatggaaatggtaaacgattcattaaaaacttgatttcgtaaacctaattttaacaccaaaatttcactggttttatatggagaacattcgctgcgtttgcagtaggctagttgccgtacacacactgaatcgataacaagatgaatgttgtatgattgtatcaagcatcgtcggcgtaatcatcttcttctttttcgttttttttttttcattttagatcaatccattttcgatgatgggcacatttgttttttattccaagttatttcgattcttaattatgcattagccttcttcgttttagattggcaagtcatttcgtcaatattgatcttgtaatttactaaaaactccgtcacacccaaaataaaccaaaatgtaatttactaaagaagttatgaagaaatgttatagttcgaaactataatgaatgaaaatactagtagt

SEQ ID NO: 56301 - DNA, 1462 bp, Arabidopsis thaliana landsberg
taccatacgcattggcccaaccattcccttgtgtttgtttagttatttggttttcttcaagattgatacggggtggctgtacagcaacacaaattcaatgacttggaacttgtattatattggtatgtgaaaaaaccaacctaattcaatggtatacttgtcatgaaagaaacaatatttagcgtgtgtgtttttttctttacctgaagatgacttgccacattgcttctagtaattccttctatcctcatttcttgcaagcattcgacaagtacctttgggttagcttctgcattttgaaatccaaaaataattaaataagaaccaacattaatcaagagattaatgaaagagttagctagagattaaagaaaagtttgattactttcgataccaccaattatttcgatggcttccagaaatttttggtgaagctcttcggtccacgtcatccgcggcttccgtggtttttttccttgtttcttttccatgttttgtatgccgttacctccgtttatggttatggaatcaaagtggtctcggtctaaaccgtcagtcggaaccagatgtgattgaaccggttgaaatactttactccatgtcatccgcggtttctttgctgctttgttgaacatgttatcttcgttcatgatttgagaatagtcactgaattggctgaactcattggattgaaccagatctgattgaaccggttgaagtacttcgttccatgtcaatcgctggttggttgctgatttgttgaacatgctatcttggttcatgatttgggaatatccattcactttgctgaactcgttggcttgaaccagacctgattgaaccggttgaatttcttcggtccacgtcaattgcggtttggttgctgctttgttgtacatgctatcttggttcatgatttgggaatagttattgagttggccgaactcttttgcttgaatcggtggattaacttcggtccacgtcattcgcggtttagatgctgctttgttgaacatgttatcttggttcatgatttcggaatagtcattcacttggtgataataattgttgaaattttattgtacttagcagcaactgttttttgttcatgtatttgaatcacaagtggctcagtattttttttttttttttaaaacatgttttgtaatttaaggaaaatggtgaattgtaatataaaggtaattttcccttttaagagtacggaatgtttttcctctgtctctccattcccagccaaagatttgataaaaataacaatatggtcaggggcggatatacgttcaaaggggtagggcacgtgccccatattcattctataattatttactttatgacctataattatcaatatctattagctaatttggtagaggtaccccatgtaatatcgtggaagttgggttcaattccatctagctgccattctttttcaaattattat

SEQ ID NO: 56302 - DNA, 1181 bp, Arabidopsis thaliana landsberg
gcccagatgagagtctcagatcctaagcctctatttctcgctggagaaagatctgcggaaaacctcttaactagagagtttgtacttgttgcatctgaatcgcagcggactaacgagctagctgccatggtgatcaagataccaaaacttacagacacaacaagctcaaccactcttggagattactttgcagaggttaacgcaacagtggtacttccaagtggagttcacagtctcccgcacaaaggagggccgtcatcactgatccaacgatggaaatcagatggatcatgtgactgtggaggctgggacatgggatgtaaccttagaatcctcacaaatcagcataataaacccataaacccttctccaaccacttcagatgccttcaagcttttctttcaggtttgttatgtaacatctcaaaactctgaatactaagaccaacctttggcttaataatgaatctcactaatgtgaatttgttgcagggaggagtacaggagaataacaaccaaccatacttgagtttcactacatacagagaaggtgtttacgcggttgagtacaatacatcgctctcactcttgcaagcattctccatttgtatagcggttaacgagggacgaaatccgttaataaagaccaccgtggaacccaacacttcacgtgtagagaagaaagcttatggaggagagatgtcatcgattcaaaacgagaatttgaagtcattttcaggtcctgttgaagctgaggctccggctaggtatctctcacaccacccacctttgtctcctgttgggagggtttagttgcttcttcaaataatcttgttatatatatttttttcttttcttttctcttctgatggggttcgtattttctgtgtaattacggcgtggaagtagattacgttaaatagagaaatttgtgaaacttgttgtaatcgaatatccacatttaagctaataaaaactcttatgttcttgacttctttcttcttcaattacaattaccatgatcatgtaacataaactctgtcgtgttagtcgttactttagtagtttagttagcattgttaaaaccataaaatgcaaacattacgcaaaacacaaaaagaggaaaaagatggtgaaaccagaaagaatgagaccttttgcgtgtaaggcaaacgtatgacc

SEQ ID NO: 56303 - DNA, 1193 bp, Arabidopsis thaliana landsberg
ttccaatactgtcaaaagattatataactaggtaacgccagttgattattttccatatgaaattaggcataataacgttccgtttaactatagtatggtttgtgtgtgtctgtaaccatgtatcgtaaagtctgtgtctctgaacataaaaatgacaaaaagaaaagtctatgtttcttcttaataatctttttatgttcgaaagtttcaatagtcttcataacagaccaaacataacatctaaaacattactgctacaaattctgaaataagctcctaaaaaatatttacaaaacccataattattatgaagttgttaatgcgagaaaatcaataccgttgagattctcttgaaactaataaaaaaaaagattacgatattatctcatttctcgtaagaggaaggttcactcaccgatcttggtaacaccgacggatctttatctgaaaatattcatgtaaaaacaaaattctaatcaacgaaaatttggaagataataatgttaagagagaattgttaatggagatttaattacctctagaggaattgaaagatcttttgcagtgtaaaatggcactttgaatactatcttgttgttgaagaagcgagtcatcgcgtcttcttgactcagactgagtcgtaacagtcgccgcagtagacgacgttgtagtcgctgttgaagatgacgatctgcttttcccgagatgtttcctcactactttaagaccagctggaatgttgatgttgttccccggtttattattagtcttcgtagccaccggtgaatctgctttctccgccgtggatctcgccgacgacggagctgttagttgaccggagtgtcgtaatttctcgccgtaacgacgtgaaactctgatgtaaagtggttttaccttctttaagtacttttgcatcatcacgaatcgtttctcatctgaaacgacagattcgttgccgttttgcttctttaatgaggaagacgaagaagaagatgaagaagaagacgaagatgagttcttcgagctgttttctcttgagaatagagaaattatcggaacttcttcaacttttaaattcacagtcaccgtacttttctgttgcgattccggcgagagtgatgacggcggaggaggatggttttgcttatcgaggtcttcagatccgaaattagcttcggatttcgcttggatta

SEQ ID NO: 56304 - DNA, 377 bp, Arabidopsis thaliana landsberg
aagattggacagtgttatggtttaaagtgatcatattaagttttgcataggagaagtcgcaaaagaaatcaatatggtttttaataattttcagttacattttataggttaattagttcatgtttatttttaatacattttttactattataataaataaatactaaacacatgtacgaaccgcttggtcgagactacaaattactgttgtggtgcgagctaaatataaaacatcacagattagtagtggtcattattgggcgggcctcaatagcatgcccaagaatttctctcttttttaaaaaaaatctcttacacaataatggaaaattttcacttttgtgctcacttaatcagactctctctttttgggttat

SEQ ID NO: 56305 - DNA, 280 bp, Arabidopsis thaliana landsberg
cacgagttgggtttcggacaacaagggggcgaggccggagagggagccagagaaacggcgaccagaaccaaagagggcagaccgcgcgcagaagacccagtcccgacacggggaggccgggacagaggaccaagagaaacggggccctgtccagcccggaaaaaggaaggacgacacccgaacagcggaaacgaggaggcaacggaggggaaagacggcgccaacagcgacggcaaaaacagccgccagaggggagaagaaaggcgaaaaaccaaaaaag

SEQ ID NO: 56306 - DNA, 648 bp, Arabidopsis thaliana landsberg
  unsure (1)..(648): unsure at all n locations
cccccccccccccccnnnccccccgccggccccgganttgacctcgcggcgcgcccccccccccccccctcnaananacncaccgaaccccccccccccccccccccccccccgcccccctctcccccccccgggcttctctgccccccttattccccccnccccccccccccccccccccccccccccccccccccccccccccccccccccccccccccccccccccccccccccnncccccccccccccccccccccccccccccccccccccccccccccccccccccccccncccccccctctttctnccttgttttcccccncccccccccccccccccttaattattctcccnccccccccccccccccccccccgnccccccccccctctccccccccccccccccccccccccccccccccccctttccccccccccccccctcccccccccctcctcccctcccccccccctctccccccccttccccccccccctccccgcgcccccccccccttcttccccttccccccccctcctcttctnctcctccccctccccccccccccccccctccccccccccccctccctcccccccctcccttcccccccccctcccccccctccccccccccccc

SEQ ID NO: 56307 - DNA, 575 bp, Arabidopsis thaliana landsberg
  unsure (1)..(575): unsure at all n locations
ttggtcacgtgaaggacttccctatctgttgtaacatcactcggagtttccttgggtctggaaaaaggaaactacttagctgcatcatagatcatacccggatgcagctcgtactcattcctactgcatttgatacttagaacaaggtcaataggaccgctatgaagagttttaggccgtcgtcgcgtcgatcaaccagtcagtctgtgaatggtcgtcctcgtttagatttttttttatttagtttattttataaaaccattttatttatataataaagtttgtgtcattgttttctatacacgaatacaccaagttattatatgacaatgtgtgtggcggttcatggtgacaatgcccgcgtaaccatactatattattcgttatcttcccgtgggtggtggggaattaggtacggtgcaccctggtgcttttcgatttgcctaactaccggaatatcaaattatatataagcgcgaggttgtnnnnnnnnnnnnnnnnnnnnnnnnnnnntttgcttgacgatcatcagccgtgacgagtgcctccgatgatccagcactttgctggaaact

SEQ ID NO: 56308 - DNA, 258 bp, Arabidopsis thaliana landsberg
  unsure (1)..(258): unsure at all n locations
gaatgtttcatagctacaatatacgggaacaatgaaccagatacctcctgaagaaagaagngccttctggtggcgcggagacaattgcaaccgagagaaccataattcgccatgacccaatgtgccccacatgtcagccccttcagcttataccccacaaatcactgtgttcctaccccatcacatgcttaccatactatgagagaaaacaagccctcagcagaggaggataacccaaatatcgcgagccaaggacgg

SEQ ID NO: 56309 - DNA, 1203 bp, Arabidopsis thaliana landsberg
cccagcgcgcttaatgtcttcaagattcaggcctttgagtacaccagactcaatcactcgattatttgctttttttttaaaatctgaaagctgctctagtgctttacataaaccttcatagtcaaacttgtccgctgcaaaatattggaagaacaaatttaccacattgagagaaaaacagacaaaaagacccagccactctataaaaggccaagtagattagtatagtcgttaaaactgtgtccactaaaagtaaacaagtctgacctttctttttattcagaatactctctatgcattcttcataatgctctgtgtattgtttagaaagtagattccaggtgttcttaaggtcagatgagagcatccgatgaatttgttgtccagatcgactttgttcatcttttggggcagttacaattgctatttccgctaaaatagcagaagaatccacaacggtgcaagtcagatcaaaatcagaaaagatcaccagatcatcttttgagtggttcttgagcagtggaactatggtaggctgggcaagtggctgggcatggaagaactctacttcaagtttcatagcctgttgatacaatttttcaattatgtccaattcttcaccagtcatagagacactaagcttctcaagcaagtcttcagtttgcttggctgatgcctatattaaaggaaaacagaccattcattataaaagatgcatcatctcacacatcatgctagaaactctcaaaagttaacagaattacgcaaaaacatacctggaaagcatcactagaataattatcgatccatttcttgtagggatggttcacatcactcagatcaagaagtgatccaaactccttaccgagaaaggcatacaaccgcatgcaaggtgtcacagcaccaagcgtgtaggcagcaacttttgttttttcaaatggagtatcaagcatgccgggagctttgcatccttctacttttccggatgctgtagctaacaagaactcagtgtatctcaaagttgctgagttaacacttacttctttgttgatgtctaaatcccaatcctgcgaggatcagacaaacgtactactgagaaaataccatttgataggaaaatcatagtaatgatgtcatagaataaatataaagctgatgacagaagatttgagaataactttaagaattagaagctaacagcac

SEQ ID NO: 56310 - DNA, 1331 bp, Arabidopsis thaliana landsberg
tacagagagttatgccaaggatgtatcaaggaaaaaaaagtgcatgatcttacaaaccccacaaaagaaaacagaacggaacagaatatgatgtcttaaccttacaaacataactaattgaagtgtagactaaggagcaatgctatatacaacttaccctccgcttgcttatccctcctacggcatctagtaactcgttcagtttcccttcaactgcaaaattggtggtgctattagcgaatatggctgaatggtgatggtatcttaacaattcacgtctaaaactagtacattacatgtttcgatactgggagaaactttctctgatcctttagatttgatgggctgctgttgcaacttattaactggtataacctgtgctttgttaacaccaggataaatacctcctttgtctcgcttactagactcagatgagcgagaagttttcatacgaggacgaggacgtggaagtatctttttatcttctcctgatccatgctttgtcgtcttatcagaatttgtaccacccggggacattctgctaagagaactggacgtgggagatgtgcttttagtcttcttttcagcgggaacctcttgctggacagcagtaatagatatgcctgacgaaggttccttcaaaacttcagttggctgaagaagaggtggaggaatttctctctctggaagttttacagatactgagctctgtgtttgggtattatcaggagcaaggtccttataaccattaaccttttcaaagctctgtggcatttgctcgtcagcgtcatcagtgaaggtcctagatgttgcacctaagattccttctccactttcatcatcatcaaggatcacaagttcaggatactcttcatctgaatcactttgaataattacatcaccattcagaggatctcccccatataccctctgcaatgtgatgatccaccaatagcactttttggcggcagcaccaaaaaccctcacatagttgtagtcaaatgtcaactcttgaccctgtgaacgaaccagacagattaaaaactactgaaatgatactcgcagaatagcaagtgcaggagagcctaccttcttaaggtcttgcatggagaatattccaacgcaaatttcaccattcgccatccactgcaacaacatttaagaagtaacaaatgaagcagacgagctcaaaaagaaagttcccgactcagattactgaatttataatcagacccgatgaatgatatcgcacagaacactatgtagtcaccttttcagtacggcagtttggttcacagctatggttaatgaaacgccctaggttatccctt

SEQ ID NO: 56311 - DNA, 902 bp, Arabidopsis thaliana landsberg
  unsure (1)..(902): unsure at all n locations
cgagaaggtaacagaattcgcaggactattgaactacgattccttaggaaaacttctctacttacatgctgtgatcacagaaacacttcgtctctaccctgccgttcctcaggtaagtaaaaatccattaaatttgtgaattgagatatcgaaacgaagaaaagaaaaaatcgtatattcgatattcgtaggatccgaaaggagtattagaagatgatatgttaccaaatgggacaaaagtaaaagctggagggatggtcacatatgtaccttactcaatgggtcgtatggaatacaattggggatcagatgcagcattgtttaaacccgaaagatggcttaaagatggagtctttcaaaatgcatcaccattcaagttcacagcttttcaggtaactataatcaaacacatacaagatttttgtttttgaacatgaaagatgatgagtttgtgtgagtgtaggctggaccaaggatatgtttgggaaaggattcagcttatctgcaaatgaagatggcnnnnnnnnnnnnnnnnnnnntctataagtttcatttggtgccaaatcatcctgtcaagtatcggatgatgacgatcttatccatggctcatggcttgaaggttactgtatccagacgttcatagacacacacacaaaaaaaaaaaaaaaactatacaaagtcaaatccatttgaaatgatccaagaagagatataattaaaatctttataactatcttgttctaaaacttctccataagataaattttatagatcaaacaacaattgtgaggcaaattttttccctttttactgccgtaaatttaatttcttatatttcattttttaccgctctatgtcaccaatcagatcaaattaatcgattggaataatgtgaatacaag

SEQ ID NO: 56312 - DNA, 1230 bp, Arabidopsis thaliana landsberg
ttatgctaaacaacaaatcggaacggaaccctagtttagaaactagcttttaatcgtatttatactgaatatagtagactctccctcagttctgcttatttgggtctgggtaccgtcattttaccgtttgaagctaaaacggtgctttatttgacagataaaaaaagccaatcgtgttcagatatgggtgtcgaggattatcatgtgatagagcttgtcggtgaaggatcttttgggagggtttacaaaggaagacgcaagtataccggccaggtaaattgttgctgggttgttctctttgttatcatcggctacttaaaatcagctaatcaattcttaatttggtaatttttatcagacggtggcgatgaagttcatcatgaaacaaggaaagactgacaaggatatacatagtctaaggcaagaaatcgaggttagcaagtttcagtccttaattgcacttaccatcaactttaatcccaatcaattgtatggtatttgaccaacattatttcttttatgcctcacatattgcggaagctcaagcatgaaaatatcattgaaatgctcgactcctttgaaaacgcacgagagttctgtgtcgtcactgagtttgcccaagtacttttctcactgtatattgtagaatctaaagtactgatttatgaagcatatagctagacttatatgaaataaagaatcaccatggaacacccaattttacagggtgaattgtttgagattcttgaagatgacaagtgtcttcccgaagagcaagttcaagcaatcgcaaagcaattggtaacacgttttgccaacatggctcttatttctatatctgattattaagacaattttgaaacttctttataatccaggtaaaagcattagattacttgcattccaaccgtataattcaccgtgacatgaagccacaaaacattcttattggtgctggctctgtcgttaaggtaatataacattccttttgctgcttccagtaattaagtttgaaatgctgtttctatgcttcccacacacatgagttgttcatattcttgtttcttaaagataaaaattaggagagaattatcgttacaatacgattcttctacttttttcctcttcttatgagtaccagattacgtgctaacttcttgaaaattgatttatgaaccatggatcttttcgtctatgattatttcagaaaactaagttaatcatgtgagt

SEQ ID NO: 56313 - DNA, 1489 bp, Arabidopsis thaliana landsberg
aaatttgactgatgcttctatttgcttgagatcagaactaaaaagtcataattaatgataaagtctacttaattaatcaatgatttaacttaatggatgtgtacaactgtatccctatattatgtttgaggacaagttgcgtcaagattctaatccgaccaaagacttgtttcaacaatagttgtcaattttaaggacgataacgagaataattggatgttagttataccggacgatgtctcagtttaattggtgttaaccgggtctaaaccgctggttaagataaaaggttgaatggtacgcgcgtggaggagagacggtgaaaagacgttgaaatggtaacggtaaaagacaaaaatagccgcaaggaaaaagattagttggaattggattcccattactgttttcttgctggcgagtgtcacgtgttcttcactgtcagatgacgtcactcacttccacgtcagctcctcatccacttctcattagtctgactaactttaatcataggttaacaaaacaatgtattgttgataacattgcaatctttgtatgattatagtgatcttcttataaggttgttatgtgttttagttgttgatctttctccacatttttttccttttctaactctattgatgaaaactttataataatttcgcttacattgttgttacccacatggagagatggatgatggatgggccatcaaacaaatcctctgatattttttgcttggttgattatggaccgttggaatgtgatgtgtgtggaaaaaaataaccaatcttggagttttgctgggggaaaaagataaaaagaatattcagatacatcgattagtgagatggtatagttctgttcaatcgttaaagaagttatatgttaacaaatatctagatgtttctaatttggggatattcgacaaacatatttttgatctttacctctcacctttacatgcaaaatgtgttcgtttttagacggagtgtgcggtattaaacaagacgatcaaaaatatattcttgattggtctaatttattttcagaactagacatatttttggatcttggttggtaaattttaaaacatttacgatcatcacacttcacatgtttgaataatatttgcgtcgtagaaaaatacgatcacgaggttctaactttttttcatgtaagttttttggttgctgaatggctattgagtattagtgatcatatatatagtgtgtataatattaccaaaaataaatcttttttggtttgtaacttcgtatacatgcatttcagtatttgtgtgtatactttctctatacctgccatgcatgtttgataaaaattagcctcagattttcaaattcagaaacgtgtttgtgctgtttttaatttggttgaaatatactccacgctctgatacctactttttgctctaataaagtttcggaatttatattcaaaaaaaatacttaaaagaaaaatctcatctaat

SEQ ID NO: 56314 - DNA, 1410 bp, Arabidopsis thaliana landsberg
  unsure (1)..(1410): unsure at all n locations
ttacctgttgaatattactatattaggggatatttcttcgttgatatttttgttgtaataaatccatattgcccaagtcatcttctcttgattcactcagaaatgactatcgttagctggtcattttggttatcatatgtcagttggtcgaattatgacaacatatatacgtaacttatgaccaataagcttgttttaattttttgtattttattaacggctgtgttaccaaacctttttatcttgaaaaaattcatatgtttttaactcttttttttttctaatctataaataagaggttttgactttgatgcatgaggtcattttgacatccacttagagtcattgttcatcaccgaatcacccatcaaccttttggacatcaagtgggacacttaaacctacttttgatctctagatagtttatttgattgtacggtgtgtattaagatatcattcatttagtttggcatcaaatgtgtgatcactttccaattatctctttaattcaaaattttaatgataaactgttttcaagcgaagaagttatgttgaacttccaaaagaactttagatcgaggtatcggtcttctaaaatcatcttagccggtttgatttgaaatttgtatgattactcaataaaaacgttgtaacatggaaaacaagtttgatcattaaagaattataccttgtttgactaaaatacaagttataagacaacaagctacttttccaaacttataaacgaatataagaaattcgaaactgggacgacttcgattattaattactaattaataaaggaatcgacctagagattgagataaaagtcaacgtgaatgaacttggtccagaaataccaaactttgcttagtgtatagaaagtaaacgccaactttggctgtggaacccagaagaagtcttatgctttcacatttgaatgaaactcctttgtgggttgggtaaacacaaaaataatattaaaacagagagaatataatagataaatgttagaccaaactaaaattgactttgtatataaagtcaacctcatgatgtatagtggtttccgtacttaacttccttaccaaacacacatatcaaccgacgacgacgacgactttcccctacttaactacccaagattacaagtaaataccaaactttgcttattaatatatcaaaaacacatatcaaccgacgaacgacgtcattaattactttctaacaaactatttcgataattttcttaccgtttagtttgtgatcttaggattgaagaactcattattgggttggggacgagggtttcaactaaaacatggngattttaatcatggatgacgatcgtcgatgtttcaagtttcagtaatacttacaagtcatttaagcttaaaggactaccctttg

SEQ ID NO: 56315 - DNA, 536 bp, Arabidopsis thaliana landsberg
  unsure (1)..(536): unsure at all n locations
ctgccggcagctacctgacggttgatgtcgatcacgtccagaacaaaganacccttccttgaccngagggnncatttggaggnacagtcggtttacactactgttcatggatgggcccgatgctggggacgtcacgataaaatgggacggcaatgataatggcaatacgtcatcaactacgagattcggtagcggtaggtcactttccggtacatggggtgtatataaggtactttcatctcccgtgacaacgtgcattctagggtttgctacgaaggggagtgctggtggtaataattatgccgccctctgtagtgatgccgggacgaccacgcatcttagtcttggcatgagtggaacaagtctaacgatacgtcgaggtaggaaaggcggtacgttacttgcgagctcgcctgcagggacatttaatccgtcaatatggaactatatcgagatgaaagctaccattgatgatacggctggtcgttgacggtacggattaatggtgttactgtgatcgactacactggcgacac

SEQ ID NO: 56316 - DNA, 780 bp, Arabidopsis thaliana landsberg
ttcattgcctttttatgattcgagatctatgcatttttggttctccaatttgtgtttgtgtagtttgttgtttccgtagagctgtgtttttcgctggatattagctctggttgaataatgatttagagaatttggagttggttacgtgaatttgaacatgtggaagttagggtttgggagatctgaatctcaatagaaactcctgaaatttgttaattcagagtcgtgaattctgatttagagaattaagcaacattcgatatcatctctttgttaaatctgctcgagtcattgtcatttggaagacataggaaatggattttgatctctgttttagatatcctatatttattagagcatggcaatgaaggtttggttgtctatagaaggaaagcataaacttttctgtaagataatttcagttcattgcacatcatgttactctttagtacaataaggaaaatatgcatccactaagagtatgatttggtgttctggctctatcagtaattatgtatgttaagtcacgctagcttccctatgacctttatgagacttttgacattattaattcaggcaagatgaagtttgttctataggtaaagtagctattggtctttgaatatagtgtgtttattagagtcttgctaccattccgtgtttggttaactcgattttgtctgatataatgatgctattattttacttttagtatgggacttcaacagaatttcatgcttatcactgtgtacttgtagaggttcgtaacatatatatgct

SEQ ID NO: 56317 - DNA, 480 bp, Arabidopsis thaliana landsberg
ccggtgacggcggcgaagcggccaacgttagctggccaggatggcggccaccgccgcgataatcatgcgcttgtgttcgctcgcgggagccctgccgccgtgctcgggccggaccggacccgcgtcggtggccatatgggcgaggctcaggatcatggtgagaaggtcggcggccggataggttctggtgactcgtccggcggcctgggccccctcgatcgcggcgatcttctctcgctcggtcttgatgaccgcctccggcagtggcctgtcgccgggctcgagctggtgccaggcggtgagccggacgacctcgggacgggcgatgtagtagtcgacgagggcgcccgcgtaggcgggcagatcttcgggatcaaagggaaccgccttgacgagttcggtggcgagggcgccgaagacggtgtcgaacaggtcgctcttgctgacgtagtagcggtagagcagggcgttggttactcc

SEQ ID NO: 56318 - DNA, 488 bp, Arabidopsis thaliana landsberg
gatatttttctccaccctgaaaaggatgacatatgttttgtgaccaagaagaggagacttcagatggatatatagcagatctgtcacagcttgatatgtttttgacgtccggaactaataccaatggtattgtgtggatacctttatagtaatgctttgaacattatgaaccatgaatacatctaaactaacaccaattagttgaagtggctggatagagacatccacaacaaaattctgatgcatgaattcagtgacgaatcattcctttcaggtggatctattgattattacagaacactgaccaaaccagaaagacaggtccgtcctcatggttgcctgggaggttcagtgcactaaataaattggctttcctcagcaagtatgtggtatcccatggcaaggtaatcattattagcttctaatggcaatcgactaacatggtgagctattattgtagagaagcagtacatctgcgatccggacta

SEQ ID NO: 56319 - DNA, 159 bp, Arabidopsis thaliana landsberg
aatctgttagatatatatttgtcaattcataatttatattatgacttgttgatatatagattttttgcaatgttataattgggaagttctggctgaagtaaacacggatataccagtcagttggcggatcaattacgctgacctgttccggtttctgat

SEQ ID NO: 56320 - DNA, 228 bp, Arabidopsis thaliana landsberg
atacatctttagggttaaacaagatttgttggctttcgctttcgtttacatctttcttcgtccggggagcgttttgtctttggtcaagtttttgattctaaggtttttgatactatgagaaatattttatctaaacgttatttcaccaaattatttctattaaaatcaaattagtgatgtttcatccaattctttttcaaattaaaattgcaagtaattattgggggg

SEQ ID NO: 56321 - DNA, 561 bp, Arabidopsis thaliana landsberg
  unsure (1)..(561): unsure at all n locations
caaatttgcactgcgcactttgcacgctgcaattatggtttcgacgttctctaagctgctccccctggcgaaatcccagtgcggtgcttgtctatgaagcaacctaaactaatcccactcgccgatctcgagaaagaagctgctcccccgggcgaaacctggcatatatgcctgaccaatggccgatgcaatctggtgccgtgcaccaatgtgaaggcgaaacctgccccccacccccaagttttctaagccattccattgattctctccaaactttttttatatacaccagaggagtgcagaaccaccagtcccctagcggtattacgcagtgcttcggatgtgccgtggtgccacctgccttaaaaccggtgcatgatgatattctggcgccaagtgctctctgccacttgcgtgcttagcatgtggggttccggcctctaggttggcaaaaagaggttaagacttatggttagtttattaagccaagttgatactatgnctttncatagaatatgtactcatgggtaattcaagttggggagtatctctatagaaatg

SEQ ID NO: 56322 - DNA, 526 bp, Arabidopsis thaliana landsberg
ccttcctcttagaacatagtctgacatgtacttaagatgacagtcattccttcaacctcaatcattcaaatatcatcacaccaaatctatcgtggctctcgttgaatattatttataaccgacacaaatagaccgtgataaccaagaaaatcaagaaaggggaaccattcgtgcatgtccctacgccacaagtctttttcaacagaggatgactagctggctatctaattgagccttttcttttgaacccctttgagatctgtaactacattgtaccaggtataatagtatattagtcaatattaagccgtattacacattttttttgttcacctaacgtttatatatatataatattttttagctacagaaaatgctcaccactttaaattacgatgcaataagatcaatctaaatggataacttgtaaagaaaagaaactgatacagtatccgtgggtcggaataagtcaagtctgattcgaacatcgaacaatattggtatttgacaataatccttgaagaaa

SEQ ID NO: 56323 - DNA, 528 bp, Arabidopsis thaliana landsberg
aaatacgcacacttatttagttcttgttgaccaaaaaaaataaaataaaatctcctaaaagtctagtttcctcaatcgggcaaaacacggcggacgcgctttcttcaatcaaaaactcgtctgctaataagtctcttttcgtcttcagcttcttccgctttttctgattgcttctctgatctcttatctctaattctaatccatagtaaactcgatttcatcatcttctgctcacaacacttactgttgttgttgttgttgttgttattgttcttctcgattcactcgatcgatgttgttcaaaatgcgttcttttgtggcttttgtgctccttctgagctggttcggttcgtgttgttctctcaaggaccaaggtagagactttttttccgtttcacttactcgtttttatctctttggtagtgtagaaacagaatccagttccctgattcacatcctctgtttcgcttttacgttttcagctgtagattttctccaaagtgaagatagcttaaagaaagatctatc

SEQ ID NO: 56324 - DNA, 396 bp, Arabidopsis thaliana landsberg
tccatctttataattgagaaaagtccgctttggatataggttgttttgcagcggattttttagcggaagatgtgaattaatgtaaagggggtttgtctcagatctatgtgtatataacacacgtctgtatgaatgctgtctcgtattaatggaagattcgtttgtctagacctatttttctttagttcttggatatgtggtgccatgatagtgaaatttaagagagaaactatcaactagctcgcatgattgaaatgtttaaaatttgcttaaagataccgttggagcgaagctggtcagatgattctgtaggaagtgttcttatgatgatctgaaaaacaggaccattgctttactctctttgagccacacaatgcgcatttgttcccttaagct

SEQ ID NO: 56325 - DNA, 925 bp, Arabidopsis thaliana landsberg
aaagggaaagttcgtgagtagggaaataatcaatgtgtcggcaattatatgttgcgtttaaaaggagtgatgaataagaaaccaatgagccactaaattagcaatgttttattgggcaacaacgtacgtgtcttaagtcttaacttctgttgtccaatgtcaactacacagaaagacgacgaaacgtacatctattagtctttgacaaaaaaaaaacgtacgtctattagttaaaaaaaaaagagaacaaaaacacaatttcaatactaacatagtttacaacgcgaataataaatcacgagacacccacaactaataatttcactacttttcttaaatatttccttcgttttaaatttttaatatacaattcatctcataagtgtagtttttttctgtagaagacgggagactaaaaattataagaaaaattacaaacttacttgccttaggcgcacatacccaataacatcatcgcttaagagcgtatcaacattagaaggaacaacatcaaaaaatgaaagccatcaggcaatgagaacgcatagttagatctataaatgtagtttgaaccaaagttctagtttttatccattaaattagcttatatattaggttttcgttgtcctactaaacgaattaattttcttaaaaaacatccgtttttttttttttttcagagttttctttaatggcgttcatcttctaagaaaatatttactaatcattattatttttaaaaatgtattgatccgtaaccttaaggtaaaatgtgttagataatagctattaaaataaaaattggagttattttttgtcgcaagaagttcatgctttaatcaataattatgtttcttttgactaataacttggatcgtaagattttctcctttttttggcagcttcagctgacgacgctcatata

SEQ ID NO: 56326 - DNA, 543 bp, Arabidopsis thaliana landsberg
  unsure (1)..(543): unsure at all n locations
cgtttttttttggtatttaacatttcgtttgttgaccgattaacaaaataatattgtttttccattaacttctttaaatgcaaataataattcgacaattaagaattatttaaacaaaagagagatggtggtttgccacgttaaaatttaaacctaatccaaattgaccttttaatctctgttttatttaaaaaaacatataattgttctctagtgtaatgtaatggaacagacgtggataatatttataatttataattagtcattaaacattatcatatgtttaaaattggaaacattcgttgtacgtcaaatattagttgttatcttactgcataaacaaaaaaaaagacgataaattgtagttttaaacattacttaattagttaagctttaatattccgtacaaatttcacttaacttaagataaaataaacaaaattgaaactgcgttggtgcttaagcttgagcaagaaggtaatgcanacgaagcacactacacagagattctggatgaagaacaaatccacatgaaattcgatt

SEQ ID NO: 56327 - DNA, 958 bp, Arabidopsis thaliana landsberg
aaacggctatggattatttgatcacataattggatagtgactgaatccttcccggtaaatgggggaagcgggtgggcataataattcggattctgaagatccggtaatatgacgcagcgggcagaatcgtattactggcatggaagacgacacgtggcgttttggggatccacatggcaatcactgggacgtttgctttacaaaaagacaccgttgggaaagggaaaaataaacggaagtgatatctaaagtaacggagccgtttcatgacaatgtatatatacctgacggcgtcgttcagtggagagtgaagcaaatcgctaagcgaagctctcccaccaaaacgattttctttgtttttttttccttcttcttctcttaaaatttaattaaaataagttactgtaatttgatcaagattttatcttacttctgtaattaaaattaaaatattattcattattattaatttaaccgaatgttagccttaaatgctagtgtatcgatttgtaaagtttaatccatctactagttttggtcaaatgttgtttcaaattgtaaaactctcagggcatgcatgtatattgtataatcgtattatgagaaaatggatacacaatgcaaatcctttaaaattgctgaggattttacttaattgttttttggctatagtggttacttacaagttacacaaacacgactcaagcaacttttagaacttaattgatatatcaatataccacaattgtggtattaggtaggagtaggatggagttttgactcagtgacacgtacacaaagtgacatggactcaaacagtctaagagggaccatccgaccgaatcgcgtgcggtgtgcatgggtaaagaaagtggaatctgattcatttcttaggaaacaaagtataacgacgaggcgactttcagttaattaaaaagctatttcttgagcacatgtc

SEQ ID NO: 56328 - DNA, 1214 bp, Arabidopsis thaliana landsberg
tatgccacacatattaaatactcttaagagtttttgatgtgcggatcatttgattgattgaccaagaaacttaacgcagcaagtttaaagagttcccgacctctatccggtacgtcgcatgagggtctctccccacaaaattcactatcaagcatggcccatgcttgcatgagggcttgaacatgcgacatagaaactagactgatcgcgtgactagcccccttatggtatgtaaaccatcactaaagtagtgtggtaggtaaatttcgatatatttttccttagttcatgcatctaaaacatttgaaacaattatttttacatcgtgaaatcaaaacgtagttattgtagaaatcggtacacattaattttaagtaagagaaaaagtcgaccaaattagcaaattctattaattattatcgttcaaaaccgcttcaaattcaaaaagttccatatgatgttacgtcattgtgtgggacaatgcaaatgtcaacaactcagagtgaacaagtcgccttcttcgccaacgcgctcacataatttgtgtaatattttatcttagtgtttctagaagcttgactcgctcgcatattgcaattctaccaaatcatatttttattttaatgaaatttctatgattttgacaactaattcttgattttgaccttactatatttcttgtagaattagatagggtgcaattctcatagaatgtttctttaaatttatttctaactaatattaaaaaaaactataatatattcggatttagtcttaagaagattcaccgttacttctaatgatatatttgaatatttgatggcaaatcgaattcaaataaccaacaagttgttggtccaataataaattttttagataaaggtattgagttttagacacgttgggagagatttcttcgtcaaataaaatgaatttattctagtgtgggtctcgcatgtaggaaatgtaggtcttttaattttgaatttccaaatattcaaaaaaaaaaaaaaaaatcgaattcaaataactgaaaattagtgcaaattatataatagactatctattagtttctttgaaaaacatatagcctagtaatagacattttgataaatcttatcttttacattctaagctccaaagctttccaaccatatgttttggcttttttttttatcattcggaagaaccattgccgcataattacataaact

SEQ ID NO: 56329 - DNA, 482 bp, Arabidopsis thaliana landsberg
tgggtccaaatctgaatttgctatttagttggtatggcacatagtacatatactgtatattcaataaatttatacatttcaaaacttgataaacaatttgcttccggttctgtttagctctaaaaagcgtttgttaatttgcttattaatatttaataacttagtatatagtgtgtaaaccaagatattgatttttttttttttttgtcaacctattgattctctagtaatcctcacattagttcctgaacttgttttggttccactctccatcatcacatctcaatttccggaacacagaccatgtttacactaataatgaagtagtcaatcatggaaactgcgcttatgagatagcaatcaaccaatacatacaaactaccgttaagataataaacacaacacatagagaacattaaatgaaaaaacaaaagtgacaaatgtgaacaggaagcaaattgcatctccgtgctcttggctgc

SEQ ID NO: 56330 - DNA, 1119 bp, Arabidopsis thaliana landsberg
agagagaagaagagttcaggaggctatatagatttttcatttttggggttatttgtttgatcatgatattgagtcaacgtgactattatgaatataataagattattttgacgagtagctaaaacaaagacggtagcttcgggtcaaaagtagactatttgcgagttgatgtggaatggtgatcaccatgtatacgcgtttaacaaatattgcaatttttcaaacgtggagataattattacttgatggagaaaactttggctcattattagatgtagacttccattgttacaaaaagccaacaaaaaataatttcaaaaataaataaatcagaattaaagggcatttccttttacagttatatccattttaagtatttttgtcaactttagagcttaacgttggtttgtcaagagtcatggtgtagatggatattattacacaaaaatgacttctagctaacatattagaactactaataatagtagatgtttcggaaaaaataaaattcataaagatagatgtctatatttgaaatttgtgtaacattttgttttttgtccttgttagttattagaatgaagaaaacattataaatataaattctaataggatttggtaaaaactaattttagcatgtgtacaaacccttagaaatctgtttttgttttttgtgccaacaatcttcaattaatatacataaactttataaaacagaatgagtaacacttacacttacaagtttattgggtctttcactcttctggataacaatattttctagattaacaatctgacttacgcttaaaacctacacaaacggtgtataaattccacacttttattcttaaaatacatagttttccttgtataaaacttgtaagcgttatatacatagctggagcaaattaaaatatataatcaagttgctagtatgaaacaaagaaaattgaatgtcccatactcttgtattcaaaggatttttaaaatgacgtcttatattaatacaattttatctcacttaggaggaagattataaataagtttaaaaaaaagaaatgaagcgttaacgtcgtcatgcttgatgtcaactctagagcattgctcaggcaaagtgtc

SEQ ID NO: 56331 - DNA, 1341 bp, Arabidopsis thaliana landsberg
atcagattacctcacagatatgtgatttaaaagctgagaacaatgtcactttctgatcggttaaagaggaatgaagccatatagctagtgaatttcacatacatatatcttcaattccatctttttgttccgaaatttagagatggatttagcaataaccaaactttaagcactaagctaacatcaaatggaacctgaagacaattactagccactcaagtttccaacaataaaggagcttgaagctcagacaatagagaggaagtaaaaaaaaaagattttttgagaaggtgattactgtatcagatctgcaagttgttgatctctagtgcgaggattaatccctttacgaagctcattcttctgcatatgcaaaccgttggatctaatcagatctctaacccactcaatatcatcctgcgtcggagatatcctgtcctcaaatctcacatcaccaccgcttccaccgacagaagcttcaacggcgtcggtcggggaagaagataaagcttcaggacaggagcaagaggagaaagaagaagagaggaggaagaagacagcagctacaaaggaaacggtgagaacaagtacaggcatggagacaaagattcctttctgcatcgccggagaagaagaagaggaggaaaacgccattggtgaagacagaaagaggagagatctcagtgtgtctctggtcgcttaaggaaactagtgagtggaaatgagttcgtttaccaattatagtattgtcaatatttagttttactctaatcaaacatggtcattgcacgatcaacggttaaactgtcaaaagttttccttttttttgtcaaccaagtaatccttttttctttctaacaatattagctggaatatgacatgtgttaattagaagaatatatgtgactttaaacaagtgaatgattattactaaaatacaaatgaaaagaaaatgcataaatttttgttaaggattatttgtggttttagcataaatttattaaatctcaatagctaatttttgtgtgaggtcaaaaattatgtcacttatccaataagaaaatacaagaggattttgatataatcttatccaatcccaaacactatttcgattttatttactaaacgcaattttgtcctctatgggctgattttaccaagtctcgctcgagagcctttgagagaagagtttgtgtttcttaaggaaaaaaaaacacttttttttttgtttcttcttcttcttcgtcttcttcttccaaatctccaaacgccatcacgcctttggaaaaaggctgctcttttttgtttgtccttcttgactcttaaattaaatgttgctca

SEQ ID NO: 56332 - DNA, 387 bp, Arabidopsis thaliana landsberg
aatgagtattacgaagaagtaaggacgaattgctcttcacgcaaatgtttttagctagaattttcgagaagagaagaaaaggcttacactgggggactgtctattgcggttgaaagacttgaagcaggaaggaaaagaagaggtaacacatctggagatgacactagcgaaccaagcaatatcaaatagaggaaacatgatgttacccaaaaatattctgatgaagctgatacccagaggtaaagtctgatcattcaatattaaattttacacatttgtggtcttgctttcacatcaatattcaaatctgaatcttacatcttctttttctcagtggcatattaagtcccgataatgtgcctgaggacaaacatgaactaccattaa

SEQ ID NO: 56333 - DNA, 414 bp, Arabidopsis thaliana landsberg
tatccctcgtgcccacagaagtccagcattggctgagggctacctaatatgactggaaagttactgagccctgtttattttgagggtaatgtccctgttgccagtctgcaaacaagagaatgggaataccggcgcctgtgaagaatgcaagggataacgacacggacaattctgtgatcatactgagacgaatggttgttctcttcaagagatggtttactaggtactcattaacacctactctggtgaacatgaaaatggtgttaaacacaatctttaccatgcagtacattgaacaggacaatacttaccatggtgtgcctgcctatgaaggaattatctgacagcataaaaatacctttcgtttatgctggcaggaaagtcgtatagcacatcactatcctgttgcggcgg

SEQ ID NO: 56334 - DNA, 155 bp, Arabidopsis thaliana landsberg
cgtttagcacttcgtgcagtaactcccgatatagtattaaaagcaagatttgtaggcggatcatttcatcaagttcccattgaaatatgatccacgcaaggaaaagcacttgccattcgctggttattaggggcatacccgaaacacgtccgggt

SEQ ID NO: 56335 - DNA, 594 bp, Arabidopsis thaliana landsberg
aaccaacacagtacatatgtttaacaaaagaaaaacatagtacacatatatatataggcttcgagcgttcatcatttgaggctgagacatatagctttgacggcccgttacttaatcatctttaaagtacagagcagggtgggacaaaattgtatgcgattagttgttgacaaaaaaacatacatatacatatttaattttgtcatctattatatataccattttaatcacatatacaattctgagcttaacaatccatatatggatgatttgatgtcttatgatttttctagaattgtttagttttctagagcttaacaagccgtagatgattggttttcttctcatctacaacgaacactatgtaaattgtaaattattttttaaaatgaaatattaagtttacgcatataattactaaatatgaccaactttttatatgttaggtttcagaaaattcaaaatcgtgttgtcataattttaacataaaagtacgaatctatttcgatgtaattaaactagaaagccaagttgactatattgatcccaatgtcaagtaacactttttattagggtatatacactcactaatat

SEQ ID NO: 56336 - DNA, 1584 bp, Arabidopsis thaliana landsberg
gtttaatcatcactcgtgtgggagagttttaaaataaatgaagtaaataatttgagagattcgagtcttggacatatatacagaaaaaataaaataatacttttgacatgaactaaaatgctaaaaaatatttttgtaaattagtacttgcattcttatatagtttgcgataatactaacattaattgttgtgttgtgtagtatattactcatttacagtgattgcaaaacaaaattcagttttctacttccttacactgttacacacttatacttacattgtaacgtaaaataattgtagtttgttatgtaatagtattatagggaaaaggaggtacgtaggtacaaagtctctagctccgtattaattgtcacattatgaatttccttagcggcaaaggctttgtgtcatgaagaaagtgtgagtagcagacacgtggacaaaacagttggatgttgagtatgtcattgtcattgccattgcccttatcagaaacatgggtcatgagaaaaactctcctcctcaattttcaatcttttgttattgatggattagttacgtgttttttcttcctcatttcaccaacaatatttgcatttattagttcatagtacaatatagtttcggtgataaacggcaaccgggcaggtaatggcaaactttatattgttgaatattattaaaacattcaatgtagatgttgaaaaggttaggacaatatgtattataaatttagaatccaaacttcaatcatattaaaatcaagaagacgaaaaaaatgtctctaagctaatgtgtttcaagtagtggtttatggttatggagataatatgattggtttaatttcttgtgcaaatgtctgcatcattatagttgagaactttagttttgttattcagtttgtggcaatagcttctgtactaattaatttagaaaatgttgaatttgaatctttgcccatcctaagtctcctctcttccataaatgactatgactatgtcatatgcagacaaatatataaaacaagaccataaactattaatgacgatatttttttgtatgaatatggttgcttgctttcaaagaaaaatcatcatttaggaaatataaaacgttgaacctaacatacaattaataacgatgactatactattacaaccacttgatttaacgtgtttattgataattctccagcattacataaatcagtcacctcaatctatgttaaaatagtttgcgtctaggtcaaaaagattgaaaattatctggcaagaaacatttcgtttaaattcgtaaatcttataaagttgggactagtttaatcttcttcgttctaccacataaactgaacaatattctgaaatcaatattcgttaccttattttttgtatcatcgcatcaaacctgtcagatgtaattgagttgatagatttattaatttgctatggcctatggttaaatagttaaatccttgcgaaaataaagactagctaagttaataaccataatgatgggctgggccttactgggccaaacgagagagatacattaatttaataaattaaaaagatccgacctgccgg

SEQ ID NO: 56337 - DNA, 294 bp, Arabidopsis thaliana landsberg
ttcgtatatgatgaagagagacgactatatgacaggcgccgggcgtacatatacttgggcacatagtttacttcgctactatgaaactgagactggctggtcacacggatatacaaacatagaccaagtttagaatatgaatacaatttaaatctgcccaagagcctagagatgcgttgctgtgaggacacgcatagttacaatggtatcagagaaatcgagcactcttcgtcgaaagggaggcaaacaccattcgtgcgatgaaatagagcttgacgctcgaatacctggagt

SEQ ID NO: 56338 - DNA, 488 bp, Arabidopsis thaliana landsberg
  unsure (1)..(488): unsure at all n locations
tgaaaacncggtacntaatccatccaaatttaataattatcttgncaacgaccnaaatancgggcgcggattcttttaaacaanccactaaggcccccccaaaaagnnattnnnanccnaaaantnaaaanntaatatcatcatntnntcattttttcntaacctttctatctatctatatacctattgaataactacgtaaatgacacaaagtaagacttaattagataaataacaaatgctaaaattcactactagaaaaataaacagaaacaaagactagataaaaaacgataactaccgtaagcaattnnnnnnnnnnnnnnnnnggtcacaaatatgcatagctaaaccggagatgcaaggatacaaagaagttatttttttcaaagctactccaaaatatgatgttttcacttgactggttgtgaaaagcaaagttgcaacataataaaaaatgattaaatggaaccaaaatgccgatacaa

SEQ ID NO: 56339 - DNA, 113 bp, Arabidopsis thaliana landsberg
tttatgtttagcgcggcgctttctcataactggcgctgtgtgtatctcatttcggtgtaggtacactctctccaagctgggctgagtgcacaaaccccccgttcatgccaacc

SEQ ID NO: 56340 - DNA, 1491 bp, Arabidopsis thaliana landsberg
  unsure (1)..(1491): unsure at all n locations
tgagattctttcattatattggcacatagttcccatacaaaatccctgcgtctattatataaagaaaacgagaattataataaaaattatctttgtgtgttaaattttagttttcctgttgttcttgaatatgtaaacaatacaataatgatgatgcatcatgtatatccttgcgtcatctgtatcaaataatttataaattgacctcctacttgtaaatggcccataccctacgatgatccaacgcaaatcacgtgcccaatattttcagaaatctataatcatatagtatactattgacattgattttgtgattcgattatagagaacattactgattacactgctctccctatgttttcaaagacagcgttcgaacgctgtgctacaaaattaattgaggttaaatattacgaaatttagcattattaaattgagtaacgaatcatcagaaatctaggtgttgtttcgcacgttataagatcaactgtaatagtgattcgacaatatccgttgagaaatgggtttatgaaatgtatgttttcaactgttaatggattcttttgttacgttgtcaactgtacaaagtaaagtaacccattgcatggtaaatataagtataagtgtataactcattacatagtgttatgtcataaaacaatcggccaaccaatcaggtaatactgaacatatgatattaagctgttcattcttaaaatgaaaaagaataaaagagagacagttattgtagactagcaagagaaagagaaaacaaggaacagtcatgaggttgaattctacaatatttaactaatctaggaaatcaaaacctgactgaatttaatgtgatgaaaatgaaaaaacaagagaattagatatcatccagagaatgaacattgtatactttgtaagcaaaaaaagtatttataagtaggtatagtttattcttcctctcaaatcaaattaactaattaagtgtcattttatgattgttttctgtttcataaaataattaagtgtatcttttaatgtcaaattttacataaaatatctaaattaatctcaaatctttagtagtaatagaagtatagaacatgatagctacgccttacaaatttaattgtacagattgatgaactctaaaatactcgaactttaagcggaatcaaaaatgcatttagattttgatatcaagaacaagaacaaaacagaaatatcaagcaacagaagaaagtaaatatgaaaaacataaaatagaatgaatgttaaggcgatttaataagttttaaacttagagagaaaaccacatctcttgagaggttttaccaaatcttctcaaagattatagttttagctcattctcgctaacaaaatacaaactttctcttttcccttatttccaaatgacaagtgtattcccacttccctccatcgatctcttttaaacaagaacctaaactacaagacaagtttacacgcnctgacacatgt

SEQ ID NO: 56341 - DNA, 504 bp, Arabidopsis thaliana landsberg
cacatacaaacaattgccaatgtatacatgtttttagacgagagatttatctatatctaattattttttaagagaacttgcatttataaaaagtgcaaaaacctgaaataaaccgttggaaacaaaaaagagagaacaatggctctgctcgcatacccttctaattcgggaggtgatcgtccgaacttcaatgtgcgaaacagagacagatgcatgaaacaactctcctcaattagccctagggctaacaagctaatttgaacatgttaattaattgaaactctccgtacaaaattggacacccgatcaaagaggagtgccacatattaaattaacagatctaaacaaatgaacgacgtgaatcaactaaaaaaaatatcctcataaaatggccaacgcttatcaaaacaaaattcacaaccgccaaaagtaaactacaacttacactttggatcgccctttctatccccaaaaaagcattcacattggtcttctgcaaatact

SEQ ID NO: 56342 - DNA, 1107 bp, Arabidopsis thaliana landsberg
cctgtaggattgatctcttgagggtttgcatgatttaacaagctcttgttagaatcacagtgcttgttgtttttctgtgtgtgaaattgataagattttaacatttgggaacgttgtagttgcagctgaatggtggaacaaactgtggttagagaacatatcaaagcgagagtcatgtcattagtgaggtctgcagagccatcttcatataggaacccgaagctttacacgttgaatgagaatggtaataacaatggtgtcagttctgctcaaatctttgatccagataggtcaaagaatccttgtctgactgatgattcttacccaagccaaagttatgagaagtactttcttgattcgccaaccgatgagtttgttcaacatcctattggctccggtgcttcggttagctcatttggctctttagactcatttccttatcagtcaagaccggttcttggatgttccatggaatttcagttaccgtttgattcaacctctacatcatctacaaggcttttgggagattaccaagcggtttcttacagtccgagcatggatgtagtggaggagtttgatgatgagcaaatgagatcaaagattcaagagcttgaaagagcgcttctcggcgatgaagatgataaaatggttggaatagataacctcatggagattgacagcgaatggtcgtaccaaaacgaaagcgaacagcatcaagactcgcccaaagaatcatcgtctgcagattccaactctcatgtaagtagcaaagaagtggtgtctcaagctactccaaagcaaatcttgatatcttgtgctcgtgcgctatctgaaggaaaatcagaagaagctttgtcaatggtaaatgagctgaggcagatagtttctatccaaggagacccttctcagagaatcgcagcttacatggtggaaggtctagctgcaagaatggccgcttcaggaaaattcatatacagagcgttggaatgcaaagagcctccttcgtataaaaggcctccagctatgcaagtcctgtttgaagtctagacattgtttcaagttcaagtttttagcagcaatcggtgcgatacttccgggatctaggta

SEQ ID NO: 56343 - DNA, 1098 bp, Arabidopsis thaliana landsberg
atggatctgagagttcaaacctaaatgagctacgaaatgagacactttttttagtgtaggaacgaaatgagactctttatcattagttttgcattactgcaaatatggttgaacataaatcacggttcttaaactttttgtgattggttaaaattatacttacagacatgttacccatatcaaccaatatgtttaaagatgaaaaaacttaagatgatacaatctcttattcaaaaaacaaaaactttagacgttggagacttggagttaagcctaccttaaaaaaaaaaaaaaaaaagcaaaacaaaaaccttacaaaggggtttataaagttagaattactacaagaaactaaaatttagaaaagatctagaaaacgtggaaaagaaaatctcaacgataggatttaagaacagagccgcaaaagctgcagacgatggctctccaagatctacaataaataggtataagacaaaacctcgtcgaagtcttcatatcggcgactcttgcaccacgaccacaccgggaacacgttcctgccgccggtttgcttcctttaaccttcctcttctggtcaaccaagaaacagaaacacaccattattgatccttcttccaattcttgttttcaaattcggataaaatgcactggagatagtgatcgatatcgctcctaagaacgctgttccttgtgttcttgaagatacatttgggtcagagatgtgcaagatgattgccctactgatgcacacgtgtttggcgtagaatgtaagtaattatgaatatttatagagattctgatatttttaaatgaatttttgacgtgcgtacacatacgtacaacccccaacttccagctgaattcttcatttttattgttttatgttcttattcaacttatatattaactcctattttctaggagttttgttattgcgtgaaggcgatatatgtacgtcactgatgaatcagctcgtatatgtaaacgtggaaaattatagttggaggttgtgtttgtcactgttccttatcggtaatatgggtcatgcgtaaagacccattctctctacctttaattgtcaattttctcattccaaat

SEQ ID NO: 56344 - DNA, 529 bp, Arabidopsis thaliana landsberg
  unsure (1)..(529): unsure at all n locations
aggaccctttatttttccgcggccggaagtggcatngggtaatgctatcacgaccaatgtggcgcgttttaagatccaggggggtggaacaaaaagaacggtctgtgaacaggggttccgtatgacagctgctgcacttatctttaaacaaattgtatcccgccagttcatccgcagtaagttcaccgccgctttccttccgtatatatttatcatatttcgaatcagacgaaaccatcattccggtaaattgggtcagtgccctgaaaagacgctgggaattgatctccgttgtaccgaaagcctttctgaataattcagggtagggtgctttttgctgcagtgttctcacgatattatccagactgttagccatttcacagggattggtcagcgcattcaatcctgaaacttcaatatgatgtacgcctccatcccacataaattcctgctgccataccaggttaaatagtggcggtgcattacgtgatccaaagcaattatttactccatggcttaccgaatgatc

SEQ ID NO: 56345 - DNA, 1499 bp, Arabidopsis thaliana landsberg
cacatatgctatcaccaatatcattatcatctgcattcatttccgtctttatatcattaataaaaaagcgtatatatagatcaaagcaagtttatactatacgtaaatattattggattcatgcattttattaggatcttagttagtttgtctatttttgtaggaatttacacagtcaattatctttctatagtaagaaaattggaagatgttccaaagcaaaatttgtagattaattaagaaattatttgtcaacttgggtacctgtaagacggacaagaaagcagcgcgatttttattgggtaagtcaacattaagtttaatggcgatgttaagcatgaaaaaacaccaagagaggcagtcatgcaccatcatggatgcaagtgctaacctccctggctcagtgttcaacatctttaagctcgacaagactccgtaaaccacctgaaaaaacattgtggactggacgatcgctacatggtggaactccacgggagggatccccgcaggcccgcttttgagcctcttggagatcaagatggccgcgaattggccccatacgaaaggtatgaggaaaagtaagatgccgtttatgaatgctaacttgcctactctctttatcatcctagtgtctacttgacatgttgtgatgtagcaaatgaagagaaaacatatggcctcgaaggattcgattatgtacacgcttctcgcgtagaagaatgtagccatgtactgtttgttacgtcctataacggacggtcctaagcagatcccagcctgcaaacaaattcactaataaatattaagtcacatttacaccattatgggcatggctatacatgtttttgagacgactagtccatatttttccactataaagtttccaattatagatgattagacatggaaacgtataccagcatctgagtgaggaatgcaaattttccaaaaggccggaggagaaactgaaaagatacggaaaatatggaaaagacagaaatctgaaggagaagaagaggaagagcaaacttgagcggattctctccccggccaatccccaaggagcctgcacctacccatggttcgcaaagccaatcaactcctccgtactgaaaagttttggtgatattttccattccctcctgctaggtatttccctaaagagttaagccatagagggaaagagagagattgtgttgtgagttgaagaaaagaagaaagtattaattattctctcttttttttttttctgctctctctagctatatttaggggtttaattgtacatgttgtttatcctcttgttctttatttctctttagaggtcatcctacgtttaaggttttctatatatgtttttctgtgtggtacaaaaatcttgagcatggtcagatgatcatcattatagcctgagattgattgcacaaacatgtgtgtttgtaatatatattttgcatgttgatgttataataatcaacctagctactaaatccatgaag

SEQ ID NO: 56346 - DNA, 392 bp, Arabidopsis thaliana landsberg
ggaatgatgttaacttcaaactttatcctcccatccttctcaatgatctgaataagatactcgatttcgctaaacgaagccagctgaagcaacaatagactacctaagacattctaataaaatgtttacctgtcttcccataagaccatatgctgcattttcaatccaactatctgtatacatctgcaaacacaaaacccgaaaaatcgcttatccaaacgaatataagtgcttgttcaagacaaaagctaaagttatcagagaagtgacctgtgaactccaaatcatttgccaacttccttctaaaagctcataattatcttccgcggaattagaattagacgcaagaaactcatcgatagcctgtgtttatactaaacgaaccatggggt

SEQ ID NO: 56347 - DNA, 928 bp, Arabidopsis thaliana landsberg
  unsure (1)..(928): unsure at all n locations
agagtcaaccatacgatatgcttttagtaatacttctaaactcaacattaattaaaaatgtagttattgtcttacttgtaaattatttaggttaaaaccaaaaaaaaaaaaaactatttaggtttaaaatgtgtaaatgaataagatcagcttctttattacaaaaattactatagaacaaatattgaattttcaactctcgtagcgtgacggaatctctggggtcaactagttgacatctgacttatgagggtcgttcacactatctagtatcaatctactatttatcctccgtttttttccttttaaatttgatagtagctacaatactatcaaatcacaaattaaacaatcgaatgatttgattattatcttagagttgcaaaatatttgttgccatttattagattgttagctacttttaaaatgtatttaaaactttgtaatttcacaattttagtcatggggtctacctagaagacttttacatacagacaaagaaatcaagctaaacagatgattacttacgtcaatgaccttatatacgtaagtcccaactatataagtcaagcttgtaaattgcctttattgacagttcaaaagtaaattaatttaatatagtattactactcaaaaatatatttttcattttcgaaataacttgtagtgaaatcccactagagattatgtttgggtcctagaaagtagaaagtggagtcattttcaaaattattatttacttccaagttgtttcgaactcaaattgaatattatcgtaaatagaaactcaaacgcatacattacttcgcccncaattatttgaaaagacattatgtaataaaaaatcacatctnctatatnntttncntnnccataaaaancaaaatttnggcggaacataaaaaacttaagagtgaagatcggcgac

SEQ ID NO: 56348 - DNA, 964 bp, Arabidopsis thaliana landsberg
aagatgttgatccttccttgttctctaaagaacttatggctatttcttctcgtttagttgatgaccaagaggtcagatatgatcctggttttctcattgacaaagctcatactgcaactacttctagaggttctgccacaatgtgagtgagatttgattgttattctcttcaaagattggtttttgttccctttttggatagcttgatgtcccggttattgatgaaagcagtattctagctatgcttgaggaagtgggtattctcaaaataggcaatgttggtgactgtggacttaagcttcttcgggaaggtactacactgtaacctaagatgctagattgttttcatgttcagcctttgacaaagatcttcttctttcattctcattttcaggtcagattatttttgccactgctccacaagagcactattttgactgtccttaccaactaagctctgaggggtctgctcaaacttatctagatgcatcggtaaataaatccttaccactcttcatgatttgtgctagtattgtacctttgtatcattttttttgcatttcaagcagtttagcatagtggaagtacagaagggagacgtgatcgtgatgggttcagacggacttttcgataatgtgtttgatcatgagatcgtttctatagtgaccaagcatacagatgttgcagagtcatgtatgtatatgtatataccatctctcttgatttttagtaagtgacatgttttttggtataaccattacagcaaggttattagctgaagtggcgagtagccattcaagagatacagagtttgagtctccatatgcattagaagcaagagccaaggtaagatttttaacttgatctaagaatgaattttaccagttcacgcaaagtatatctgaatcaacgtatatgtgcaggggtttgatgttcctctctggaagaaggtactaggaaagaa

SEQ ID NO: 56349 - DNA, 649 bp, Arabidopsis thaliana landsberg
gaacctgagccgtctcttgactgaaccaagaagagaccagaatactgtttcgacccaagtgagacatccaacaggtgtgtgagctttaagaagcaaaacccaagtcacttgcttagcgttcttgcctctactcttctccattggatgaaatgcagagtctggttcctctacttcaactattgagtaatttggattctccattttcaccactactggtgtacctctccttgtttccttggcccataaatctgaaaaatcaaaccttggagccatatttcaaagctcaagacccaaatctggaagaagaagtagttgaatctcttgattagagtttaagacccaaatctcaaagttggaagatttaagctaaacccatcttgagaaacctaaaggtagcgactttgagtgagtaaatcttcagacttcaggttaaagaccaagactttgtaagaaatttgaacaacccagatccaagaactaggatatctaaagacccacttttaaacaacagacagagaagcagcaacagctcaaaggggtcattaatagtgacctgcgagagagagtacagacaatgagtggtttgggcaagtgagagagagaaaagattgatacttggcaatggtagagataaaagagagagagaaga

SEQ ID NO: 56350 - DNA, 440 bp, Arabidopsis thaliana landsberg
ttcatgcatgcacacgtacgtatatgtataccacctacatagaaaatggctatatttatagaaaaagaagagatggcttatgtggcaaattagtgccaaaacacaacttttgtgaattgtgacctcaagaggatttggtcgttctttactgcaaattgtttgtttatgttcattgaggagagtcttctattagaaggggcacatattattttgagtgtgtgtttaacaaatgttttacatatatatatataaatctttttctttataacttacacgcacattaacaaatttgaaactaagttttgacatgatagccgtatatcaaaaactaatttatactatttattatgaattcttaaccaacaaatcactattagttgggtttataaccttggttaggctttcaattctaaaaacaaacattctttaaatagaaaaga

SEQ ID NO: 56351 - DNA, 555 bp, Arabidopsis thaliana landsberg
tcagaataactacaataacaatggcttgtggtcaaatcttatatcatacagttgaatattttattaaaaagtcacgaggatagatgtgtcagtcatagtgtgagtaagagattcacttcagtttcattgatttctttgaatagttaaagaaacatgttcatgatttaaactcgcacaacatgacaatattggaacaaaaggaagcatatgcctaacatatgcgtaatgtttttttttcttgatataggtatgcttggcttttaaaaacatggtactatcatcaaacaggtttggcatcaacttaaagatttaaatttttaatattatgtcacggattacattgaaaccataaggagattaaaccggagcagctggagtcttggatttcagaatcttctgactttcttcaaagtattggttgggatggttgataccagtatcacatgatgtaccataaacagcttcaaaggttaaggtgcatgcgagctttaccatataaatgcatatgaagaagagcatgttagcattgctacaatcgccaaaaagattgaggtc

SEQ ID NO: 56352 - DNA, 353 bp, Arabidopsis thaliana landsberg
  unsure (1)..(353): unsure at all n locations
ctcgatttttgtttgtttcataaaacaaaaactatatatgtctttcttttgtttctctcaatcttcttatatataaaataatgtttttgaataagtataagttttaagaaatatagtttggtttaattagtcatggtagattataaattcgattgtgattataagttatgtgtaatctactcatcttggtatcactctttgataatgataaccttatttgncaccatatgtttttttttttcggctatcatctaaccagtaattattattatttttaattattttttaaaaaacaaggaagtttgggattagataaatattgttttgaaaccaaaacattattattgaacatt

SEQ ID NO: 56353 - DNA, 1651 bp, Arabidopsis thaliana landsberg
ttaactgcgcctaactgatgactggggaagttttgatcaaacaaagtctacacattacctaacattctctgttctaactaaatacatccatttaagagacacttaccaacctcctactcaaagctactgtaactgttgttcaattaaccatcaacataacttcaggagtaattgattaaacaacaaagaactctgacttcatcaaaaacatcgaaagactctgaagtcaagcatgttgtttttatatgtcaaccgcaaacctatgcattaaacaaccaatagaagccaaaaaaacgtacagaatctaggagaatgcaactatgattatgaaaattcacgcacactaataccactagcttacaattagagagtgaaacgttacaatacgtccacgcaaaatacgtcttattattatgataacgtacattaatattcatgttttctgtttgtgctctgcattttgcttatctgtgctaggtgaaaacaaaaaaaaagaagagatttggacattttaacacacgctttgctcgcacttcacttttttcacaatcatactgttattttccttcctcttataatgaaaacttaccgataagcaaatttgtaccaaacgtatgaacgaatgatctttctagattagtcgattttaccatacattaattaaattattaggttcatctacccaactacaaaaaaagggagataacgttggcgttttcaaaaaagagtgaacactaataaaagttttctagattccttttctcaacttatctttaagctaaaagactccaaacaaacacttaagaaagaaactgtcactcaaacttaaacctacttcccatgtgaatcaaaagaaagcaaaaaaaaccagcaaatccgtccatctttaaataacaatctcaaactctttaaacgttactcaacttttttcttcttttcaaaaacccattctatgaacacaatctcacctccttcatcgtgtttcatacctctcttccaaacacgatgattaccaatactaatctcttcttgtttctctctttacttcttctttcttgttttctccaagtttcttccaatggagacgctgagatattgagtagagttaaaaagacccgacttttcgaccccgatggaaatttacaagattgggtcataaccggagataatcggagtccatgtaattggacgggaatcacatgccacatcagaaaaggtagctccctcgccgtcactaccattgatctctccggctataatatctccgggggctttccctacggattctgtcgtatccgtacactcatcaacatcactctttctcaaaacaatctcaatggtacgattgattctgctcctctctccctctgttctaaacttcagaatttgattctcaatcaaaacaacttctccggtaaattaccggaattctcaccggagtttcgtaaattacgagtcctcgaattggaatcaaacctcttcaccggtgagattcctcaaagttacgggagactcactgctctgcaagttctgaatcttaatggtaaccccctcagtggaatcgttccggcgtttttgggttatctgactgagttaactcatcttgatctcgcttacatcagttttgatcctagtccgattccatcaaccc

SEQ ID NO: 56354 - DNA, 1330 bp, Arabidopsis thaliana landsberg
gttttagattatgttagtaaagaaaccaaggcctcccagttagcatcatttggtttgttttttggactcttgattgcagaggctgataagggttttctggtccggggtaaaaggactggcccaagcctttagcttttcttcactcgaaattcggtgagagcaggctacgtgcagtgtacaagaagtactcgaaggcagagaatggaggtgttgctatggtttctccggccaagtctctcttgagtgctgctgctgattggaagaagcctgtttcttcttagatgttttttttcatcagatctctctctgattcaaaattctagatttctcatcagatactcttttgtttttttgagttcaaacgtattaatgaattcttctcatcagtgtttttcttaatctctgattacttggatattagatttctactatatctttaacagatagatgatgtttgactgtaataaatcagatgcgtgcaattagtttccgacttattgtaaattgaatgatgataaatgaaatgcataaaatagttaatgttatatcgtgaatcccaattatttatgttttatgatttatttattttttaaactagagatgaaggttttaatgaaaactactctaatatagcatatttttacgagattatccactaaaaaccggtttattttgaaagcataactacaaaatactagtagtgttattaatttgatagtatatttcataatctagtagtgaaaaagttaaaatttccatttttcttttgtcccaatcttaagtgtcttatcattctaatttttgtcaagaatctatctttaataatcatatctaaaacgaactaatttatctaatttcatcaaattttgttgttaaatatgacaaaatgaaattttggtttaaagttaaaaaatctgataacctttctcttttcaaaggttacttacttgtgcaccgaaagttgaacacaaaactcggaatattacaaatctgccactagaggtgaatttttgactaaatcgttttttttttttttcgatctcacggggttgattctcgttgttgtctcatggagagcacggagcagccgaggaacatctccggatcgatgcagagccctagatctccgtcttcgcatccgtatctgtcagtctccgtcacagatcctgtcaaattaggcaatggcgtacaagcttatatctcttacagagttatcaccaaggtttatccttcttggaacctgattcgtagctttcagtctagggtttctatttgaaaaaatgggtgataacagaagattattcgctgattttttgttgttgcgaaacta

SEQ ID NO: 56355 - DNA, 1435 bp, Arabidopsis thaliana landsberg
ttgtatttaaatagaaaatcctttaacaaaaaaaaacataattcatctcagagaccaatgtacgtaaagtgtgataaacccttgtctggttttgcattttgtaactagtttggttttgcattttgtgtgataatgaatcaactcgagaaattcatgtacaagtgtaaccacaaaacaagtattgtttatgttttttatcacactatcaaaaccatctaatcaacaacttcactgctaaacaacttgaacttattagcatcaagaacaagtttcctaatggaggagaaagctcccatgagtcctgcacaagtgaacacaaccattatcgtcatgtttatccaatacgtgaagctccgtctggttggcttataggtcatgttgtatagaagcattggcagcacgaaatcgagtgggataaacccaaacgctcctaccaccgcgtttatatccccaaagaacggtagcatcgctgccatgaacccgcaaaacgccatatatagtgttcttagtatcaaacgcggcacaaggttgcgttttgagaatatcccttttgttgtatccgctgatttcttctccattatttcatacgcaacttgagaatacacctaaccagttaccaaaaaaaagaaacatttagtcactcgtctcacagccaagtaacatcgaataacgatcacactagttataaacttacaaggccaatggcgaaaagctgaagaaggacaaagatgacagctaagccaattaccacgataggagccagagtcggtccttcatcaggcattaagttcttgaggatattagagctcgaattgttaccaaaaacccaatatcccgaaattgcagcagagtaaaacgtgaagaagatcacactataacacaacaatagtcctttcaacatcttccctgtggctggtggagcaagagttgcctgcatacatataatcatctcataaatctcaaacacataacatacaatgtttgtattgaataaattgcaaacatttctcacctgtatttcgggtaagattccatttccgaaaatagcagctatgatcgaaattgatgtgaaggcactaaaaactttccctgaatccgaatgctctagagaatactcacgtttaggagcgtttttcgacaaacctgtagaaccaaaactgggcaatgaatctaaattttcgaacattagtaagttgttgtttcttcgctaacgtaagaatcattatacctaggttgatacaagccccaacgacgaggaaagtatatcctaagctgagaagcagagacgcacagttaatgtgtctaagagagtgaaaacttggaagctgtgagagaacatcatcacaacagtcacatagcaatgaactcgtaaagcttcaacgttccttgcgggaaaagactctgaatccttacctgtgtagtacacaaaacagag

SEQ ID NO: 56356 - DNA, 478 bp, Arabidopsis thaliana landsberg
tcagacaagtcattagacctggggctgctggctgttcacttagtgaagaatcatttagattaaacttaggttataattatttttgtgctttacaagggagcttagattgcaaggttcttaaattagttgttggaagtaatattttctttcaacagaatagcaatggcatcctttcagtcctagcgcttggaactatgtgcaacctatcagtaaatcacgaccaaagaccatccctggccctgattgacactttattcggtcatccaaactcgactgcaacgtcataaaattagaaggcataattaatgcattttagtgggaacgggtaccagatgctcacaatatgttctcgttcagttcagttgtgccagctacagtatacatatgtgttactttctataaaaaagaatatttctgactgaagtgcttttctgctacgtaataaagttagaacgcataagatatgatttgacattgt

SEQ ID NO: 56357 - DNA, 1476 bp, Arabidopsis thaliana landsberg
  unsure (1)..(1476): unsure at all n locations
ccatcacatgaccaacgatgcaaaatgtttaatttcccatgaaattgaagcatgcaagaagcaaaagctctaacaaatccctagaatctactacatgagagagagaaagaaagaatattccgtttacaacgaagattcatctgaaaaaggcaaaatcgaatcctttggtatgtacgactaagagattcattacattgaagaaattgagaaccgaagcaagttcccaacgtccacgcaagtgcttcaccgccgaatcggaggaagaatcgttgtctgaatcggaggaaagaatcgttaagtcttcgcagagtcgttcttcttccttcttctgttccggttcnnnnnnnnnnnnnnnnnnnnnnnnnnnnaggttaccattttcgtcggagagagaaagtggaagatgaatgggtttttgtgggagtggaaaatgtataaaattggagaatttttctgggggaattctcccgccaaaagaggaaatgattttactatttactaatttaccctacaacaccctagggctattaatttccctttttgttcttccttgtattttcttatatttctattttagtccctttattctggaaaaattagtaattcggcttttatttctttttgctctagttggacacgacttgaacacataattgattccttatactaaacttacggcccaaagaaattctatcatatactacataattctgacaagttgagcagatacttattccatttgttatctgtttttacgagtttttcacttgaatacgaatatatactgcatactggattcacactttgtgataaaagtttcagtaatagcaatgtaaagctaatacgaccttatatatgtggatccaaaaccaaaccagtgagagtctttgttgacatttctaatatttcctttacctgatatagtttcttcatgagcatcacctgatacatgaggaagtggatcaggtaataatgaatttagcagtttcattgtttaagtgaagctgtgaagaggtttaaaatcgagtacttggatttagcctcggctgttgcttagcatgtctagaatagtgtaagcagctttctgaaactggtctttctcttcctcgaggatccttttcttctccatagcaaaatcctttgatttctcaatctcttccttgattccaaccgagttttgatcgatttcactgcagggaaggcactggatcagcactcagcacaaatagtcattcgttgtagtaaacagaagataaacaatacttactaaaccatcttgagcatattctccatccccatctgaacttgctgtgacatttctgcaattgcgtttgttttcaacacactcaggagatggctaaagaagtagacacacaacactgacttgtagtctcaatccatcaactgattctaatccatgaaacatataatgataaacctttaaaacgagttatggtgtttgctaatatgcaattg

SEQ ID NO: 56358 - DNA, 1131 bp, Arabidopsis thaliana landsberg
  unsure (1)..(1131): unsure at all n locations
ctaactacttagaaatgtggagaaattccgaatatttgagtaagaaaacatccgatctatgaattaataggaagttcaaaagacatgatcactcccatgatgacttaaaagtgatagagaaatccagatattccatgccaatctatgatttgaaaaccaattattggtatggctatgagtcaaaatcagatgtagctactagtatttgcggctgatagaatttgcttagtgatgatatttctttaattagtggctgtttaacacataagccaaacctctataattggattaacatatcccccgacttggtcggtctcattattgtctatgaccttagttgctacgtaaatgatgttgtttgtcgacacatgtaaccaacactgtcttcaatgctaactttttcataagttaatactagtatccatcagcatagaatgcaggtaactttatgttatgtaggaaccaatactataaaaatgttgggtcctatattgaaagcaaatatacatttaatttttccttctcctactgttaaactaccatataacattaaatttcatcaccaaccttgtggggattcccacgtttttcatcacttgtgttccttaactatgtgaccatgtttttatccaatgacaacacagatcttttgaacactgacctttcctcatttaatgttttaccaacagagagtactagtgagtaaagtggttttgtgactttgtctttggcttgtttaaagttgtttttgtttttaatcagtatttgattagtataatttgattatgatggttgatttaattatgtaggtatctctctgaannnnnnnnnnnnnnnnngcttttaagcagctaaataactggatggctccggacaaggtttgtgctttgagtagagtttgttttcatcatatatgttattaagttgctaatcattgttctgtttttcggttcaggccaagacttctctatcatcgtttcctgcacccgcggacattgtgtctgcgcctcttggtgttgtgcgagtggtcccggcttgcagccatccttttcgtatgttccgatcgctaagtaagttttaccctataagttatattacgtcttgtatgaagtgtgacgcttctttcttttt

SEQ ID NO: 56359 - DNA, 456 bp, Arabidopsis thaliana landsberg
  unsure (1)..(456): unsure at all n locations
acaaaancgangagccagcaaaaaacccccaccaagggaaaaacctcagcctcaacagccaacnaaagaaacaacaagcccagaacaanaggaagccgcngcccagaaaaaaaacaacccgcaaacaaaanagcaagggaccacagagagcagagaacggaacaacaccngcggaggcaacnagagcgcacgcccaacaaaggaggaagggaacccaaccaaagcaaggcacgcccacgcaggagaagcaaccagagcaacaanacccngngaaaaacgaaacggacaagaaaccaacccacgcgacaccaagagcagcaaaggcaaccagaaaaacagngggccaaaaaacaggccaacaaaggaaaagaaaaaacaaggagcaagaacnaaaaaaaaacccngcacgcagaagaagcagcaacacangaacacgaacagaaaaaaaagaagaaa

SEQ ID NO: 56360 - DNA, 524 bp, Arabidopsis thaliana landsberg
gtgtgcctgttgcagtacgcgccacacgagcgacgacgccgcgcgtcgcctgttttaagccgaagcgcttatgaagctctgcgagcgctacggcacccagttggtgatcaacgacgacgccgaactggccgcgcgcctgggcgtgggtgtgcccctgggccagaccgacggcccgctgaccccggcccgcgccctgctcgggcgtaatgcgatcatcggctcgacctgccatgcgcgcctggacctcgcccaacaagctgcccacgaaggcgccagctatgtcgcctttgggcgctttttcaattccgtgaccaaacccggcgcccctgctgccagcctcgacctgctggagcaggcccgggatcaggtcaagctgccgatcgccgtgatcggcggcatcacccttgacaacgccgtcccgttggttggccatggcgccgaccctgtggcggtcatccacggctttgttggggccgacagcgcgcaggaagtcacccggcgtgcccgcgcctttaacgccctgt

SEQ ID NO: 56361 - DNA, 517 bp, Arabidopsis thaliana landsberg
  unsure (1)..(517): unsure at all n locations
ggaggtgctggccctggtcggccccacggggtcgggcaagacctcgatcatcgccctgacgcaccggttttatcgaggtttacaagggccaggtgctggtgggcggccacgacgtgcgcgacgtgaccctggacagcctcggcaggaccatcggcatggtgctgcaggagccgttcctgttcaccggcaccatcgaggagaacatccgctacaacaccgagaccgccaccaccgaggacgtgatcgccgcggccaaggcggtgtcggcgcacgacttcatcatgcggctgccggagggctaccagaccaagctcggccagcggggccgcaacatttccatgggccagcggcagctgatctccttcgcccgcgccctggtggccgacccgcagatcctgatcctcgacgaggcgacggccaatatcgactccttcaccgagcaggcgatccagaaggccttgaaggtgctgttcgccggccggacctgcatggtgatcgctcaccgnctggccacgat

SEQ ID NO: 56362 - DNA, 407 bp, Arabidopsis thaliana landsberg
tataatttttattatttaatgctttaatgcgaggaatagggttagggagaacacaagtgtaacgcctgacaaatttggtgcgaatcaattattttcttcctatttaaaacagagacgcttcccttcacttcactccacttcacttgaaagtcccacacagtctccctagtgagcgatgatgaaagcaaaccagaaaccgaaaccccacgcgccaccgcgtcctctcttctcctgtggcttcttccgccgctgcacacaatccgtcctcagcccaacctctcctcaccagcagcaacctcgccgtaaacccaccaccacttcctcctcatcttcctcctcctcaacctcaacttcccaaagcttcactcaatggcgctttcctcatcatcttgatcaaactccatcca

SEQ ID NO: 56363 - DNA, 1044 bp, Arabidopsis thaliana landsberg
catatgacaaatgtaggatttgtagcaaccagagtttatcaccactgcatgaattcgacatgtctttttcttccgcaactcagtttgtgtctaaatcatctccaaaattctgagatatagctagatttttatttgttatgaaattttttttaatcactgttggtctttggagcctaattatcgtgttttgatgacgcaatcactgcgtcacaatctgatgtcatcttaacaatcattaatgtattttttttttcttttctcgtaatattcttaattattcttcgacagcaaaggtttaaaaactccttatttcaatcattaatgtatttatgatttgatcgaataacaataatatagcttattttgttctattctatcgtatttgattcttctttcgttttttttttgtttgacttaagaaaccgattgtttatagtagtaaacatttgtttttaatgttgctcgattccagtgcacatgtccaggctagacacttgtcgttataaaggttgctttggttcaatattgatccactagagatgttacaactattgttgacatctgagattgtgtgataagaaaatatgaaactggatttagtgaaagttacaatatataatcatacatcatagataggaaataaggaaatgtcagatatacttgaagaatacatcaaatagacaaggtcctttttcttattgtcgactattatagagccgtacagaaccttttcacgtctttagtaattagtacattctccatttcggctctctcttattttttttccatctcttttacttctccaaataataacaataaaagcttcgattttgtgtgtgtttgtatttacatcttgacatcgatattcttttcatcaattttttaccaaaaatgtaataaaaacaaaaaaaaaccaacgctgaacacagacatggtttctccatccgtttatattcatcgtttgtatgtttacttaacaacttatttcaaaatagtacatatcatggttgtgtttttaaaaaagtatacagaacagaaaagcac

SEQ ID NO: 56364 - DNA, 1090 bp, Arabidopsis thaliana landsberg
aaaacacaatctaacattatccatctcattgtcttgcttgttaaacaccatatttttcatttaactgaaaaagtatatctgtacagaaaaataaatcttaaaaatcgatcgacaacaatctttgatcagcttttcttaccctttaatttagctccatctctacagcaaaacaaattctacatgaacttacaaaatctcccggcttccccaatctggtctctgcacaacaccaccaaaagagtctgcctcaaaccaaactgagacttgatacatagctttggtttttcaggcattccttttaagaacaatggacttctcgacgaggcgatattatttgggatattgagtttagaggaagttgagaaggaagagcccaatgtattgtcatcattactattagagacaccaatagatttccatccatcagctattagttgcatagttttccttgtgggaacaacattcttcccttccatgtctttcagaagctcttctgctttccatggctgcttcgcttccccaaatccccatataagagtctcgtaagtagtcaagttaggcgataaaccaacgattccacacattttcttatatacctgcatcgctttcttcatttcaccagcactgcaccaaccgcttatgatctgtgtgtagatcactacatttgggcgaacaccaaattttctcatctgattcaagatttgctccgctttttcgggctccccagctcgagcataccctttggcaaggatactaaatgcatgaatatcaggatctattcctccttccaacatatctgtatagatctcttcgcatcttttcatatctcctacagaactccatgcattcattagagtgctaaacgttaccacatcaggttttactccaaattcttccatcagatccaccacctattatattaacttgcccatagttaaaattaaaaaaacgaaagtgagtgaaaaattattgaaagtttataaactataaagcgcacctcaccaactccatccatgtcgttgatgttaagaaagcctttgattagagagttaaaaacaaacagattaggatgaactccaagttccttcat

SEQ ID NO: 56365 - DNA, 494 bp, Arabidopsis thaliana landsberg
  unsure (1)..(494): unsure at all n locations
tatagattcttgtcttagattcgattccccagggaatagggggtcttcttaacataagctccaaagttgttgtttgattttgttacatgcaatatttttagaatagtcatgcannnnnnnnnnnnnnnnnnnnncataaacgttttgtttttttcttctaattaagatgaacttgaatattgaaaaatgtgatgcatcatttgcaaaccacctacaaatgaataccaatgtttctacatcctctttttaaaagtttcttcaatcggaattggatccaatttcgaaagttgatttagaattgtcaaaaagaaatgctaaaagccgcacgatgacaaatccgagacatacgccataacaaaacaccaagattatcttgaacgtatcaaatgttttaagaagtcaataaattcgaatattttggcttgagaacacgactaggtaaatttggtcatgttatcatgtgtctccgacaatatcgcgccacaaacaaaaac

SEQ ID NO: 56366 - DNA, 184 bp, Arabidopsis thaliana landsberg
tattctttctagccatcaaacctcgcactgggggatggggggtatttaaaagagaattaccccaaccgttatttgctagatttacaggcctttacgcgtgaacttaggaaaacaggttcctttacaaagcgatggacgtcttaatacagtctctcccaaatgcacaggcaaacgtacggagcta

SEQ ID NO: 56367 - DNA, 628 bp, Arabidopsis thaliana landsberg
acaaaagtactacttcgtaggacacatcagaaccggtttcagatccaataatcggaaaccgattatggtttttggtccaaatcataaaaatgggcacgttcgtccatgtgagcctggtctggctacacccctgcattcatgactctcatctcagccgttccttacccccatcgtcagccctccgatctccggtcagtctcgcgccaccagccgtagtttcttagtttgatctaatttttaaacatagcagaatcacatcaccgtcgaaagtgaaacaaaatctttggaatgagtttctggaatgatggttaatgatttaatggatattttttcttaaatcagtttcatataatcacaaaatagaatggatgtgtaacttgtaattggtaataacgtgtagtattgtggaatcattccactttttgcgggccactcactaatcaaaccttttattttgggtatagtaacgtattagaaactagaaagtgttaaaaattacaaagaacgagaaaagatgatatcatttgagataacaaaactcaaatgaaatttttttccagtttatcaaatgagagacctagggttggaaaattgatattttgtttaaggtggactaaaatccatatga

SEQ ID NO: 56368 - DNA, 730 bp, Arabidopsis thaliana landsberg
tgattagagccaactgtcctctttttgcctcttcccttctcatgattatataaaaggtgatttcagttttttctcacgtcatttttgcgaaattgccgccccttgtacattttcttgcaggctaaactttcatctgaaaatcgtggagtattttatctagatgccccatcagcatcagtttgcctgcttattcaattagaaaaaacagcaactgaggaaggaggcgttacatcatctgtctattcccgtaaagagcctgtaatttccaaaatcctgaattttcccttactgtctctagagtctcttgctcatgtgaatgccttggtcttagagattgtgtctttcaacatttatttggagtaacttggagatagcctgtgacttataatggcatatatcatctgtctttactctttgttttgatatatattttagagtagtcatggtgatagctggatcttgatataacaattagtaattaccctatttatgtgaatcaggtgcacttaactgagagggaaaagcaaaagttgcaggtctggtctcgcattatgccttaccgagagtcttttgcttgggcagttgttccgctttttgataataatctcaccacaaacactggtgaatctgcttcccctagcagtcctcttgctcctagcatgaccgcgtcaagttcccatgatggtgaaaatgaaccaattgcaaagatcacatcagatggaaagcaagg

SEQ ID NO: 56369 - DNA, 1295 bp, Arabidopsis thaliana landsberg
  unsure (1)..(1295): unsure at all n locations
catgcatcaccacatcttggacttgtcagattatatggcctcctagattcatttttataacagaaaatcgaagttcgcaaaacacttgtaagtactttagggttaaagagtaaattttgcgagggaagtgctattgttatgtggtaactccttcgcaaagccattgcaaagccaaaaaatttgagacatataaatttcatgctcaccggatatatttagtaaattttagttaaaacaaaaatatattatatatatatacgtaactttcatggtattttttcttggtgtattgcaatgaaatatattatagatttgtttctcgttaattgcgggtgatttgcgacgcgttaagacgaatttgcgtggctcgtccttgtcgtagcaaatatcttgcaaagacgtcgcaaatttgcgagggatattttacctcgcaaaggtttgtcacaaattgtgtgttttcttgtagtatataagcaaccacattgtttcatctctggtggaacacaatgattttgtggagaaatgcattaactaatttatataccaactactaagattctacaatacataatcttgtacatctatctaccaagtcactacataacataagcctatgtcaaaggcataaagatgttaaatttttcattacatatgcaacagttttgtttacttaatctacaccacaagatgaattggtcctcctggggctgcctctatctgatgtgtattcttctacaaagtatcatacttgttcttgaatgtttgccgtatttatttttccccgaatctctcttcaacttctttgtgatgaactcttttccactttgattcattccaacaaaaaatcagtgacaaaggaacttactaaaatagtatgtatttccacgaatccgtttcaattctttaaccgtcaaagaaaaggaaaaaaaaaagtttgactatacatacacatacaatcaaatgttgtgacatactttaaaaaaaattaattcatgtttagttgtttacgttacaaccacaattcataattacaaattttttattgtccaacgaccaaaatcaaaataataatcaactatattgcattggtctaagacggcgttacacagtaatcaagtactaaattcgagaatattgccgatagaataaaattattcactaaaattcaaacaatcaaatctttcatttttactcttttccctgcatgaattaccaaatttctttatcctttaatccanaagattaagttaactgtgtcttcccaaacccaaaaattagtaacttacataaagagc

SEQ ID NO: 56370 - DNA, 1427 bp, Arabidopsis thaliana landsberg
aaaacctaaaacaaaaggttattttcaaaggcttacataaaagtgaacttgaaatgttcaatatttttgttagcaaatattcatatatttttaactgaaatagatgtgtccggacttgctaagtgctaattaacctggataaaatacggttcaattcatcagagcttcccaaaatctttctaagaaaaactaatactgatcgatgaatagaaacccatatctttattgtaacttgaaaaaagtacaaagccgaaaactccaacggagaagtggattgtacatgctcataatcttctataacaatatccaaagacacctttgaaatttctctgatcaatgaagcatgaagacgataaaatataccaacttgttctttttttactctcggaagatagattcaaacgccaccgctttttaactagttttttagtccatgtatatctgaaaacagaaaaatgctaaagttgtcggtcagatcattggagatatccatatgtttatatgatccaacgattcgatatctcaccattggagatatccatcagtcaggttatatgatccatattatatgatctgacaccaatgaaaatacatactaaaatttatttagaagaactcatactaaaattataatttcattagtgagatatccctattgataagttatcaatataatatttatattattagatattacaatttaatatttttaaacatatcaaattacataatagagtcattcatacttaataattatatttatttatagaagtaaataatatatttatgaatattcataattttaaaagcaacagtaaatagtactataaattataaataatattattaaagagtttaattatttttaaaaccacaatgaaacataaatcgaactttaaaataatattaatatataatttaaacttatacataatgaaacttaatataaagataatttttatgtgattcttttaaaaaggttaatgttataaactataaatgatttgatttgttacaaagaaaaataaactaagaagaaagctcgacatgtaagaaagagagtttctcattgagaaataactctaaacaaaattgattaaaaatagtattattttaattaaagttttttggtaagaaactagttttaatgctatacgatatgtcaaactttttttttttttttttttggtaaaagtacgatatgtcaaacttgagacttcgctctttctataaatataataagatcaatataagtttgtgaccacaaaataattctgactgtacaaccaaactaacgcgatgtccgggtcacttacgtttaaggtttaccggcagaagccggagttagtttcttcggcgaagccaacgccaagagagcttaaacccctctcagatattgacgaccaagaaggactaagatttcacat

SEQ ID NO: 56371 - DNA, 1534 bp, Arabidopsis thaliana landsberg
caaagatcatgtatatagccaaatatactcttagtttagtcaaatttagatttaagactaatattagacacaccacttataattaatcaaccagtgaatgcatgcctttcacaattattctatcttatgttaaattaaaaaagttagaaggtggtggaagaaccccattttttgaaccaattaacgactctttcatgagtatctgatgtcgaaactaacagtcaagaaaacacgtaaaccgaccgaccatttcatagttataatttattgtaatcggggaaaaacactttttaatcaaattaagactattagatacaattatacttgacaaatttagcaaattgtctatagccgccgcagactaaacacatgcagtgagagagaagacgaaacaaacaaaaaaagtcttaaaaccgcaatcagaaatccaattaccttacgccagacgggccctttaacggcccttttggagatcctaaattctgataaaaaggattatattcaattgaaatcttaatacccgaaccctaagtttttgttaatcaaattcaccatgcttgaggataaaatcaaagcatatatatatcaacagacagagaaccctaaaccctaatttatccatgtaaggtaagtaaaataacaagacgagtttttatagtcaatattttgtagtcatggtccatgggattctcagttttgggccgaatcagtgaataactttacttttgggattagacaccgacacacacaagtatacatgatgactgtggaagtctgtacagtatatgcaaagaagttcacttactcagcttttgtagccttcagtttcaggtaagcgtagctaataaccagttcttctgcagaaacaagagctatatagtttactattcatcaaaaagttactgaacccatgatttatgcagtcagcttctatatcctaggttaataactacctctatatgacccaacaattcataattttatttagacactggaactttggtcagttccattaattttacaccaatgtatatacgtatatatagtctttttttttttttttgttgtcaataatacgtacatatagtcatgtttctaaagtaaaacaaaacggataataaacaaataccactacttgttacgatttatctccaacagtcaaaaacaaaagtactagagataaaattaatccaacaaaagcaagaaaataatacaataattgctaatgaaataactacaactagttaactacgagtgctttatcactttctaaaataccctaaactcaacttcagatcaagctctagacccattttttcaagactatcaatagagctaatcacattactattagaagaatttataatattggcatcatcgaacaattgtgcaaccgatgtgactttcacacatttcctcgcattcactttttttttcttctactactgcctcctcctattatcctcctgagcctgagccatctcctcgggaaaaagcggaggaatcacgaaattggtcttggctttggtcctct

SEQ ID NO: 56372 - DNA, 757 bp, Arabidopsis thaliana landsberg
gagtggccattgttggttatcctatgcgctaatgttctaacagttttccattcagttatctttctaaacaagcaattgtgctaaattttttctattccatctgactagaacattgacacaaagtatcgggctcctttcttatacatacctgacacgtacaggccatgatagaatagttgttcccattgtgagttttcttctctcacacatattaatgtaccttgtttttctataatataaccgtgttaccttatgaatattcagttggattacgagtttaatgcttcagctggcgagttcaagacattgcaagaccgagaacattttatatccagtctctctattctactagaatggtctccattttcaacagaagcagaacttttgcagcaggcaaggccaatttattttctttcttttttttaattttctccatgcaacccattttgtctacactctatacattctggttacttggtttgaaatttggggtctttcatgagtgtgatattccttggcattgtactaattataaaagcttttgatgagctttaagttctgtatatagtaatttgatcataaccgtgaaagcatccatgattgctctccatttccatgattccatattttttggatgttgtcgtctaaggtagtatccttcaagatatggatgaatgaatgctcagataagactagagcaattcattggagactttagtgtgcgcttaaattaggcccctacatgttggtcaattct

SEQ ID NO: 56373 - DNA, 974 bp, Arabidopsis thaliana landsberg
aagagagaaaaggacatgcgatcaccgggggggttaattttcagaagtaagttagtaagatactgatcattaggttgccgcgttggagccatgcattgagtaacaatgccaaatttagttaagctttttttcttccatggacctgatgaaggattcaaagtttttatccaaggaaacttctattatataaaacaaaaagatgattgaggactggatttaagagatatctaaccatagggatcactgctctttttgtcagggagcacacatagtatgaattgtgggacaccagggagtttcgattggatgtccttaaacatgttctcaacacgaatcataggaggagcacggcggaattgattaccctcctcaaacacttgaaagggagaagcaatttcctgggacagaatacagaaagaagcagtatctaaattgttgataatcacaaacaagttttcaagaatactaaaaacaaaagaagagaatcctgcttacaattccttttgatcctccaatttttatcagatcatcaacaacttgacgtacattacagcgagcagagaaattgacaacaacccatcgttgaattttggtgggctcaacaaattcctgtacaacaaagggaatcagactctctgaacaggtaaaatacaaagaaaggcagagagaaacagcaccttgttgttgaagttccagcgaccatttctgggaaaggtttcagatccacatcccattttcagctgtcagtcaaagaaaacaagagaatattacatgtatgcaaaagctaaaaacaattcatcatgtcaaaaagtaagcgatcgcaccataccttgggagctggtagaacacgaccctccacctgagtaaagttggagctgatcgaaatgccacaggatcgcaggagtggttccgcatcatagttgctaactttcagagcctgaaagcatgaaaccaaagatatgtaaattccggtt

SEQ ID NO: 56374 - DNA, 1518 bp, Arabidopsis thaliana landsberg
aaaactcttgaagatcttgtctggctacgacaactacttaaccggtgaactcccgccaaatctttttttttcctcgcctatgatcgctcttgatggctccgaaaaccgcctttctggtcctcttccggctcacgtttgcaaatccggtaagcttttgtactttcttgtactacaaaaccggttcactggttcgatccctgagacttatgggagctgcaagaccctcatacggttccgtgttgcgagcaaccgccttgttggaaccatacctcaaggagttatgtctctgcctcatgtctccatcatcgacttggcttacaactccttgtctggtccaatacctaatgcgatcggaaacgcttggaatttgtcagagctgtttatgcagagtaacagaatctccggtgttatacctcatgagctctctcactccaccaatcttgtgaagcttgacctcagcaacaatcaactgtctggtccaataccttcagaagtcggaagacttaggaaactgaacttacttgtactgcaaggcaaccacctcgattcttctatacctgattcactttctaatctcaaatctctcaacgttcttgatctgtccagtaatctcctcactggaagaatacctgaaaacctctccgagttgctcccaacctcgattaatttctccagcaaccggctctctggtcctatccccgtctcattgataagaggaggtcttgtagaaagcttttcggataaccctaatctctgtattccaccaactgctggttcatcagatttgaagtttccgatgtgtcaagagcctcacggcaagaagaagttgagctccatctgggcaatacttgtctcagttttcatcctagtcctaggggtcatcatgttttacttgagacaacggatgagtaaaaacagagcagtgatagagcaagacgagaccttagcgtcttctttcttctcctacgacgtcaagagtttccaccgcataagtttcgaccaaagggagattcttgaatctcttgtggacaagaacatcgtaggtcatggtggttcgggtactgtctatagagtagagcttaaatccggtgaagtagttgcggtgaagaaactatggagccaaagcaacaaagactcagcttctgaagacaaaatgcatttgaacaaggagttgaaaaccgaagttgagaccctcgggagcattcgccataagaacattgtgaaactcttcagctatttctcaagtttggattgtagtcttttggtatatgagtacatgcctaatggtaacttatgggacgctcttcacaaaggctttgttcatcttgagtggcgtactcgtcatcaaatcgcggttggagtagctcaaggattggcttaccttcaccatgatctctccccaccaatcattcatcgcgatatcaaatcgacaaacatcttgttggatgttaactatcagcctaaagttgcggactttggcattgcaaaggtgttacaagctagaggcaaagattcaac

SEQ ID NO: 56375 - DNA, 125 bp, Arabidopsis thaliana landsberg
atcatttcccattcaaataaccaacggttaagggtaatacaatcggctctaccccataccgtgctcctattcttagctacaatgcttcataaaagataaacgaaactgtcatacaagaaataacc

SEQ ID NO: 56376 - DNA, 547 bp, Arabidopsis thaliana landsberg
  unsure (1)..(547): unsure at all n locations
tactagttaatagcactatttttactgggggagggccatggcatggattattgccattcacaaagtggtcatttatgtacatagcttaggtaattttttcatgaactatcttggttttcagaaggcctttgaagcaacaatattagaacaagtcttcatatttaaactgcatgttataggttttcacatttctatnnnnnnnnnnnnnnnnnnnnnnnnnnnnngatataaaacaatggcattttctgatgtattagcttcatgagaggacgaattggaaataggacatccgttgggaagataagaaacatcttatttagttcaggtggctctattggcttctgtagctctttgcctatgtagtagagtaatttcaatgctcatatagatacaacttgatgttgcttttgtattcaatccaattatcaaaaattcccctttttataagtattttcctgctaaaaaggcaccatcctttatttgcagaactgttttagatgtcagtagatacacaggtgcatctacaaatgtaaagagtcagaatagt

SEQ ID NO: 56377 - DNA, 517 bp, Arabidopsis thaliana landsberg
ttgacggggcggcgcgctttggacaggtgcgatttcggcatctttcgtttgcggcgccgcttacgccgtttgcggagatacaaccgccaatttatcggacgcatgcggcagcggcagggggacaattgccggggctggcctgtctgccgcctggcgcccccaccagccatagaccagtgagaccgccacaagcgcggaagataaaagcagtttgcccgccaggctttgatgcttcttatcggagatcaacatggcagatatttttttagtccggtggtcatgcgggccgtgccgaaggcgtcgatctcatatgcctcgaggtccggcatgcgctcgataaaatgaatgccttgccggcccatggcaaaagcggcggtggcataacggtcggcctccagtacatccgagccgataacgggcaagcttacgatatcatccgatccgtgccggcccgtgagctaatagtagatatggccgccgcgaatgtaattgcccgacgtggcgaccccgcagcctt

SEQ ID NO: 56378 - DNA, 356 bp, Arabidopsis thaliana landsberg
cctatcgagtcaaaaagatagcaaacggcgcctaataaaggatttgagccatggcatttccgtaattatattattaatacgagggtgaaatagggaaatgaaagacaactgacgtcacgtgcgagtcaggacatggaacaattggcagaccacagtaaccaagtggtcaagctcaagctttagctcaaagggctgtttctttagggggtggttatgaaccaaataaaaaacaaaactttaccggagatgaccacggagcaagctttgttgtctatggaagctttacctttaggttttagattcagaccaacgggtgaaaaactcattaatcattacctaaggttaaaaatcaacgg

SEQ ID NO: 56379 - DNA, 373 bp, Arabidopsis thaliana landsberg
atttcaatgcgggcgacaaggattccggctgttccctcgacggcgtcatcttcggcttctagcggcagccttaccgctgcaggatcgacatccaggccagggagaaccggctggtgttcgacaccgcctgctcttgtccggtcggcgtggcttgcaagcatgccgccgccatgatcttgctggcggcgaacctgccgccgcaggcatggcctggcacaccgcagatacccctggtgacgcggcgccccgccgcagcggcgagccgtcggcccgacctgtccagatggccagcctggctgcaacgcctgaagacgcaggccgagaccgaccttgcggcgatcgagccggcgcgccagattggcgtgctgttgcg

SEQ ID NO: 56380 - DNA, 1133 bp, Arabidopsis thaliana landsberg
cagtgagtactctcttatgaactctcaaatttagggtttttttttttactctgtttcttctttctcaattttggttgttacgttatgaaatttgactctaatcctcgaaaacttcagtaaatttgaataattttgttcttcgtaaacaatcgtgtggcttttcttgttgaacaattctgtttctgtacttagggctgggattagatcataagaatctgatcaaagctgagatttttaagattttgttggtaacctgagacgattttggtcttgattcactcgagaaactccaaaaaagttttgatttttagtgttagattcagatagtgtgtctagggttgttgattgatgaaatagtgaatagtgtttcagataactttgcagagattctgagtcaggttttatgtttcaggactactaatggatgaaacaacagaacgcccaactgtttcgttttcatattcaaattggatatcaaacatcaaaaaatcaacacgagaagcttacgaagcaaagcccttttcacattggattcttttgttcttcagtggtgcggcaatgctcatagctttcccagcttctagtctactctctcgtctttacttctccaatggtggtaaaagcaaatggatcatttcttgggttgctgttgctggatggccaatcacttgtcttattttacttcctacatatatctttcaaaagatcaaaccaacacctctcaatacaaagcttgttctctcttatgttgtgctcggtttcttgagtgctgcagacaaccttatgtatgcttatgcctatgcgtacctccctgcttcgacttcttctcttctggcttcttcgtcgcttgccttctctgctttgtttggctatctcattgttaaaaacccgctgaatgcttcggttatcaactccatcgtggttataaccggtgctatggctataatagcgctggattcaagctctgatcggtacagttatataagcaacagtcaatactttgcaggtttcttttgggacataatgggatctgcgcttcacgggctcattttcgcgttatctgagcttctctttgtgaaattgcttggaagagagtctttcacgttgctttggagcagcaagtcatggtttct

SEQ ID NO: 56381 - DNA, 1209 bp, Arabidopsis thaliana landsberg
gtagggtcccctatcattgtttttgcccgatgttagaaatctagattcatagtgattaaaattttcgttaacgaaccagcatttttcccttttattttttgttattaataattgcggtcatttgtttttgtagacggctaacaatgactccgtggtagacgacccccctctctagtagttggtgacgaggttagttattaattatactaattctcaaaataaaatatcaactaaatttgtatgttgcgttacgtggtattttgtcgagttcttctgattccgttgagtctttattttcatgatttaatttttaaagggcaatgagactgtttcagcaaatgatacagttacaattccagagggatctatcgacaacgatgtttgtcgttgatgtaatttttttttccggtggtgtaacacatatttcttgttttaaacgccaggttcaatgttctcagccgacaggtggggttgtgccctcctccccaaatgacgttgacgaaagccaggtaatatgcacattttgttctaccacgttatatcgttttctttttttttgctattctcagtttatgttttccttctcccttgattaattggaactcttatgtgtccaggttgcctgcgcggtgggagatgtcacagttggcgcagacgagtccgccgagattaaggataatttggttagcagctaaattaccacccataatctttgctatttgtaatgactaagtttccgatgattacgatgttaggcgttaaactatatcctatatttgttttgccttaaaattactatggttttcggtttgtgttttaaaatttattatagtgagatagttatgctgttttatattatcttttggagtagtgtggtttataaatattactaagcccaattaatacactgtttttttattttttatgtctaattttgcctagattcgaagtacatttgattgttgttatgatggttgtttgaagttattttgctttccaaccgcaatttttcaccgtttctctaagtatatttcataaaacatatcccccttgttcagccgtcacaacattttaagttgtactcatatatgtttatgggcgtttgtgtacctttttatttataaaactatttattagattttttattttttaagtatacactggaagtatatttgattgtggttatgatggtggctggtagttattttt

SEQ ID NO: 56382 - DNA, 822 bp, Arabidopsis thaliana landsberg
catccgacttctcagggggaccagaagtcctcggtagtccttggaaatcacgtttaccggttttcgcaatgtctatataaatcattcttccattgtacatctgcaacagaatgggaaacattttggttgatttcaagacattaaaatgtaaacttgtgattgaaagaagcttttacccgacggtccatggtctctatggcaagaaaagcatcatcttgagacgtgaattgaataaaagcataaccttttgatctctgcattgcctcatctttgataagcttcactgttttgaagtagaagagtgaacatatcaatgccataaaactgaaccttaaagcaacaaaacagagtaagtaaatgaaaccacaaacataccttcagctatctctccaaaagctgaaaactctctctttagaaaatcttcacttgtagaaaacggtaaatctacaaattcaaagtgaagaaacatcagaaccgtagagtaattaccaagttgaagttacaaccaacttcaacttcactaatgattgctacaagagcttagagctatcacatatgactaccgtcacaatcctgactcaaatcaactaatttcaatcaaaccagaatcataaattacttttggaacaataacataacttacttctgaccatgattttgctcgctagagggtaattaaagagcgaagctttaatctttggaaacctacggttcctgtaattaggtagagaagatgaagaagccacaaaagaagggaaagataacgtcgccgaccacataattcccagtcgccggaaatagagagggagaagaagaactgta

SEQ ID NO: 56383 - DNA, 564 bp, Arabidopsis thaliana landsberg
gttgccctctcaaacttctaatccattgattgtgtaaaataactcacgtttacctatctctggctacaacattttttatcacccaacaatttgtcaatttgcatcgtcttactatttttagaaatttgtagtagtttatttgttaaagttaccagttaaattagagtctttttattttctttttttttgttcttaattattttgaacaaaaatttaaaatttattggaagattactttagtggaagatgagaaagatggttgttgtatagttttttagtgagtttaggtaggtagcttgactgctgaaacaaatttaatttagtttcttgttggaatgtgattcggttttgctcatcgattttcgggtacatggaaaggttcctaacacaacacggtcatattggttttttggatataaactaggatttgtttgctcaaatgttttatgacgttcaaatcaaaataagataaaatgaagagtcgagtaactgggaaggaagtgaaagcgatcatgtcaatgttttggagagtttagaaatgtggttcaagaaatggaagtgatg

SEQ ID NO: 56384 - DNA, 570 bp, Arabidopsis thaliana landsberg
  unsure (1)..(570): unsure at all n locations
acacctaaactgcagatggtcggtctatcgcaaggctttgatcggctcgtcattcgtggcgacatcaatggcgagtcgttctcggcgttctatctcaaggacggcgtggtcatttccgcagatgcggtcaaccgacctcaggaattcatgattgccaagaagctggttgccgagcgcattcatgcggatgcggagcaacttgccgatgagtcatttgtgctgaaaagcctgttgcaggcagccgtttgagcccgccggtacgcgcgcactgaccggcggtattggcagcgcgcgcggcttcagcgtgcagacagccggcggaacccgcccttcacgtagcggaaaaggggcggcattattgatcaccgtagtcgtttgacttccccaaatgaggtccatagctgatgcgtatttccctgattcccttactcgctggtgcccgcgtgttgatcggcagctccggcagttttgctgccgacaccttgcgtcctgaagttggcaagcctctgcaagaagctcangcagcgctcaaggcgcgtaactatcgcgaagcgctgagtgatgtcgatg

SEQ ID NO: 56385 - DNA, 538 bp, Arabidopsis thaliana landsberg
ttgaagttaattggatgacgagaagaataagcgttctagttttgttttcaaaataatgcttcttgtaacactaattaatcagtaaaataatttttatttttatttaccagcatgttgtttaacagaataatattttatcacgatgatcaggataattggtcaaaacttaagccaaatcagtaatcgtagttttgcaaataactagctaaaattaattatctttttgaacaatacgcaatatacaaatttaaattcaggtggtggcgcatattaatacaaatttctagattagaaataactaagataagttagtgtaattatcattttcttacgcttttctgttggatggtttattccactttttcgttagttaatttatcaaactaaataaatgtaaccacaattatagataagtaattgaatataagatataactatacatatcttaagtttaggggttagatataggggttagatataaacaatccaatggattcagtttatgtgctacaaatattataactctttttttgggaaa

SEQ ID NO: 56386 - DNA, 431 bp, Arabidopsis thaliana landsberg
  unsure (1)..(431): unsure at all n locations
cccccnccccccccccccccccccccccccccccccccccccccccccgccccctcccccccccccccnctcccctcccccctccccccccctcccccccccccccctcccccccccccccccccccnccccccctctcttgcctctgcttttgccccnccaccgcgcgcgggccccccacatttatntacaccccccaccccccccccccccccccccgccntcccccctccctcccccccccccccccccctcctctcctccgctcttcctccccccccccccgcccccccccccctcctccccccccccnccctcccccccccctccccccctccccccccggccccccctcccccccccccccccccccccctccccccctcccccctctccccccccccctccctctcccccccctccccctcccc

SEQ ID NO: 56387 - DNA, 777 bp, Arabidopsis thaliana landsberg
caaactaagaatgctcttaatgggctttaacacattgtgttcaagatgaagataatatcactcttctccatgtcacaagaacacccgtaggacaaggtatattactcatatgttgcatttactagaacctttaatatagaggtaaaaccattagagccaaaactcgaaaccttgttatatatcttgcctagaaaacagggtgaagaccgcttcttttgggtttttaggcgaatcgggccttagatttggttttgggcttttttgggcccaatgttgtcttctgtgtggtagatttggttttgatttgagtatggacaggactatagcatatttgacatctataccttattgagtcgctattaactaatgtgatcattgtgttaatagctatagatgagacacaaagggagagaaactcaagggctcatgaactagttcatccattgaagaatttttgtcaactcaagaaacctaacgtaagctttaagcaacagcaaactgatattgattcaaaagttctcctttgttgacattaaggtttattttcaggtcaaaacggagatagtggtggttgaaacggcggaggagaaaggtaagacgatagtggaggaatcaaagaaacaaggagcaggcgttttggtgttagggcagagaaagagaccctcaaagtgccgcgtgatttgccaatggcgtacgaagggaagaatggcaggcacagtggtcgagtaatgtattcataactccgattgtatggctattcccgtaagcaagagaagt

SEQ ID NO: 56388 - DNA, 836 bp, Arabidopsis thaliana landsberg
gtacacattaatgtagataacatttgagaaaccaaagattgattgatttttgtattcacaggaagttcatatgtgcatttcgacaattgttctcaaggaggaatctccaatgaatcaagatttgataaccatcaaaggtattatatatgaatttgccttctctcgacataatggatttgtaaagcatgagtttgacataatgttaatgaacacacgtagacaaagcgggaatgtaccttttgctgaggcaatgagacatcaggtcgatgcgcaacaacggtttcaagaacaactcgaggtaacaaatctcttctttcttctctcacaacaatgaataaaagttttaaaccgaagtttttgcggtgttataggtgcagaaaaaactgcagatgagaatggaggcacaaggaaaatatttgttgacattactagagaaagcacagaagagcttaccttgtggtaatgcaggggaaacagacaagggtcaattctcggatttcaatctcgcactttcgggacttgtaggaagtgatcgtaagaacgaaaaggcgggtttggttactgatatctcacactttaatggtggtgattcctctcaagagtttcggttatgtggagaacaagagaaaatagaaaccggagatgcatgtgttaaaccagaatccgggtttgtgcattttgatttgaactccaaaagtgggtatgatctcttgaattgtgggaaatatgggattgaagtgaagccaaatgtgattggagatagacttcaataggttaaagagacactgtctttaaaaattttggttttttttactttcatttcttatagaatgtta

SEQ ID NO: 56389 - DNA, 407 bp, Arabidopsis thaliana landsberg
cctgctaaaaatctcacctttgttactaatcttaatcagttcatgacgatttctgtttttcgttctttgcgtttccgttacgatgggaaaaatctctagatgggtttctgggtttaacgcgtttctcgagactttagctcaactttgtaaatgaaaaaacttttgatgaccggtagtgagattcgaatgtgatcaagtagattctaatgtgactcagatgtcgaacaaggattcttatggtgacaaaatcgaaattttgagcatttggttagaattgaatgttctaatgtgggaagcagacaaagtataaacatttgctcttatttcgaagtgcgtgatgctttacttgtgagtgtatgcaagaaagttggagaatttaaattgttgggaggaagctagtttttata

SEQ ID NO: 56390 - DNA, 625 bp, Arabidopsis thaliana landsberg
agagtaacagcacaggcacgggcaagacatgaaagcaatgccacgtgtaataacgaagacttgcggaacatttttgttgaagacttgcgagacttggggagggcaaggcttctacgttgcaattaagaactaaagtggaaaataacaaaaagaagctcaacttcttcttcttttttagtcaaagccatatattcttctataattccataaaacacataatcctttttaaaaccacaaaaaatacttcgaatttatcatgtatcaaacaaaataaaaatatttactggctaattgagagaaagaagttatgaaaggggaataaaaaaacctattaagaatggggagaattcttataagattaagactattgggtgttatttggaaactaataaaagatgaggggtatatttgaaagtttaggtaagacaaataaagtgaaaatataaaaggagagcaaaaaaaaaaagctgagaccttgaattggcagcagcctccgtgtgtgtgaccaaatatgcttggaggagagtagaagaacgcttcttctctcaatttcgacgacaacgtgaggaagaagacgaactcgtctctctctctatttattttcaatattacctggagaattctg

SEQ ID NO: 56391 - DNA, 627 bp, Arabidopsis thaliana landsberg
  unsure (1)..(627): unsure at all n locations
cagtgtatttgggtatgaaaccaaaaatttcgatatctgtcctatagcggttgaagaattcaaaaaagcccaggaacatttacgtgatatgggtgaggagctcgagaaagatgccttaaaaaaagaggctgaaaacattgatatcatccttggcgtgcataagtcagccatggatgaaggcgctgtaagccgtgaggattacgacaaagctatcaaggcggtaattgccgcatctatgaataattaccgaagcggtatgttggtaaatgagttcaggattatacctaaccacatgagtgctatagccgcttatatggtcgattatgcatcatttgcactcggaggccaggttcagctaccggagcaggtagagcttttcaaactaggcggaaccgtagcagaccagcaaaaagccattttatcgctgatggctgagcccttggctgctaagttaaagcagaaaggtgttttactaaagcagaactatactatcagtgatggtggtcaggcgttataccatccggagatatacagtgagtatgaaagcgaagacggggcatatatcattcagganatactgatagattataccangagccgtaaatcaattggtactattaccatata

SEQ ID NO: 56392 - DNA, 633 bp, Arabidopsis thaliana landsberg
attctgggatatagttatctgttgattgttggatcctagcatatcctttcgaattatacaaattttcccaactcagggaggtggtggtaggggtctcgaaatgacaatacctactgcgtagtttctgatgtttcttggttattataaagaagacagatatgtgttttacagcgttgctagatgagtgacttgactcaatacgttttgcatcttgcaggccccatggagatcctcatatgataaagttcggtgcacacatggtacttgttcttaggcttctatttactgatgaaatcaacgactctttcaaggagaagctcaataatgttggtgatcttattcttcatatgtgagtcacttcaagttggttcctctgcgatagcagagttcacttatggaacttattatcctgctatatgatacattacatgcatattatgttcaactggctttttagtgatctgtgaaatgctgccaggtatgcgatgtttctattttcaaaacaacatgaagaattggtaggaatttatgcttctcagcttgctcgccatcgatgcattgaactttttgtacacatgatggagttaaggatgcatagcaggtaataaatatcagatggtagactttcatatt

SEQ ID NO: 56393 - DNA, 527 bp, Arabidopsis thaliana landsberg
cctgtcgaaaaagctagcttctctttatcatcaacaccgagttcaggccattgttggaagagatgactctgaccattttctaataagatcttcgccagttcgatctgccacgaaaaccagatcacgaaatggaagacaattataagaaaagaatggatcactagtccagacacaaacatataacagaatgcagaagtatagaaacctgatcaggagacaaaagtccgaggttactgtgaagagctgggacggatgagaagaaattggaatcaaccgtagaagccatgaagaggctcttaacaaaggaatgatggaagagaacacgagcaaattgcaagctggtggcgatgagtttcaaaaggtttgattcaaaaaaacaatatttcagaacatggtatgaaacagaacatgagcaagattaaactaaattcggttaagaaatccaaaaaaaaatctgaaactttcgtggcgatcaagggaaacacgaacaaagagaatttcgattaattcggtggggtaatccaaaa

SEQ ID NO: 56394 - DNA, 1304 bp, Arabidopsis thaliana landsberg
ctcgaatatccgatcattgaccaaagcttttattatatgtcatgttattattggaagtgattctctctttgattttgttgcagctatgtatccggctacaaaaacagattccagaatttcattagatacctccgtgaaatgggagacgaggtttcttcttttactatctcattcttcaacttaagtatcttttcagtcagctcataagtaactgtttccagaattagaattacttgacaagtgttaactgttccttttttttttttttaataacttttttgcttcataggttatagtcgtgacgacacatgaaggtgttcctgaagagttttatggagccagagtcattggatcaagaaggtagcaccatttagtttactcactggatgttctctatttggtaatatcgctaatttcttcttctcttctgtagcttcccttgtccttattaccaaaaggttccactctcgcttgcgcttagtccaagaatcatctctgaaattgcacggtttaagcctgacattatacacgcttcatctcccggagttatggtaaatccctcaagaattcacattactaaaacattagcaagaccagtgaactggagagaatccagaacttgactctcttttttccctgactaaaatttttaggtctttggtgctctggcaatagcaaaaatgctatctgtaccaatagtaatgtcttaccacacacacgtccctgtgtaagtacctttttctgcctcatttcacaatgttgttataaaaaaatttttgtctaagattaagcttgtgttgatgtgcagatacatcccaagatacacttttagttggttggtaaaaccaatgtggtctataataagtatgtaaaacccgcttttcaaatgtcaaaatttccttcttctttttctggtttattgtgatgtataatatgaaactaaacttgaatatgcttttatcagggttccttcacagagcggctgatcttacattagttccttctgctgccattggaaaagatcttatagcagctggtgcaactgcaggtgaagaaagatcatacattacatttttgtacaagctctatgattgttcaaaacttacattttcttcttctttttttcatatattgaaggctaaataacttcgactttggaataagggtgtcgattcagaaagcttcaatccccgtttccgttctcaagaaatgcgtataagactgaggcaagaatagaatatacgtttcttttatttgcattaaaaacaatgatactttccaccgctaatttgatggttaatatt

SEQ ID NO: 56395 - DNA, 296 bp, Arabidopsis thaliana landsberg
tagcatcgaccatgaagatattcttcttgacaaacttatttgaacaatgtccttaggctcacaaaaaaatatacaagataaacatcaatccattttgaagattatagaattggttacagattttgcaaatctaatattatattgaatcttataatatagaaactacatagattctatcttccatttatcacttatcaacagattatatattttaggggggccgctatgtactttacaagtctcttcacaccatcatcatagatgctaatttgagactcaatcctgaaaaaaaagcc

SEQ ID NO: 56396 - DNA, 771 bp, Arabidopsis thaliana landsberg
cttcgtaatgaactatacttttgttgtttgatgggccaacataccttttgatacggcgagctactatgctcagttctaccgctcaggtcctgacagtgatggccgtgtttctcccttcgtttccccaggggttgcctccaaatttaatgggattacagtattgcctccgcattcatctcaaaccatgcaagaggttagtgtagtttttgggggttaaccttttattttattttatgattcacaccttcacgattttgatctaatttaagatggttttgagactttttcgtttaattcaatcttccaacagtagcatcatcaatcaaatagtcaaattttcatgtcagctacttggatctaagtctcattttttcttcttgataaaattgaagtaaacctatggtttctaattggactgcatatttatatgttcagaagccctataacacgtttgaaagataaaaatatagctgttattattacttttctggtctgaaatgcttgaacatgttgatttgtagggtggaaataacttggtcctgtctactgctagtccaccaccactggtaactcaagctgctggactaatgcagagctctatacctgtcacgcagcagcctgttcctgttttccgccctccgggcttacatatgtcgcattatccaccaaactacgtgccatatggatacttctccccattctatttacctccccctacaatgcaccaatacttaagcaatggtgcatatgctcagcaacctcaggcaagcg

SEQ ID NO: 56397 - DNA, 653 bp, Arabidopsis thaliana landsberg
atgtcaaacacaatataagatgtcaacgcaaaggctaccgagtcagccggtaacctaacactcttttaatattaagggacctacattaacgcgtgcattaatataaatatacgtaaaccaaccatttcagacaagagagagaatcgaattaacaaaaaaacaaacgaatcttttgagtttaaaaccctttttcacttaccggagaaatggagagatcgacgccggaacatgtctcctccgcacacaagcgcataagcgtgagcttcctcgtgtctctcatggtactttgtgctagacacgcaagcagagtttccaagaagcttaaacccaagaagactcggaagcaaactcatcttgaagactatctcgaaagccctaagtctaacggaaacggtagcgaagacggtagaggaggaggaaggtttggatggagtccggcaaggactttttctcctatgagggtgcgtcctaaggagctctacacgaccttgagcaacaaggcgatgactatggttggccggaaaaacaaagcttacgacggtggtccgacgaagaagacggcggtggagatggtgatggaggaggatgaggaagagtacggcgtttggcagagggagattttgatgggaggaaaatgtgagccgctggattac

SEQ ID NO: 56398 - DNA, 419 bp, Arabidopsis thaliana landsberg
gctttttaaagtgtgaggctactaacagacagaaaatagacaaagcaaaaaatcttcaaaagaacatttcgtttgttaaagagaatgagaagcaggcttcgaagtatcatcagaaagttttaagcgatacagtgaatcgattcgtgatgcaatatttccccgtgctcacagccgatcaacaatcactgatctttaccagaagagaaggattcaccgatgacttcgatgaagatcttgttgtgtcagaaaaagatgcacacggccgctggactgagccacattcaatctcaaagaatatcaacagtatgttcaatgaggggacctgcacaatctccgccgatggccggaaactgatctttacttcctgtgactgccgccatgggttcggaagctgttatcttttctaaagccatatgatc

SEQ ID NO: 56399 - DNA, 478 bp, Arabidopsis thaliana landsberg
tatagagtacttttggtaacacttgggaatgggttgttacacacaaaagaccagcaaaaaaaggatttaaaatagggaaaaaagagaattaaagacagaaataaaattaggttcaaaacaaaggccactgcttattcctcaatatgcttcaagttcaagcgaagatgctgagcggaccagtcttcgtagaagcgtctataccattttcaccagtcctgattccggttatccacgtcctatgcaaacccgaaaaaagcaaactaaactcggtattccaatcggtatataatcaaacccgaaatgtgagcttgagatagacttactttctcacgttgtcgccaccaatatccatcttgattgttagccgtttagttgctttcatgaaatcactgcatttttaaaccggttaatcaatcaaatgacgataatcgcaaacaaacggttaattgaaagaattcttttgagatttttacctgaa

SEQ ID NO: 56400 - DNA, 854 bp, Arabidopsis thaliana landsberg
agatactcgatccaatcttctcactatgatccaaacgctaaaccatgccaaaaatggcgtcgacattttttcaggaaccaaggtaatgatctttaatgattagttgattactttatcacaagcaacactcttttctgatcttgtataacaacttttggttattttaggtaaggacacattttgggaggccaaaatggaagaaagttttatcaaagattagcaccaaacataggaacgcaagaattggtaacacacagaaacatcagttcactgaaatgatattcgatatcgcggtgtatatttgccttgtctgaagaatgtttttttgtttgttacaggagtgttctattgtggagttccaagtttggggaaggaactttcaacactctgccatgaatttaaccagacgggaattaccaggttcgatttccacaaagaacagttctaactggtaaaaggattaatcccccacgattatggttttttgaatgaatgaatcaatgttcatgttcgttctcgtatcctacttgttgtgttttcttttcgttttgtgtatcacaaataccaacttttaaccatttcatctagagtaggactgttaaaaaatgtaaaaagtcacagttaaagcttgtgaagaaaaaagagtgtaaaggagtaaaaatgagaaattcaaacaaagggggcatgatgggatcattgggatgattggttctgtctgttcaattgttttcaaatttgagcacttattattgggcctgtctttgagctctcttatattatgggccgatactagtttggccattggttatcaacttgaaatgaatgaagaagctggggaaaaggtcttttaaacc

SEQ ID NO: 56401 - DNA, 1145 bp, Arabidopsis thaliana landsberg
atgcagggtactgatgaacaatcttgagactgtggatctaaaagtgttgagccatcaacaaaagctagtgttttggatcaacatgttcaatgcttgtgttatgcatgtaatatttcttcgatattttcactgattacaaacatattttaaaaaaaatcttcttctttttttcattaattataaagtcaataccatatactcaacggatatcttaacttccgtgtatgagcagggatatctacaacatggagttccaaaaactgctgagagattgcaatctcttgtatacaataaggtatgtttttctttttcggtccttctcatataaacactgatgaattaaataactcaaatttgatataataataaagtataaactataggctacaatgaatgtcggaggcaaaaacataagtgctcataccatagagcattgtatcctaaggaagtctacatcttctacaatgactcaggtatatacatatctatcattttaatgtatatgaagcctcttcatgtttaagatcaaattcgataagctgatatatattcaaatataactgttataggatcgacacgaagaaatgattattcgtaaactatatggcgtagaagcaacggatcctaacatcacatttgctctatcttgtggaactcgatcttctcctgcagtaagtttatatatattaattcactgttaatctggcaattagtgatttattagtgtacgtagtattgttcatattcactatatatacaagggttaataagattatcataattttcttatcgataagtttttcttaatgaatgttatatggtaaaatgatatggctatcatgcacaaatggttaaaagctataaaactaaaaattgaaggtgaggatatacactggagaaggagtgacaacggagctagagaaatcaaagctggagtatctgcaagcctcgctggtggttaccgcggctaaacggataggcttgccggaacttctcctgaaacatgccaccgatttcgtggtgctcacggcggatggtggtactggagagatggagcagctaggatctttggtgaaatgggtttgcaaccaattaccaacctctggatcattgagaaaatcaatggtggattgttttaagaatcc

SEQ ID NO: 56402 - DNA, 447 bp, Arabidopsis thaliana landsberg
tgccccacgaggtattgagggtggtcgtcagcgcgacggccatgcctttcccgtcgacgacggacaggttcgttgtgtgcttgccttcgatcagcgccggaacatgtttggacggtgtcgcgccatcggtgatcgtcgccatcaaccgatctgcctcggcttgcgacgtcagcttcgcgactgggatggtcttcacgaacgcgggatcgccgagcacttcattgcgcgccgcaaacgcacgacgccacacctcggtcaggtaatgaatgtgcgaggtccagtgccagccgagcttgtcgagatcgaggccttggagcatgtctcgccgtcttcgagatcacgattccgcccgacgacggtggacgcattgtatagagctgttggccgcgatacttgaccttgatcggctcgcgccagagcgccttgtaacctggaagaaccttcgtg

SEQ ID NO: 56403 - DNA, 780 bp, Arabidopsis thaliana landsberg
actaacacaaaaaacttgtctgcctaaaactctatatatatatatatacacgtgcatgtgtaagattagatttacattttctattttctctttatcatgggcaacaataaattatcacctcccaactttagtaatgacattaactctctccacatcgattatgaaaatgctctcaaccatatcgttacaacaactgtttaatacatggacaaactacatgactatcaaaattacaacttctcaggccccattaaacaagccatttatcttccaagtgtcaatgcaaaacagataataaaaatttgcattttctaaagaaatgatattgcatttgtgaaagagatgataaaaatatactataatatttgagaaatataattaaaaaaattacataatttaaatagaagatgaagcgtagatgaacagcctaattgcaaattataatatttaaaaccataatatttatcttggaatataatgaaatttgcataaatatgttgtgtttttatgttctgttttttaccatatttttttttactcatggtttttgcgcttaaaatatgaattatattgatatttagttcttaataacaaagtaatatcaaacaggctaaaattaagaagtttataattaattcatgtgaagtggatagagactaaaattattgggtttataaataattcatggtgaagcggatagagaataaaagtattcaatttataattaattcatggttaagtggagagaaactagaagtacgggataatttgagttgagtg

SEQ ID NO: 56404 - DNA, 495 bp, Arabidopsis thaliana landsberg
gtagcccttttcggcaagagttcggcaaggtacgagccatcctggccggtgatgccggtgacgagggcggttttccgcggagcggaagcagacatgggcgacttctaacaacgccgggggcgtttcgcggaggctgggcgggcgatttagctggcggcggcgaccgcgaggcgggaacagtaccactcgtaggccgaggccagcccggcggcgagcgtcgtctggtggcgccagccgagggcgcggagtttcgaaacgtcgagcaacttgcgcggcgtcccgtcaggcatgctagcgtcaaacgtgatttcgacgccagggcaaaccgcgtcgcggatcacgccggcgagcgcggcaatggtgagatcttcgtcggaaccgacgttgatcgttccttcgccttcgcagttgtccatcacaaaaaggcaggcgtcggcgagatcgtcgacgtataggaactcgcgccgtggacggccggaggctcaaacggcgact

SEQ ID NO: 56405 - DNA, 434 bp, Arabidopsis thaliana landsberg
acagaaaactgaagataaactaactattttgtaggagacctgaacttttgccagttcataacaatctatagttaacacatacttgacggccaaaccaaacaaaatccattaaagtaagaaaacaagacaaaacttacaaaattttattgtgggaacaaaaaaaaggtcttacgaaatatatctcagtctcaccaattaaatccgacgaatctgaacatagtttgatcacccaaactcaaacggacacattacgcatgagcgctcgtcaaaagtgaacaaaaaattgatgtcacacggcaatcggaggaaggggattgagtatcggcgcaattaaaatctttgccgccatatctttcatgggctacgaggagatacagtgggaatagcgccggcgaaacacacagcactgagacgccggtgtctgattttgtgga

SEQ ID NO: 56406 - DNA, 390 bp, Arabidopsis thaliana landsberg
  unsure (1)..(390): unsure at all n locations
cccccccctcntctcccccccccccccccccccccccctcccctttcccccccccctcttccnnccctcctccccccccccncgcccccccccccgcccccgcccccgcccnccccgcggccccccccactctatttaaccccccacnnccccccccccccncgcccccccccccccccccccccccccccccccgcccccccttcccccgcgccccccccccccccccccccccccccccccccccccccctccccccccccccccccccggccccccccccccccccccccccccccccccctcccccccccccccccccccccccgttccccccgcccccccccccccccccccctcccctgccccccccccccacctacccccccc

SEQ ID NO: 56407 - DNA, 962 bp, Arabidopsis thaliana landsberg
atttccatacactcccctcaagttggtgtgtgtaaatttaaaacacccaacttggagaaaagatactctaaaactgggaactacccaatgctttagtaaaaagatcagccacttgatcggtttttttgtatagataaaaaaaccctaggaatgttttttcctctttatcacggtggtctaaagttttctttctgtcttcaagttcattagtccaatattataagagatgacaacaaaggtttatcaacctcaacacaagttgtagccaaagtgagtcaagtgaccaaacaccataattaacgttgaaaatcatggttgttgagcaattcagttttggtttccgtgttgcatcctctagattgagattgtagtttagcttggagaaatccactaatgctagaatattcgttcgatggatagtaatacgggccacattttgatgcttgtcgaacatatgaaataattaacttctttaattagtgtctgatcgaatataattcttggtaagactaagttggtatacctaagttccggatgcataagatggtccaacgcatggtttataattttcacttgtctaaagtctcaacgcatttttgttgttgtcaaatgatcactttgcttggttgtcgaaagaataacaggcaaagataaataatatataaaagcatatcttgacaaaccaatcaattatttgtgacagaaagaagaaaaataaacgaaaatgattgaagatttgtaaaaggaaaacaacaaaggtgatttgaagcataagattcctaaaacaaatcgtggagattacatattgtccaccactcgaacacaactcaagagactaaatatatatgttagcatgtttcggcattgagccaagctatactcttatcaatttgctttcatttctttttagtaaaagggtggagtttctcattttcctgtcctttttattttttcaaatccca

SEQ ID NO: 56408 - DNA, 483 bp, Arabidopsis thaliana landsberg
tattcccatgtcgaaatgcattacggtctttatgaattatgatatggctttagtactagtagaaatgctaacaacaaaccagaaagattttcatcacacaccatagaacacataatgcatcttatctgaggtaaataagacaatatctttaagaagataaaaacttcctcaataaaaagacaaaaaagttcaacagatcgatacacttaaccattgagagtaacgaacatagataaaacaaatgactgattagtgattattacccagactggttaatacagcacaaaattaagaattttaaataaacaacagatatctacaagactacaaatcaggatgcatacctcctccatctctcgtaggatcacttcgcgctcacgttcaatgcgggcctggtcgagattggagttctgcaggatgtccgcgaggacctccatcgcacggggcacgtccttgtcaagcaccttggcgtagtaggtcgtc

SEQ ID NO: 56409 - DNA, 1379 bp, Arabidopsis thaliana landsberg
caataagaatgtcaaacccatcctatatccacaattctgattctctttggttgcatccatcttatcttgtttaggaaatggatggataactttatattaaatgacgtcgtttctttgcctcattctgggtcagcaaatgctaaagctgtaagcccattttatgttaatggcctaatatgacatcgatttcgctatgtaagatacgcaaagaaggcttagtcctagacatattccatagggcttttatatagattgcttaaaatatatattgcttcaaggttactgattcatcaatagttgaccctctagggcctcttcaattctaagtctaagtctctatacaccatatgtgtcgacagcaaaaattggcaccatttatcaagacacctcggaatccgttcaccccaatacattatacatgttgacaaaaactatcatcgttgtataataaaatagtattggtgcaatgaaaatgatggtttaaatgaaaagaaatgtggcttcctgtaaatctatagaaactgtattggaatagttcaaaaacaacagtattttattaaaaataacaaatttaatagtacagtcttaagaagtattatgtaaagattaaagaaaattggtagcctaacaaatccgagttccattctcttttctagtatagtactagtttaaattgacgacaacagtgggccaaactaaactatagtggctgcgcttatagatcgaggacgaaaccgtcattttctggccttcaataattatgtgtgttgaaaatatatttattaagaggtgaaaaagagggaaaaaaacaaaaacgtcatcgttctcattggttaatatggataatgatctaaacatgtatttgctacttactgcaatatattaggatgtgctttaaagttttataaaacatcatcaattcatcagagtccctcatccatcttctcatcctccaacgcgagatcagacttcgacagagagtgcgatgagttcatcaacaagaaagcttgaggttgtttcaccagttcccgccgatatcgacatagctaattccgtcgagcctttacacatctctgagattgccaaagatcttaatatcaaccctcttcactacgatctctatggcaagtataaagctaaggtaatcatcatttttcccttttgttcatttccctttgaaaattaaattattcatctgaatcttcctctgtctctatgttgttgtcggtacaaggatccaaaagaactccgtttttggttataagatactattatgttcgaattggtttcgatcaaacttaaataaattttcaagagattgttaatgattgagtttttggagcttgagtaggcagttacgtaagctcaaagtttataac

SEQ ID NO: 56410 - DNA, 687 bp, Arabidopsis thaliana landsberg
ataaaactagttaccaatagcctcaagctaagctcatttggccattgcttcctttagaacaacaaaaactataacaaaacatttacaacgtgaaaagaaaaaaagacaagtttggttttctaggctatgtgaaaatgttatcagacagacctttcgaagagaatggcgaaaggggagaggattatgaaagtggcgaatgtagaaaagatgacaatggtgaaagggccaagaccgagtgacatcaaataactcatgagcaaagaattgcctgcgtatacaaattgaaccattactaaacctcctactatcaccatctcttctatcatgtccgacttcatcctctcctcaaggagattgagcaccgatcgatacaaatctacacaaaaaaattgcatggcatgaattcccttgtaagcgttaggataagattgcaataaaacaaatgaattactctctctatctctctcctttaccttcatgcagaaaatatatctggaatcaccattttcttgctttctctctttgtctttactctatcattatattcctcaggatttgcttctgtaggaaacagacccttcattgttgtccatctatatatgtacttcccaataactttatttctatttaagcattttatccaacttaatctattaaaactgttgcatttcccccccaacatttttt

SEQ ID NO: 56411 - DNA, 1184 bp, Arabidopsis thaliana landsberg
tcttttatttttaaaatgaatatatctaatgcttttgaaccgacagttttttacatgacattactaaaactgcaaaagtaagttacagtcaaatatttgtttagtccatactatactattagaaccatgtttatttgatttaaaaccattgagaatttttggatgacaacgttatttttagaaaattaaagttactaaatactcccacttaatatttagtagtatataaacttattccacttttagtttcttcaacgaatttgtttatggtcttagcctcgtaggtagatccggaataaatgggtaaaagctggtttccttccgttgtttcacttaataggtagaggtagaggaacaaaatctctttgaatgacgtgataaacctgtatatacgtatgcgataggagcacaatagaactagttgtacttgtacggttatactttcaaaaaagaaaaaccatagttcaaatatcatctctatataggaatttggtttttataatatattcctcaatttccttttcttgaatttttcattttcgtacttagttttctttgttaaatcgtattttatgtaagtttttttttttgatagaaaaatatatgatgtaagttgacattaaatgtatcatattttgacatgggatcaatccaagaggcccatccaattgacggataacagtcactcactcctataactgtcggacccgcatcactctctatttatacacacctgccttctctcacttttcttcattcatttcatacatatttgtctctcttaaatgtgtttatttccccttttgtagtaaccactcagaaggttttccttcactcaaaatggctttgtctcttatctttctagctctcgtagtgttgtgccctagtagtggtcatagccaacgttctccttcaccgggatactacccgagttcccgggtaccgacttcaccttttgatcgtgaattccgtactttatggggctctcaacaccaacgtagagagcaagacgttgtcactctttggctcgacaaatccactggtctttttctttctttactttttttttcgttatcaaccaaatttgatggactcaattcgttggtccgtgttataaaatgtactaaaagattatatgctattcattatgaacagaccattaaaattaatgaatgtaaatattg

SEQ ID NO: 56412 - DNA, 649 bp, Arabidopsis thaliana landsberg
  unsure (1)..(649): unsure at all n locations
ccccccccctcccccccccnccccccccccccccgcccttcacctccacgcccccccccccccccccccctcccacaccccacccccccccccccccccccccccccccccccccccccccccctctttcccccccgggtttccccgcccccctattcacacaccccccccccccccccccccccccccccccccccccccccccccccnccccgccccccccctcccccccccctcccccccccccccccccccccccccccccccccccccccccccccccccccgcccccccccccctctcngcccgttttcggaancccccccccgccgcccccccccataattatacctcccccccnccccccgcctcccccccccccccccccccccccccccccccccctccccccccccctccctccccccccccccccccccccncctccccccccccccctccctcccccccccccttcccccccctcccttccctctctcccccctccccccccccctctcccccctctccccccccctccccccctccccctccccccctccccctcctccttcccccccctcctccccccctcgtccccccccccccctcccctccctcccccccttcccccccccctccccccct

SEQ ID NO: 56413 - DNA, 490 bp, Arabidopsis thaliana landsberg
  unsure (1)..(490): unsure at all n locations
ccccccccccccccccccccccccccccccccncccccccctccccccccccccccccccccccctcccccccccccccctcctcccccccccccccccccccccccccccccccccccccccccccccccccccccccccccctccccttattgtttctgcccccccccccccccgccgcccccaccttatttcaannnnnaacacncccccccccccccccccccccccccccccntcccccccccccccctcctcccccccccctntccctccccccccccccgccccccccccccccccccccctcnctcccgccccccccccccccccccccccccccgcgccgggcccccccccccccccccccccccccctccccctcccccccccctccctccccccccccccccccccccccccgcctccccccctccccccccgcccccccccccccccccccccccccccccccccccccccccccccc

SEQ ID NO: 56414 - DNA, 966 bp, Arabidopsis thaliana landsberg
ctacgaaccaaacatctcctcttctagtcccttgaagttcaacatatgccataagaagaacttcttccttctcatcgatttcagcaaagtgtgcaccattgttcccgcttggacattcataggcaaaatgtccaagtttgtggcagttgtaacactcaattgttgccttgttgaaagagcgtcctctgcctctccctcgacctctataggatcctcttcctcttcctccaacattgagagcttgagcttcttcttcatggttgctttttttgaatttcttctcatgaaccgatagagaactctgtagctcatcgattgtcattctccctgtgtctttggactcctcgatagacacaacaacatatgtgaatctttctgtcagagttcgaagtaccttctcaacgatcttcgaatctggcatgtcttccccgttacttctcatcttgttggaaacaatcatcacccttttgaagtagtcatcaatgttctcatcattcttcatggcgagaacctcaaaatctctccttaaggtttggagaagagaacgcttcactttctcgtttcctccaaactttctcttcatggattcccagatgatcttggatgtttttcgatccaagatctgctcgaacacgacccgatttattgcttggaacaagtaatacttgacttgatgatccttcttcttcaactcctcaagactcttctgctgcgctgcagtagtctcgattcccgccgccggctcgggaacgccatcttctactagattccacaacgcctttgctcgtaagaggttctccattgactcgctccaatgatcataatgaccatcgacatgatgaatcgcaagtgcagtcgcctcactcatcgttcaatcacggtccactgttttcttacaccgatgacatttgaaactgtgttttgctctgatatcagatgggggtggaattgcagagaggagacaat

SEQ ID NO: 56415 - DNA, 469 bp, Arabidopsis thaliana landsberg
attttacacttctcggccattaatgtatcttctttgatgtgtgttctgttgacatctttggccctttttttaaaaactgtggtggatccggtccttttatgacatcggcggaggctccattcatgtgctagatccgcagatatacgtcctgcatctttaacttgggagaaaacgaaaccctttttatgagctcttggagtgataagcgagcggcacatggctggagctgcgatcttatacatattcatataattctttgaataatggcgggtttttgtgtgtttgtatgagcaggcagtatattcggccttgttccctgggctgactgcagagaatgtcagggctggccctaacacagcaagaactgggttaacagaaggaagggggtctaataacctcacctaaggcgaaaactgggaggaaggggtggggcccttctgcagagagcacctccactccacggtgagcg

SEQ ID NO: 56416 - DNA, 508 bp, Arabidopsis thaliana landsberg
tatcgttgtttatttatgaaaaaaatatatcggggtatagggtgaagttaggtgatcagaccaaatcaggatgagaaagttgttgttatcagcctgtgttttcaggataacaagaaacttctttgttacttattgactctttctcataaaagaaacatgtagaccttgtcccatccacgtcaccacatttactcagcaactatatccataccatatattatccacaaaagtgtaacaaataatgtcccacacttatcattatccaaatatccaaatccaaaaaaaacattcaaaccaacccatttctttctatccaaaaaagtcaaaaacaatcatctcctcaaataaaattaaaaaaaaaaaaaacaattttacatcaaatttgattgatgaatccaagaattaaaccaaacacaaaagtgtttcttgtcttttagcctgaaaatccgaaaatcagtttcttggagtcagcatccatggagcttcaacaatctgtaaacagagagac

SEQ ID NO: 56417 - DNA, 501 bp, Arabidopsis thaliana landsberg
  unsure (1)..(501): unsure at all n locations
cccccccccccccccccccccccccgccccgctcccggggcaccccccccccctcnacaaaaaaaaagccccccccccccccccccccccccccttcnccccggggttccggcccttattctttcccccccccccccccccccccccccccccccccccccccccccccccccnccccnctccccccccccccccccccccccccccccccccccccccccctccccccccncccccccccccccctcctcggttgtggcccccccccccccgcccccactatattttccccccccccccccccccccccccccccccctctccccccgccccccccccccccccccccccccccccgtccctcccccttcctccccccccgcccccttccccctccctcccccctcctccccccccctcttcccccccctcttccccccctctcgcccccctctcccccccccccctcggccccctcccccctccccccccttctcccct

SEQ ID NO: 56418 - DNA, 469 bp, Arabidopsis thaliana landsberg
  unsure (1)..(469): unsure at all n locations
tttaaagtttagtggtaaactttagcactcaggagcagttgagcttttaaggtatgctaaactttagcaccctattaaaatttagtacatggaatccaaacatgtcctaacttccctttccactctcacctttttatcattatccatcccagcttattattagcaataaactaccattctaatcagcctggacgataatagccctacatatttttacatatacacacacgcnnnnnnnnnnnnnnnnnnnnnnnnnnnnnnnnattggaacactctaggcccaatcatgcaaaggttaaggttaccttaatcaagcaatctcaactgaacctccaatatggagcaaactaatctcttgcggtccttgtgctgtgacgtcaccgtagcagatttatggtatgttttgttaagatgtggttgtgagtcatccctagttgtgaaaaagtcgctgtgagccgtgctgtgaaaa

SEQ ID NO: 56419 - DNA, 1580 bp, Arabidopsis thaliana landsberg
aaaaatacatgctggatactggttcctgttctatgaatttcctaaccaatggatactttggtaggaaagttacattataaatactgaagaaggcatagtttacactcaatgttgagaatcttgagaaatggatggtcttttttccagcatctcgtaatagagaacaaaattttcctgcaaagaaatgattttggggtattcttcagaggccaaatgaagaaagatacgatgagcagaatttggatgtactcaccttttgaacgatctcaaatgagtttggatcaaaacagtgatatgatcctctttcatacgcatttgttttcacgagaggttccccgattctaatgaaccacaacctgtgttctttgtggtagaaccaacccctattgtaactgcaaaacaataagagttatgcagctttatccttcagtgcattgcaatctgataccaaaccaggaaattaagacagaaacccattttcaagtcatggagaagaaagatggaatcaaaagttgatgttttgctttcatattccctttctttttcaaatgtgaagacaaattcatcttcaatctatattccaagtttaatatatgacaactgtgaacaaaaaactccgaagaagcattttcatatttacaatactagagaaacaaaaatatattatgatgaaaaggacttacagttcattagccgcatagagttgcgcctcatctttcggcatgctgcacgacaaaaattgttatggttcctttgacaagagagtgaatcaacaagtactttcaattccaaagacatatacctatagaatacgtaaaacaatgtttctaccaataattttgcaaagagcccttgctgcatccaccaaaaaaaaattaaaagttaaaaacagctaatgaaaagaaaacacaaacccagatggacaaatgaatgatggtactgatgagagactagagtaaattacatgtagaggtggagggttttttgcgtagtaacactgcggtacactgaattctggatcaactttagagggttcattggaccaaggcgagccaaaagtcttatgaagattttctgttgagttcaaatttaaccccagtgttgtcagatcaataccaagtgccaaagaagtcaagtcagggtcgctcatctttatcacactgagcaaaccgagtaagccaaaccgatcaggatttgactgtgtcgattgcattgattttaatcctacatctctgaaaggttggctagcagctgacatctgctgcaagcgatactgggctgagttctgttggtgctgatattgctggatgagctgctggtcataacccatcccagtgatagaatttgcagaattcatagatcttaatccaatacccggagctccaccagtctgaaaccaatcaaatataccttagaaagaacaagaacgttggtttcatgaaataaaaccttaaatgatctccgcctgttttaaaatattacagactacatcatacctgtgagtggtaaggcggatgcgaagatgagaagatgtcagacccatgtaaggaaacaccactactactcacagcttgagcatg

SEQ ID NO: 56420 - DNA, 498 bp, Arabidopsis thaliana landsberg
  unsure (1)..(498): unsure at all n locations
cccccccccccccccccccccccctcccccccccccccccccccctcctcccctccctctcccccccccctcccccccccccccctctcccccctccccccncccccccccccccccccccccccccnnccccncccccccncccccccccccccccctccccgnnaaagtttaccccccccccccccccggggcccccaacacctccacccaaccccccccaaccccccccccccccccccttctcccccctccccccccccccccccccccccccctccccccccctcccccccccccctctccccccccccccccctcctttcccccccctccccccccccctctcccctctccctcttctcccccccccccccccccccccccccccccccccgccccctccccccccccccccccccccccccgcccccctcggctccccctcccccccccccccccccccctccccccccctccccccccccccgccccccc

SEQ ID NO: 56421 - DNA, 1175 bp, Arabidopsis thaliana landsberg
ccttatgaagccccggaacctgaagaaaatgaaaggaacatatgatcatcaactagtgatcttgacatagatatctattgagattgttttcacaatacgcgtaagagcaatttctactctagatgtctttcttatctaacttaaagcgctaaaacatcaaattgatcatcctctccaactcacaaataccaacacaacaagagctatcataacttcagcgtttcacaagagcaatgataacaagccatatccaagagtgagtgtatatatatgttttcaacaagaaagattttcattttacaagatgactcagaataagcttaccttgactctaatcgcctcgtaagttccatagacagcacctgaacacaacaaaaacaagtcttaatatcatctccatagccaaaacccgtgcccaaattcccaaaatcggatacatttaaaaggcgattagattgtaattctagggtttaggttttttttttccagaatgtaaaggaaatcgaaagcgtacctactgcgccgccaagagcgccgccaacggcaactccggcagtgattttggccaaacagctatttttcgccatcttcttctttttagagacaattcgtttcttgtgtcggagaatagttttttacggttgccctcgccgcttttaaggtttttaactttgaagtttttgcttacgcaatggattgattttgcctttcgctacaaggacgagccacaacaccgacctgttttttaaccggcctaaccgattcgaaccaaatttctggaaagacgtcattggtttacttacagctttacccaatttactaatttacccacccgactccaccggatcttaacccaactaagccggcactattattttttgttataagtttagcaaaataaacattttaatttcatttggaaaccaacaattattaaaaaaaattacactaatatttaaatgagatagttacttcgatttagattgtggttaatggtaatgtacattataaataataaaaggggcatattcttttaagaatgtagtacatcgaattaaatgaatgttatatggcgtaaagaaaacttacagaaggttagcaagttggaaaaacatatgtttattcaaagggatactaattgttcaaaaataaaagggccgtctacaaaccaagtt

SEQ ID NO: 56422 - DNA, 1185 bp, Arabidopsis thaliana landsberg
taaaaagttgccaattgatatccacccagtttaatttagctatgatattttaggttaatgtaattaatgtttttctaaaaccaaatttttgttaagccaacctaaccaaatttgagaaatataataccatgccataaaataagttttatatgaatccaattaataccctaatttggattttcatttaaatatcacaaactttaggtttatcagggaaacataataaagaaatgttatataaaaatttagcaacacttttaaaatctaaaatctctgatattctgagaaatgtcaaaaaaaatattccagattgcatataataataaaatcataataaaaagaattaaaatatattgatacttcataaatagaagtcactgtccaagtctctgcttttttatacatcgagaggcagagaaggtgttcttcttcttgtccaaaagagaagacaaaacctaaatgtctttaggttacgcagagaaattatccttcattgaagatgttggtcaagtcggcatggctgaattcttcgacccatctcatcttctacaatgcaaggtttctattttttgtttccttctcctcctggggttttgtgggtttactctatttttctcgagattctgtataatttcacgttgcgttgattttttctctggattaatcgcttagctgtttagattttagagttgatccttcttgtgttctgtcctagtgtttgattttggatcgtaggttcatattaagcctttaagtttttatatttgtcgtttggatggtcgtgaagagttgttgaagagttggagaatgattagtacttaatgattcatataatctagttttaggttatacagtacctgtttttagacttgcattgtgttgtgttaattgaagaatgaaatttggtgataacaagcatcttaagattatgtgattttatttactgattatgtgaaaaccgttgtctggattcaaatttgtgtggagattttgactgtttgtttatcattgttttatctaacaagccaaaaggtctgataaaaggatttggttgctagatcttggcgtgtttattgtttatttcactattgtgctaactctggtgtttgtctttggaaatgcagattgaagaacttgctaagttgattcaaaaggtttgaatctttaccctctttcgtattcttc

SEQ ID NO: 56423 - DNA, 511 bp, Arabidopsis thaliana landsberg
  unsure (1)..(511): unsure at all n locations
ttggcacctgttttgtatttgtctctnctgcctattactttttcttccgccagtgccttctgattcacattttatctcacgcggtacagtgttacgctgcgttctactatttgcgtcaggaaaagtacggcttcgccgtttatttcgtacaggccatttatggtcgatcctcttagcttccgcgcttcccacagttcgctggtgatggttttttctgatatcgctttcctgtttttatcatacaccactacagcaatgccttctttggagaaatggaagaacagggtattgccgttctttacttgtagcaatttattccagccatcatcgggttcctcaaaggcttcgctcagttctattttgggtgcttgggcatggctgtttacaatgcacgtggccatcagtgccagcaacaaaagggttttccttcataaggttgatctcgtcggctaaaataataccaagagtgttatattaaaaatgtcgcgacgtcaggcagctatgcaactta

SEQ ID NO: 56424 - DNA, 973 bp, Arabidopsis thaliana landsberg
caagctagcgaatatgcacaatttcccatgacgagatttgctagatagataatacctttctttcatttctgtaatcttggtgctccatacgtccttatttttcacaagattttcgttcaactacacatgagaaaacaacaagtcaataatactctacagaaatgtaagtagatgtaaatatgccatcaagaaaaacttttaaaacgaaagctagatagatactcacatcttcaagaaattgcttctctttgacacatctgtcaaacctggtttgcagcttctgcagtctctggcttattgccttgctcgcagcttctgagattttctgttccgtttcctctttgacattttgtagcaacttttcaaaatactaatgggcgaggaaaagataaaaagaaaaccaagaaaaaaaattaacacttaaataaagtgaagcagacaatgaaaacctcaagagactggtagttatcgagacaacaaaaggctaacaggacagggtaggtgcttacttgtttttgattctctagttgtgcctggagaagttcgttgtactcactaatgatctgtgttttggaaaagaaaaacgatgaggcactaaattacttaagaatgttgctgaaattgacaaaagtgatcaggtcgacacaaaaattgaacacgaggattatgaaaatatgaaactgaagcactaccatgtccactttgatgttcacgagagcatcatcattccactgcagagtattccagcctcacaaccatccttgctcagacttcatgagaattcaactccctagcttgccatcagtttgattgaataagccgtgaacataattgcaccagcataatccaaacacgtgtgtttaagctcaagtgaattctgtgcttgtcttctcccgtgccttctggcatgtccttccttggcctaccataagaattttaacaaaaggaatgggtaacctgggacagatgagaa

SEQ ID NO: 56425 - DNA, 849 bp, Arabidopsis thaliana landsberg
acgttaatcatcgttactaattattatctcgggaatatttccaacacaatcaatctagttggttccaattctcatcacatattttattttatagtttaaagtctttcaattcagtagtctaactgtataacatatgacttcgaacagattgatatagaccactcaatctaataatatcgttttagctacgaagagtatacaaaaaaagctagttggatagtttaaaaattaaatgctagaagaatgttggatatatcaaacaataaaattaatatttagagagaaaatatcgtaatagagttttttctataaataaatttttgagttaaaaaatattattagcctgaccaaactctttttatttctttaaactatgacagtaagatctaaattttaataaaccaatgtttatttaatattttcagaaatgggctaaaaatgactagttgttgtatgtgtttcctttgaataaaagctcaacaaacaaaaactagaagtcattatgtaaaaaaactaatgacatagtattaggtattttttgcaaattattcacacatgttgccaaaagttgttttttatattatatgtttggtcagcgaaaacggtttaaagcactctctctttcctctcgccttcctttgatgatcctttttagttcccttcttctcatagctcttgagaccatctccgaactcaaaggaaactagaaacaatggaagtgatgagcttgactgccccatcttctccgagacaattatctggctgctttttaagcgcaccaacaagccctagaagattccatgagttttatagagagttggaagaggcccgtaacaagaaaactttttc

SEQ ID NO: 56426 - DNA, 495 bp, Arabidopsis thaliana landsberg
  unsure (1)..(495): unsure at all n locations
nnnnnnnnnnnnnnnnnnnnnnnnnnnnnnnnnnnnnnnnnnnnnnnnnnnnnnnncttttttttttttttttttttttttttttttttttaaaaaaacacacacttcacacatcattacgataattaaaagaggggtggaaattttcaaataggcagagcatactcaacaagagggtcatgcctaatttcctttattgaattaaactaacgaacaagcgaaagaaaacacaaattccagatcatgcagaggattccgcattttcagaagatctggcagtagcctgtggaacagaaaaagctggcataagagtattaccagcaatttcaaaatcttgagaaattcccaagagaatatcaaaaactgtcgactgtttgggattgtcaataaggaaactcaaatgccatgaagtttgatttgcccactcagaactccacatttcaaaaccattattaggaccacatacctctattgggaagatcaattcccaggaat

SEQ ID NO: 56427 - DNA, 1109 bp, Arabidopsis thaliana landsberg
  unsure (1)..(1109): unsure at all n locations
gtagctttagtaaagctgtgtggctctgacgactgtacctatataatccgtgagttagggaatcgtaatgagtgcgagaaagctgttggcttttatgagtttgcggttaaacgagagaggagaaagaacgagcaggggaagttagctagtgctatgataagtactcttggtagatatggtaaagtaactattgctaagaggattttcgaaactgcttttgctggtggatatggaaacacggtttacgccttctcggctttgatcagcgcttatgggagaagtgggctacatgaggaagccattagtgtcttcaaatccatgaaagagtatggcttgaggccgaatttggttacctacaatgctgtgattgacgcttgcggtaaaggcgggatggagtttaagcaagtagccaagtttttcgatgagatgcagaggaacggtgtgcagccagatagaataactttcaactcgttgcttgctgtttgcagtagaggagggttgtgggaagcagcaaggaatctgtttgatgagatgacgaatagaaggattgagcaagatgttttttcttataatacgcttttggatgcaatttgcaaaggtgggcagatggaccttgctttcgaaatccttgctcagatgccagttaagagaatcatgcctaatgttgtaagttatagcaccgttattgatgggtttgcgaaagccggaagatttgatgaagctcttaacttgtttggtgaaatgagatatcttggtattgcattagatagagtttcttacaatacattgctttcaatctacactaaagttggtagatctgaagaagctttggatattctgagagaaatggcatctgttgggattaaaaaggatgttgtgacttataatgctcttcttggaggatatgggaaacaagggaaatatgatgaagtgaagaaagttttcactgagatgaagcgagagcatgtgttgcctaacttactgacttattcaactttgatcgatgggtactcgaagggggtttgtataaagaggcaatggagatattanggagtttaagagcgccggattaagagctgatgttgttttgtacagtgcattgattgatg

SEQ ID NO: 56428 - DNA, 346 bp, Arabidopsis thaliana landsberg
  unsure (1)..(346): unsure at all n locations
ccccccccccccccctnccccncccccccccccccccccccccctccncccccccccccccctctcccccccccccccccccccnnccgccctcttcgtccgctcggnnccccccccccccaaattattacccccccccccccccccccnccccccccccccttccccccccccctcccccccccccccccccccccctcccccccccccccccnctctcccccccccccccccccccccccccccctctcccccccccccccccccccctcgcccccctccccccccttccccccccctccccccccccccccccccctccccccccctctccgcccccctcccc

SEQ ID NO: 56429 - DNA, 314 bp, Arabidopsis thaliana landsberg
ctcttcttctatctggggaggaaccaactccccgggagatgcagctttaagctcttggggaccctcactaaatgcttggaccaatagtagattctcggaatgattatatcaaaggctaagcatgtcagaagaaaaaacgaacgaaatcttgtctaacacatgttccgttgagtaaccaatccttctaaaatggtcctaacaccgaaatgactgtactaataggagggcacataaatcaactccaacctggcctagttcttgaaaaccatgatggacatacaagaaccctccaggtctaccgaataacccagacc

SEQ ID NO: 56430 - DNA, 499 bp, Arabidopsis thaliana landsberg
tatactctttactatttccagttgtgcctattggcaatacgtaagagaatatgaactatttcattagcttataacatacaagttttacaaaaaaaaaaaaaatgatctctcatatatggatagatataacttgatcaaaagatgtaattcatataatgacttatattagtatcattatcttctcactaattaaattcatatttgacgaaatgtacgtagtatgtttttaacaataaaagtccatttcatttggctagctatttcattttctgccaaatattaaagtctatcatcagatagtttcacgtaggtaggtacagaagagaatgtgaagaaaatactttttaaaaagaccttgacttaggaaaaagtcattcaatttccacagatacttactatagaaactttttcgatcaaaaaaaggagaggaaattgctaagttatttcgcaccgtacgactcatattattccaaattatgtatgttaataagttacaaca

SEQ ID NO: 56431 - DNA, 479 bp, Arabidopsis thaliana landsberg
tatcgatattcaaattaatcctacgtaggtactgctaagattacaaattagaaagctttgaaaaatactagtagtaaaaaggggcagatgattggtaaataataatttaaattgtttttagtaaaaaagggcacagacactcacacacacactgctttcacgacccatgtgagttttctttcttctccatcttcacttttttaagtagctagatgacaagacagacagctatctctcttttttttttacgaagaagaagatcaaaaaaaaaatgaattttaaaaagggacctttaagagagatggtgggagagagagcaatagagagagaaggaaatccacccccacaaatagaaagttagggtttattggaaaaaaagaaagagagtgtgtctctgtgtgtgattctaatagaggtgtagtacgtcgctttgctttcagtccattaaaaccatttcataacctattccgcaccgacat

SEQ ID NO: 56432 - DNA, 990 bp, Arabidopsis thaliana landsberg
cgcgggagtttgagagcgcggattctttatcaaagaaaatgacactaatcctattttgcacaagcccaacataataacataagcttaattcaattacacatgaagaagatttgatcaaattgcaataagaagatccaaattacatagtcacgaggaagaacacaacaaaattcacgtgttatctgctcaaatggatcacgaaatcaacgaaagggagaaagtgaaatctaccttccggagacggttgcatcaaacgtaaaggagacgagaaagcgacccggattatccgggtcgggttcaagcctaagagactccttcttgagattaacgtcgttacgaatcgtgacggctttctggtgttcaacgtaaggagtcggttgagccatcatgtgaccagcataagggtatctggccatcgccacgggagcccaagagtggttgtggtaaggatgcggtggatgatgttggaggtggtggtcgtacggcggaagaggcatggctcccgggggaggatggtggtagtaagaagcagggtactggtaaaccggattaggattaggattaggatagggagtaacggcagcgaaaacgatgggattagcttggatttctgtaggtagaggtggtggaggaagagaagaagaaggaggaggaggaggtggtggtggagccgccgtatggtttcgccgtcgacggcgtctaccttcaccgccgctgctgctaatgtttcccatatgattattggcgttaaacccagatcaaaaagacaagattttttggtgacccaaatgatcaaatctcagaaaattgctaaatttgtgggtggatcggagattctggggattaatattgagtgaaatgtaaggaattacgaaaagcaaaagcagagagagtttagatgaattaagaaagaaagaaaataaaaagagagagagagagataagagagaataatttaggagaagaaagtgggtaatgatatgatgaatgg

SEQ ID NO: 56433 - DNA, 1242 bp, Arabidopsis thaliana landsberg
gaacaagacttgtgtccgggatctatcaacgtgagtttcgacccaatacgcccaagtacgaagtgctttctccattgccacaaaacggtccatgtcttggtaataagaattgcctgattgaatcaagtcccatctgtgttcacaagaagatatataaagaaactttcacactagaaaatcaagtcattggaagtgtggtaacttacccttgcatagatccggtgtggctccaccagtgaccagtgttgaagatgaggagatcagcgtcatgccaagcattggcattaccagagatctcatccagcttcaacacacgcttgccttgaacagcatctatgtccaccaagaacggagctttgtaaaatgacattgttatcccataatcctatacatcaaaaaacagttttcttatagaagaacctgaaaaacaagatgtgagccattgaagaataagaagaaagcattaccaagaatctgaaggtggagagaggcaagcctctggtcatttctgtccgagtggacggtgcagatgaaacaataaggcagatcaaagactcccattgattcttccccaatgaatcacccgcaaacattatggttttgcccttcattttcaacagaaactgagcaccattgaacctaatccatttgtgaaagaccagaaatcaaacactaaaaccacagaatctctgattttgagcagtcgtaatatcttaaagtagaattctttcaaatgggtttgccaaaagaatacattttgacaacttagctcagtaaaattctgacgaaatcgaacctcattaccaataacgacacaggtatacactattaccagaaaactcaaagatttaaccacgaaaattagaaaactttatgacaaaaaagaaagaagaagaagatgagtatgtgtacagacgtgggtaaattgcaattctgaggttgccatcgatacttgaggtagtcagagtcaggacgaccgtacatctgacaatcgaactcaggctcaacgacgccgggacaatccgccggtttatagagaggataagagttatcacgaacccacgtgccgaggaagagagagcacgtgctcctgttcccttggaaaccagctgatggtctgcttgaactgtactggttaccactactaccagaggagcttccatggcgtttcttcaagctcagtataatggctgaagaagattgttctggttgttgaagcaacagaaagaaaatggcggagac

SEQ ID NO: 56434 - DNA, 817 bp, Arabidopsis thaliana landsberg
tttgtttgatcaactcgatgaccacctgcaattgtcacgtcatcttacatatatctccgaaattagcatgtatatccacttttaagttttaaggaacgttccatcaaatttcatcaattttgatacaaaccaaaactttatatcctcttaaccatttttaaagaaatattcagaaccgaaggagatgggtatttaaatctctagatataaaccgaactaaatatttatcgtacctgatgatgaatccttgacgtctttatgtggtttgataatagcaccaccttcacgacggcggcgttttagtctctctctagccttatgattctgaaaccaatagaaaacgttcttcccttcgattctcccatatttacgaagcttagatgctatctgttggatctgttccgtcgtcggcgtccgtgttccgcttctgtaaagctcttctagcgtcgtgatctgctctggcgtcggattccatctcaaagtcgccgccgcaggaatgttgtttttccgttcatcaatatcgtgttctcctgatgatgcggttatgagctgatggtgatcattgccgttaatatcacctgaaaaaaacaaaaatattaacacattgatatgaattaagtctataaatgacgaagtaaggattttattacagtgggtgagaagaagaggaggttgagtagtagagaggggcaaatagttgatgaggttgttgttggagatgtagcccatgctatgtagaaatttgccctaataactcttaatttagagaaaagattcacaaaataggtcttttgttgctgttgtggaattccgaacc

SEQ ID NO: 56435 - DNA, 1303 bp, Arabidopsis thaliana landsberg
ttgccgacaggaaattctgcctcaccaccaaaatggtgaaaatgccaagccaatagtgacaacaactttatttatgttgtaatgatatgagtacatgattacagtaccctgttattgccacgaaatatgaactcatattattaaatatattgacaaaaaaaaactcgagttcctgtggcttggaattctcatttaaatgatgatgtacatgcacgagtgataaaagtgaaagcctatgtattctaagaaggtcttataactattacctaatttaagggatgattttttaaagatcaactattcgaggaggtgggcgaagcgaatataatgcatgctagaaagtgtaaagatatacaatgagaaaaaaaatactgtatataaaagaaaaaaggagcatactttgctatttgtggggtataaacagtaattattgatttctacttttagggttcccctcttgttcagtatagttacaaattaccactccaatgaaaatgattccttcttaaataatttaagtgaaaacctatatttccttcaatcagtaacctatatatagattcgactttattatttaacaatacataagtatgaaacttacttattaaatataacagtgttttagaatgtcgtacatatttgtttgtgtgtatgtgtgtgtatgagcatgtgtgtaaaaaagaagaagaggtacttgacttatctatttgtctgtaacttaaatggaaaaatagcatctaaataattgtatttctctttactatttcgaaataattgtttgttttctctttgctttcactgttcttacttaatttgtgtaatttcactttagctgtccggtcagtccatttatgaaatcttgccactagatttcaaaatttgtggtactattgataaagttatgatttacaagaatataaatcatgggttacagttttttaaataccccacaaagtacaataccatgggctcataaataaagaagaaatcttttaacctttccaactattcatagccgtaaaaaaatcatgggtaaatcacacatcttgctacaaaaagattaacaaggtttcatttataaacatcaaaaagggttcttcacatttacaatctcacaatttcaccttttacagctttaaaatgaacttgtatacaatagccaagaaaaacttgctttcatggtggggatccacatttttgttcttctaaaagacttaatagattgatatagatagataatctcataatcataatcatggttgaaaataaattgaaacccgttaataggtttggtcttcataac

SEQ ID NO: 56436 - DNA, 552 bp, Arabidopsis thaliana landsberg
attgatgcatgcgtacttcggatcagaaattttacaaatctctctttttcactatgacaaaattggccaaactctttactatatcgacttttgggagttgggaccatttcctcgtccaattatataagtattttttatagctaaaactcgaacctctataacttttctttcttttttcgtattagtcaattatttctccccataaagtaatcaaacttctcgagtatataaattttaactgaaattactcgttttagctttttacgaaaacaaaattagtagtgcagatagtttaatgtatttgttaaaatttccatctatgaatgatttcatataagaatcaggtcggtctgcataaacatctatttcttcctttaatctatgttaagttatagagagaaaaaaaacaaatatttctgatatttatactttccctatagcattggaaatttacacgatgaactaatgatttagaaaaagaaagagagtatgtatagtattcaaatgagtttggggacccagagatctataacaacgagctaataagccaaa

SEQ ID NO: 56437 - DNA, 533 bp, Arabidopsis thaliana landsberg
ggcgggcctcctcggcttgttgttcgatgaagtcttccagcctcaggccggtaaggatggtctgcacctccagcccgagccggaagccgccaaccggaccggccgccttcaacacggcgtcgatggtcggctgggtcgcctgggcatagacgagccccctggcctggccctctgtcaggccccactcggccatcgcgcccttgaccccgttgttgggccagcgacggcgcaccagacgcgcccacgcgttcttggtgccgaaatccgcagaggattcccggacagatttggatgagatttccaccagcgcctcgctcacattgcacctcgtgacgaggggcaaaggaggccctgggacagatgcaggaggcctggaacgacccggtgcaattgatgagtgcggccgtcagaaatatggaagcggcggccgattccgacgacggcgtgaagcgggcgttggaggcccttagcgccgtttacttcaagcgtgcggtcgcgctgatgtgcgaggccagggcgggtgttgagcccgc

SEQ ID NO: 56438 - DNA, 450 bp, Arabidopsis thaliana landsberg
cgagaagtatgtgtttgacattctgatttcaggcggctgataactatgaaaaagctgtccagctcaattggaacagttcccaggtatggtccttcatctatgtcatctgatatacgaacttcacaataccgtctcatcagaaccagacctttgtcactatatgatgtcctttttaagcctgtgtcgtcaatttgtagtcttttgattatctgacatatgatttaaattatcaacttctgcaggcgttaaacaactggggactggtcctacaggtaactgactgacatgtgtttatctccatgatatgttgtgacataaaaatgtgtttttgtaaaaattaagatgctaaaaaacttagaatattccctgggatttgtcattaggcactcagtcaaattgttcatgatattgacaaggacagtgttgtcagaaggcccattagtcaggtac

SEQ ID NO: 56439 - DNA, 744 bp, Arabidopsis thaliana landsberg
gctagggagaaggaaaaagttgtcagaactgccattagtaaggtgcttattcgtctgtcgaactaatgtaaacattgcatttgatatgcacgattgattttttactgtcccttgtcgcttgttttaccatacagtttcgggcggcaatcaggttgcaatttgatttccatcgagccatatacaaccttggaaccgttctggtcagtttcaatcttttcacataactctttacatgcaggattgtaattccaatccagttaattaaccactgtggatttttctcacatttacagtatggattagcagaagacacacttagaactgggggttcaggcaacggcaaagacatgccccctggtgagttatacagccagtctgccatctacattgctgcagcgcattcattgaagccaagttactcagtaagcttattatctccattttgtactggaatcaagatgtttgaatcatacttgtataaaataagattgaatgccagactaagattcatcgcttcaacatctttgggttaggctgatccttttcctggtccaggtttacagcagcgctttgaggcttgttcgttccatggtacattccattcactttaaacaatcaagttgttttcttgtggaaatgaccaaaaaataaattgaatttgttttggcagctacctctcccgcatcttaaagttggatatctaactgcaccacctgtgggcaactcactttgctctcacagtga

SEQ ID NO: 56440 - DNA, 972 bp, Arabidopsis thaliana landsberg
attttgatcaattctcttttaatcaaagctatgtttttttttttggaattcatggtccaaaaatactagtgttttgtgtttctatataaagtctttttatttttgctgtctttttctctagtgagtggtgttgtaggaccttcgttgacatcactaaaaagttttaagcatcaacatgaatttcaatatttgtatcacggagtacatcaactccgaccatcattccaaccatgttctccaaattccctatcctatatctaaatcactggtataatcagggtcagctcaaagcatctcatagactttagattaaaaaaaaatattatactagaagcttaaagattatgcataagcatgtttaatagaaaactgtttgggcccgaaacttaagaactttagaaaaacaaaatatatgccaattttagtgtcatttgtagccaaaaaatatgggtctcgcgtccactcccatttgcctcacaccatatgctttatattatatgccaattttagtgtttttttttaatacatgtacaattatattcaacccaacaaaacatgtgttgcatcatgtacatcccttcattgaatgtaatttatttagataattttggagaatttaaatacaactttaggatcttgacccaaagcacactcgtaaaccatctttaaacgtagagacgccaggagctttgggagtagagagcctattatatacgaacaatactgttgatagctttgatgagatgttccgcctaatcttcttcaatttccaacttcaagttgacataattaatcgacgcaaacttctcagatccttgctagactttgttgaagacaagaaagaatgatgaagagatatattgcatggaacttctcagacgaggagaatgttttgactttatctcaaagaatcaaaacttctatatacctccaaatctattttggatgcaagctttatttattcaacatgat

SEQ ID NO: 56441 - DNA, 516 bp, Arabidopsis thaliana landsberg
  unsure (1)..(516): unsure at all n locations
cccccccccccccccncccccccccgcccccccttttcccccngtgtgttgggggcccctatttcaacccccccccccccccccccccccccccccccccccccccccccccccccccccctnccccccccccccccccccccccccccccccccccccctcctccccccccccccccccccccccccccccttttcttccgcttgttgtggcccccccccccggggcccnccacaattattaacccccccatacccccccccccccccccttccccctctccctcccccccccccccccctccctccccctctccctctccccccccccctcccccccccccccctcccccctccccccccccccccccccccctcccccccctcctccgccccccccccctccccccccctccccccctttccccccctcccccccctcccccccctcctctcccccctctcccctcgcccctctccttctcccccccccctcccccccccttcccttcccccc

SEQ ID NO: 56442 - DNA, 576 bp, Arabidopsis thaliana landsberg
caaatcagttatttaaggaaataatcaactaccaatccgtatctttaaacaaccccgggaaatataaaatttagcgaatactggcataaagatacattgcataacattcctattaataaggcaattcctatagattcctaattatattttcgaataaggcaattttagagatattaaatccctactaataaggcaacttacgagatactagcttaaatattctttaaactacataatcggaaatcatatcctttatattataaatcataagtcacctaaccaatagaattttgacacatagatttagttgtttcaaaatttcattttctttttaaataattctaaaaaaaatgaaagtgttccaacttacataaaaaccaaaagcaaaattgaattcccccttttttaaggaactaaaataaatgtcgtcaaaaacagattctcttacagttttcattatttctttatatcactccatagaatttaataaacaatatctgaaaacaatttaaatccctaatttttcttccactaacacgtgcacgttcaaactgatttataactgattatcttcta

SEQ ID NO: 56443 - DNA, 540 bp, Arabidopsis thaliana landsberg
  unsure (1)..(540): unsure at all n locations
tattaaatcattgaccctaccaacatcgtatgatgatagtgattgtcattttgacaatgtttatgctaatatttaactgattgctttttgaagtgttgatttatacaaccattaattggaaaaaaaaaacaaaaaaaaaagattaatactctataaaatggagagaaattaattcatctcctttacggattaactaattttattgtctcttacttctattttgggtaagttctcttacttttgcttccattattttaacactaccagtcaccaaatcagactcacaggtatataatgttttaagaagatatacagaagtatatgaatagagatcataactttattattaattcattcattaatatatgttgatatgtgctaaacataacaaattaatctatctaactcgaccaaaggaaagagaaaagactaattacacgagcttacctaactgcactcacaaattggtatgagtgataaatngataatgacgctatataatgtaaccacagaatgtatagatttagctaaaaaaacaaa

SEQ ID NO: 56444 - DNA, 834 bp, Arabidopsis thaliana landsberg
tgtatatgtgttgatattgttacagtaacctctaccaaaatatatccattgtaatgtatatagctaatacaattcgaaatgtcatgtaaaatatttccacatgatgaatcggacaaaagctttttgtttttcatttagaaaaaccataaaatatataatataaaataagaaaacactttaaaaatgaaataaaagcacaagtgatgatgatgagtatcagagagctctttttatgaccaaacacactccttccattaccatttccctctcttccccaaaccccaaaatctcttcctttttttaccgttactgtaaattttccggccagaaacaaaaaattaaaaagagctttcctggattctcgtttagtcaattccacatctctctatctcttctctctcttcttgcttcctctgtttttgcttcttgaattctcagaaacagagacaaattctaaaaaagaaacaatctttagacaaaagaagagaaatttagtcatgggttagtctgcaaaattcaattacgtcttcttcttcttcttctttttcttcatctttgatttgttggcgtatttagggtttgggatttggaggagaggcaaaatgttgaattaaataaatcgaacgactctggattcctcggcggttaacgaccgccgtcgccgccgccgtcataatccaaccaccaccaccatcaacgaccttgaatttccacaatatgcttcatcaatggcaccagataacgaccatttcttagattctccgtcgccgcctcttctagagatgagaccccaccaatcagcgacggagaacggtggtggttaaagagaaattg

SEQ ID NO: 56445 - DNA, 719 bp, Arabidopsis thaliana landsberg
atcaatactaagacatactcataacttttgtggtacaaactgctgaaacaagtttggttttccggtttcagaagacccggaaaagaaaaacaataacttctgaaacaagcaacatcctctgtcccgtagtaatgcttataatctcccaacagtttaagctcgaacttacattagaaagccctaacggcttaaaaaccaactcaataaaaataacaaccacgaaaccgcaaaatacaaatcacactttgagctgaagtgtatgggaaaccacaagaacacacaccgaacaaccgcggtttataaaagagttaagttgttaccgaaaaagatgattttaaacaagtgcgatgcttgtctctccacctggtggtttacggacaccgcctaaatagtctcttgcttctactttcccatctgcaaatatgttgtttcctcctatctcctttagcttcgcttgactcagatgcttttcaacattagatgacgccgcatctcccttgaatatgtcgtttcctgaaagttcggcgaatttcttgtcataaatcttctttgctgtcttcacagatgagtcttcttcagcagtctgcagaatagcgtttctctgattagactatatataacaatgattgctaagagatatcaagaaacacattggaaaagtcttacttgagatttagctccgaggttgaaattgtccttaagagccaatgcaccgatag

SEQ ID NO: 56446 - DNA, 1711 bp, Arabidopsis thaliana landsberg
gagtgttataagcattgtaaaaatgaatttaatagatttttagtgaatatagcattagacttggtggtttccaaatcaacgaaaagtttgtgtacttacatacccaaatatgaaaggaaatggtgttcatgagcctaagatttattttcttcgaattaaacaaagtaataaggcctagttaataataatgaaagcaaattataatttatgattggtcttgaaaaagcaaaatggagagtttaacaacaaacgacgtctttgaagtgaagataatctcatgtagtacacaaagtttgtgtttcgttgcagtacataaagaacacgatctttttagtagatacgaaaacatgcattatttaatcaagaaaaaaaaatgaaaatgtttttgtattccaatcacatgaaaactaaaggcaactataattaaaaaaatcttcaaaaagaatctacagcccccaaaaaataagatttagtacaattccttaatcgtacacagtagtacaagcaagcattgtactgctttcaaaccaaagacacgaccaaatgtcttataaatgatctttgtgtttatctccatggtaatagaaatgagcaaggagatatttttttcccctgggtttgaatgaacatcattgagtgcagcgttgatgtaattttacttattttattccattgttgaattaattaaagaagtatatatcagcgttgcattcaattatgtttttctaattttcaggaaatacaaaaaaaatgaaaaaaaaaatcacttaaaaaaccttgagagttcttttgactccaacatttagtttctattattttcgactcctacaacaaactttcaccatacaaaataatgaagaaaacacccaaaaaggtttgaatgtgtgaggttagtctcatttttaaaatagtgacttgtttttttttaaatgttttttaagaatgttttttcaactttttattttattttaaacctaaaggtagcgtgactattgtggagaaataaagaaacataagaaaaaatatttttggtttatagtaagatgttgttttaaaatatatatttaaaaacaatgtcactattttaaacggaatatagacattttctattaatgagattaacgtcgagcatttgaatttctagatttttttctaagttattttgtatgttgaaggtgtattgtaggaatcggaaacatcaattttcaagatttttataagactttaatctttatcagtttcagaatatacagtgtgggtaagtttctatcaaaatgattcgatgtatctggagtggtctaattcgtgaaagtttatgtattttatttttaggagatctaaaattttatatcagaaaaagcagaaaacatagataaatgtgtgctcgtttgctcgagttcgtagatacgggtacttgcaacaagcacaaatcattttgttgtagaaacaaatcattttgttgtagaaacaaatcatgagcaatgtgcaatgagcttcttaaactataagatttctttaaaattgaatttgtccatttatatgtttttaaatattttatgtttagtttttaaaattaatatatcaaatttttctaacaagaacaatacttagagaggaagtcatcgcagctttttttcccggtaacaacgacttcttcaacaaatgttaaccggctatctgaccaaaatcctttgactttctcagcagagat

SEQ ID NO: 56447 - DNA, 388 bp, Arabidopsis thaliana landsberg
aaacaaatctctaaaatcaacgggagtggcttcccaatgcatatagatctgtcccctcaaatttccctagatccttcaatattatatacctaacagattcctctatatagaaccataaaatggaaaatgtagcaagttcaaacatgtaattttcatcccatagaatgttccagatatataattaaacaactccaaattaaacatagatatgtgccgacgatgaaatcaatgtcaagtgaagggtcacaatttgagcaaacacaacacatgttgaaaggaattggtccagaacacatggtgatatattaactatataaaacaaaagaaagggacaatgtatgaatctatatagtattatataaaactttgaagggaaggcaaaatctaa

SEQ ID NO: 56448 - DNA, 500 bp, Arabidopsis thaliana landsberg
  unsure (1)..(500): unsure at all n locations
tttattttttcgatttggacaaaattgccgtggactccatccgatcagccaatttttttaacaagggactcataactattctttgaaacatttcactagttacaacatttatattcagtttttattcagattattttttatacttcttttttttcatatatttggatcaaatatgtattttatatagtgggagtcaaatacattttttttaaagtcaagtacattattttaggattattgatgtacaaataatattttaatcaatcttcattgaacaagccctctatataaacggagagagttgggtgggtatcaccaaggtgaggttgagagcatctttcaaagaaagtgtgtgtgtgtgtgtgagaaaagagagtgagtgtgagtgagagaagaaaaaaagattgagagattaaaatttgagtgaaattanggnttattctcttcttggtttctttgcttcggttcatcttcaaaccaaaagaaaaaaaactcttcct

SEQ ID NO: 56449 - DNA, 314 bp, Arabidopsis thaliana landsberg
  unsure (1)..(314): unsure at all n locations
taagcaacaaaccgangcgaaaaaaaaaaagnnaccacccaaaggnggcaacccaaattaaaagccaaaggccgcagaccaacgcaaaagggccgcaaaacaggaaagcagcnaaccgacacgagaaanngacagnnaccacccaacaagaacacagcagaaagcgcaacgaaaaccacaggccaaaggagacaagcgacnccagcccagagagaccaaagcaanacccnacagccacaagaaagaaaccgaaaacaaaaccacacaaaccgcgccccggcgcaaaaaaaccaaaaaaagccccgagagacccc

SEQ ID NO: 56450 - DNA, 967 bp, Arabidopsis thaliana landsberg
cgagctcagtgccgctagcagatggcctgtaagtgtctctaaaacactcttcagtttcttgtttaccgtttacttatttcttttggatcgattttaaccccgaggacttggctgcaatgtttcaggtatgggcttcattgctattgtacaggagaatactggacgagattgaagcgaatgattacaacaattttactaagagagcttatgtggggaaagtcaagaaaattgcagctttgccattggcttatgctaaatcagtactaaagacttcaagttcaagactatcgatatgagagcgagaggaaagtggaacaaaaacaacctaagagcgctttttgtgattaagaaaaaactagggtcgaatttattatgttaactaatatatacatattaatggggaagcaaattcttataatgttacattatctttctgaatgtaaaaaagtattttttttttaatttcattttagttatagttctcttggcctaatgaggggatataaaatttttggttgatgaaataatcttgtgatatacatacagaaagaagttcttcttatattcgaataatagtacaagtgagtaaccttgtatactatgtaaaaactccacttctattttaaccccattttatatctcactcaaaaatagagtaaaaacttaagaatagagaactatggtcttagcaatgacatgaatcttaaaagtatattgaatttattactgaaaacgtacaaaacaacacaaacataaaacagaaaatataaagcttatttggttcagatcatcataaattggagctaattcagtgaccagccagcaccataagcttcttccaagacggtctatccgaaatctcttcccaccaccggttaaaactaccccgagccttaaccatctggtttatatcggttatactcatcaagtaccccatcgccggcatgtgcgtcaaatcagccatagt

SEQ ID NO: 56451 - DNA, 1372 bp, Arabidopsis thaliana landsberg
cgatcaatacgtggtgacattaagatgatgtaaactctaaatacatgtagttagatcataagattctagcgcacaattaaaatggtcaagccaaaatttacagcccacatgcgatcttatcatctttacaacaatctagacaaacttctgcctgcgtgaacaatatactgatagacaggcggctgtgacagtacgccatatttgtacccaaattcattgtctttggttccaaatataattaataataatatgattagatatgacagaacaactgcattttacataaaataaagcctagaagacaaaattggcaaaaacaaaatacagaatcaacaccgtaaataaatagtgttaatttgggaaagtttagtcaaacatagcctgcgctatatatttaaaaacatgcgctagaaaccattaatattacaactatgcgctaataacaaaaaataggggtttgatttttttgttactatgataaataatacatgcaacatttatcttttatagaaaaaaaaaacactcaataaataaaaaccaacttatttatcgtacagttttccatttataatttttgcaaataaatttgatgttacccaacccatggacgtagggtttgggctgtttcgtttcacaaaatatggatctctagtggaactatgcatacatatggattaatgaatatatattccaatagattgattgttgattttaggagcatacttttcattcgatatcttagggcccttaaacacacgttcagtcattatgtgggaatgagtgttccgtggaatatagctatgaaggctctagagttggtttccaacatcgaccgaatctcaacttatgaaagtgataagacttatatgcttacttcaacttccactttgaaccatgttttttgcataaaaatatttgaatccggttctctatgtaggtcaaattagtcatgcaagaaagttagacatggttcacaatgttccctcgcacattcctttttttggactgtgtcgtgccaaagttaatagaggctaaagaaaaattccaaagatgtggtctcgtacattctatttttgagagaataaattattttagaatgtaaaaaaagaggaaattgttgctcaattaaaataaatttcaatgaaaacgagatttagtagttaatgtaaagaaaaaacaaacaaaaatttcataaaaattaatgatatgagttttgttacaaaaaaaagaggtcctaaaacactgtataaacatattattttttgcctaatttagcaaatattgtggccttttatttgtatattttttggtggctaggcaaatgactatttcttcttctatatgaagcacggcagtgactaaaaattagcga

SEQ ID NO: 56452 - DNA, 739 bp, Arabidopsis thaliana landsberg
aactttactatatagtgcggctcacagctattactgaagcaatttgtaatggttgttgaatctgatttcaaactaatgtaatgggtttgtgtttctaatacctcaggagagtaacaatttggagtacctaataccgaaaaagtcatcgctaaggcgtagactaccaatgggtgaccaaggcttcatagactttgtggcatacttgctccaagttgatccaaagaaacgcccgtctgcatttgaagctcttaagcatccttggttgacttatccctacgaacccatatctgcctgattctgtaggtgcaacaaaagcagaatggatgagagctagtcaaggaagaagatgatggtttgtttttcagacattgttttttgttgaaaagtctgctgagagtgaaatctttcagaccttgttgtatattaatttgatgtgtgactattgctcatttggtctcagcattttgtttcactggtagcttgtgaaatatagtcccttcttcgattttgcttttgccatatgctttgggtatttgattatatgattgtagccggtgatattttgcagctaattattcctttacgagagtgaacaatcctacaactactagtactaatgacaagccactctttctgaaatatattttgttataccatcaatataaatgaaatatcgagagagaattaaaaccttattaccgccaaatggtctaaatcaaaaccttattaccatataagt

SEQ ID NO: 56453 - DNA, 298 bp, Arabidopsis thaliana landsberg
  unsure (1)..(298): unsure at all n locations
aaagacgcccccatgctaaccttactatgatcaaattttacttataccgggtggnnnnnnnnnnnnnnnnnnnnnnnnnnnnnnnnnnnnnnnnnnnnnnnnnnnnnnnnnnnnnnnnnnnnnnnnnnnnnnnnnnnnnnnnnnnnnnnnnnnnnnnnnnnnnnnnnnnnnnnnnnnnnnnnnnnnnnnnnnnnnnnnnnnnncctcctaagtgtttctaatcggtcagaatctcatctggacttgaacgcagaaaagttaccggccgagttgtaccgacaggaatcgcaccgtccag

SEQ ID NO: 56454 - DNA, 1084 bp, Arabidopsis thaliana landsberg
  unsure (1)..(1084): unsure at all n locations
attaaagagtggaccaaaattccaaaattttccgccccattttaaggttcttaatgtaatggccgatccaagctgttttggattttttaatcctttaatcattttccccataactaaaccactaaggtttaaccattccttttccccacgcgccttactccaaatttaaagctatcaacgcatacaaatagtacaagacatgtctgggccagtgcttgggcccataataagaagatccaatcttcaagacagcttcatgtcgttagagcaaatctcactgttagtttagttttgagttaataatcaatcaacatctacctcaacaaacaaatcaaacctcttgttagcatcataacatgtatcttttcaagtaattaacaagagtaccaaagtctgtaacatcttaaattgcaacttatgtttgtaatcatttctaacatatctttgtttttttcgttaaagcaaactcagactgcggtgaaagacaaagaagatgataaggataaagaggttgcgacgaaatgaaagaaggatgtgataacatcgcaagcctttagcttaggcagtcccatgtcaaagaaggcagatgagaaacataccttgggttcctcttcttttccttatttaacatgagattgccaagctataaggcttgtgttgacactttttcatattctcgtgtgcaatctttgagttttatctacatccatattatcatctttgtctttcaccacagggcaggctaagtttaccataaccacaaaaaaccaaataaatgtaacatgatggaaacaacatttccaagaaccaaaatggaacataaacatcagctaaagtgacaattaaccatgctattctcaatcaacaaagactataccataattcttctattaagcaagtcatcaccatctttcatctatacgaggattgaacattctgtattgaacaaagaaaatgggataaagacttgtgcagcaacaagttgcaaaagagtgactgagagctaacaaaccaggcccagcaataggatttgataaggtataaagcctaagtggcggtcnaagacttcatctaaatgtgattg

SEQ ID NO: 56455 - DNA, 1485 bp, Arabidopsis thaliana landsberg
taccatataactaactactaatttttttttaattattcctattgatttttaaaaattcaggttgatgaaaaaggaaggaacttggcgtggaaagcaataggttacaatggacccagccctgatcatagtgatcatgaagtagaactaaacgaggagaagaagaagaagaaacctgaggagatctttggaccactttacaatggcatcgttgatctaaaaagccctagagaagccgtggaaaagaagctagccggtcgtgggttcgcagtttcaaatcaaaagaggaatacaaacggatcatctatctctgacccggtgatgaaaatccagtgtgatgctgtggtggttgggtctggatccggtggaggagtggcggcaggagtgttagccaaggctggttacaaagtgttggtgattgagtcagggaattactatgcaagaagcaaactttctttacttgaagggcaagctatggatgacatgtatttatccggtgggttattagcgacgtccgatacgaacgtagtgattcttgcggggtccacagtcggaggtggttctacaatcaattggtccgcctcgatcaagacaccagaacatgtgatgaaggaatgggcagaaaagtcaaaactcgaaatgttcggaagtgatttgtatcgagaggcaatggatgttgtctgtaagaggatgggtgttcaatgcggatttgtagaagaagggtttaataatgaggtattgagaaaaggttgtgaaaagttagggttaccagtgaagaatattccgaggaatgctccatccgatcattactgtgggttttgttgcttgggttgcaagaaaggtcaaaagcaggggacttcagagacttggcttgtagatttggtggaatctgataatggtttaatccttccaggttgtcaagcgacggaagtcatgtacgactgtgaacaggggaagaagaagaaggcaactggagttgcgtttgcgtttggggaagagatttatgtggtggagtctagagtgacagtagtggcttgcggtgcgcttagaacgccgcatctgttgaaacgtagcggtttgaagaatagtaacattgggagaaacctttgtctacatccggttgttatggcttggggatggtttccagaggaagataagtggccggaaaagaagaaaaagagctacgaggggggaataatgactgcgatgtctagcgttgtaattgaagaaacgcatagttcttatggtgaaatggttatccagacacctgctctacatccaggaatgttctcagggatcattccctggacatcaagcaaggatttcaaaacccgaatgctcaaattttcaagaaccgcacacatttttgcgcttctgagagataaaggaaccggaacaatagattccaagacctacattgactacaacttaaacgatgaagacgaagagagtctaaagaacggtcttgaaagagtcttgaagattctg

SEQ ID NO: 56456 - DNA, 1387 bp, Arabidopsis thaliana landsberg
tttattattgatctcgatcaagaaccgaaaccggactggggttatacttattcggcggcgactcactctcttttccgataaactcatcatcccgaatattctttgattctcctagaagcgcagtcttctccgacgacgacttactcttagatggagaaagaaaccaacgaactttcttggctccgttaacgtcatttcgattctcactcttcttcttcttcgcaactttcctcggctcatctttaaacttcttagcaactttctcgttctccttcttcttcggcgccggaggtggcaatggcggcttcttggaatcttccacaaccttctcgaaccttttagacctcgaaaaagacgatgatccgacaagttctctcttctcgtcaagcttgtcaagatacaacagcaagaaatcatgcttcttttgttggttattagagctccatctcgccgaggttgggactatctcacggaaagaaacggaagctttgactctccggcactgacgttgaccgtctttctcgtcttcattttcttcttcttcctcgtgaccttttaggatgtagtccatgaagttaaccgatttgctccttgtgacagccgaaccggaatcatcaaagtaccggaaccgttttgatcccggtgcgggatgatctagccccatgagtttggctacaacgttgggaggaggaggaggtggtggagggtgaagagagacgtcatcgttttgggtttcggtttcggttttgatctctttctttggctcttcgttttcttcgtaagagattagtagttggagtgtttcgtcagagtcgaggatgttgtcggaagggtgagtctgttggctaccagagcatagaagacggcggactaccgcgtgagcgagccggtcttagggttggctcgttgagtcatggtgatggctaataatgatgatggagatggtgatggtgatggtgctttaagtaggagtgtgtgtgaaaatgtgcaaacacgttcttggtatttataaggacaagaagacacacaatttctcattatttgcgaggacccaccaactaattaaattaaagcaaaactatatgggtaaacaaacgtatcgtgaaattttgatattttaagtgaaattgtagtttaataaacgtttattattcagtttatattaattggtaactcaatctaattaatcatattaagtcacttcagatattttaagatcttaccaaaattactatgttatgttattttatttttttgcagtgaataaaatatgttttcagttaatgatgtaaccattatatttcacttatttcttatcggtatgtataatagattaattattggtaacatagaaaggaaaaagtacccagcctccacttaaaagcta

SEQ ID NO: 56457 - DNA, 1010 bp, Arabidopsis thaliana landsberg
  unsure (1)..(1010): unsure at all n locations
ttatattgcttatttgcccaactaaaaaagattatgctgcttattgtccttagggagttaggacttgcattttgaaaataatgttctctttgtgtgcagataactgatgcagtggttgttgcacggattcttaatgctactttagttgtacccgagttggatcaccannnnnnnnnnnnnnnnnnnnngtaactttagcaagttttggcaagtgaccatcttcagttgccgtatcaattacttactgaaatgtatcatctaaatctgtttgtaacgcaaaacatttactgaaaaggttactttgttcgctgtgcagtgacttcagtgacatttttgatgttaactggttcatatcttctctcgccaaagatgtgactatagtaaagagagttcccgacagagtcatgcgtgcgatggagaaacctccttataccacacgtgtgcctcgaaagtctactcttgagtattatcttgaccaagtattgccaattctcacgaggagacatgtaagactatgtcacctaagaatcaaattgttttagttactttatcaaatagaatcataggtattactattcatctttagttttatcatcttatagctaattcatgtttgttgaaatcttgcaggttttacaattgacaaagtttgactacagactagcaaatgatctagatgaagacatgcaaaagttgcgctgcagggtcaactatcatgctttaagattcacaaagcggatacaatcagttgggatgaaagtggtcaagaggatgagaaagatggccaaacgttttattgctgtccacttgaggtttattaagtttctttaacaacccatattagattgtgttccctgatttttgcttaatagtctcaatcatgttataagcatgacatcttcatctccatgttatttatgtaaccatacttttacgaactgcagatttgagcctgacatgctagccttttctggttgtgactttggtgggggtgaaaaagagagagctga

SEQ ID NO: 56458 - DNA, 1077 bp, Arabidopsis thaliana landsberg
ttatgacggaaagacagttcatagttatactatataccaatttaattctctttattaatttataatagcattttatatagtataatattacattaattagaatttaaccgaatggtacacaatcaattttacagagacccctcaaatgaaaaactaaagacattgttttagaaatccaactttaattggagggttaagatatgcttaatccttaccaaattgcatatgataaataacgcgaatgtaaataacaagactgatatacaaaacataaatcagatttatcataacaacaaaaccatgctccacaactattatatatagatccatcgtttttagttcgcgtcgaattttgttgtgcttagtaataataatccatgttctggagccattgatgattcacgagcatttcctctgagttcgtgaagaacccatcatagcagtttcttccgtcggcattgttcaaaacactctcgtcgacgaaattggtcgtggccatagtcatctgattcacaaactccggtatgttgttaagttgtgatccgttttgattagagtatgaaaaattcttcatctgtgacccgagaaactcaatctcttcttgcaaagtcacaacctaaaaaaataaacccaccaagcaacgtgatcagactgcttgaaatggtctaaaatctcaacaagaataaaagaatatcgttcaaaactttaagagacctgttgatgaagagcgaagatgtgagcaacgcagccataaacaggatcacgcatgcgagagagagcctcgtaggagatggtgatagcagcgatgtttctttgatgttgaggcaaatgaagcaaatgttgagagacattacttgcgccggagactttgtgaaccgctgcgaaatgggaagaggcttgtatctagctgaagtaaggcgagaagacgcacactcgcatgcatttgctccttagaaacttgcatgctgcacaagatgatccatgacttgccatgtttacttttactctgttgtgcatgacgcacataccttgtgttagattgagacagatcacgttggttattataagccccaccac

SEQ ID NO: 56459 - DNA, 425 bp, Arabidopsis thaliana landsberg
  unsure (1)..(425): unsure at all n locations
cccccccccccnnnccccccccccccccccccccccccccccccccccccccccccccccccccccccccccccccccncccccccccccccccccccccccctccctgatccgtccgcccccccccacgccggccgccccccccccactcaccacccaccccncccccccccccccccccccccccccccccccccccccccccccccccccccccccccccctctccgtccccccctccccccccccccctccccctccccccccctcccccccccctccccccccccccgcgccccccccccccccccccaccccccccccctcccccccccccccccccccccccaccccccccccccctcaccccccccccccctcttcccccccgcccccccctccccccccccccccccccccccccc

SEQ ID NO: 56460 - DNA, 1260 bp, Arabidopsis thaliana landsberg
gatgatattttatatgtgaaaagcttccctgtaacctgcgctgagacaaccacgagagataatgtagacctttgaagtgtatatgtggaattttcaacacgttctccttcagataaggctatactccgtcgatttcacccaaaattctaatattggaccaaaaattatatatcgaacaacacatctttctcaagttagctaaactttaataccatgttaaaatctatggactttcaactcaagaattggtccatactataacttagttggtccatattatattatatatattaaatgttggtttatttttaacttgttcattcggttaagaatttttattggatatttgataataaactaaatttgtaaaaaaaaactgtttctttaagagatcattttaatcaaatactaaagatctttttttacttcagttcagaacaaagcgtttgatctaatccattttaaacatccccgacagtgataattactaaagatcataaatgcaaattataacattctattgatgataaaggaaagaaaaaccccacaagaaatgtaagaaaaaatggcactaatatatcagccagatattatatatagaaaagtctcaatccaaagctcccacatagtcttcttcatcactatcatcatcatcatcatcctcatgaacaatgatgtctcatccaccatttttttttcctttcttcaaaaacctttcttaggtaattaataattttttagaaaaaaaaaagaagagaaaacactaagaaaaaaagcagacacaaaagtcataaaacacaacggcacaccattgttcccttttaattgggtaatggcatttgtaattattagctggagagtgatttgtccaaagtagtcaaacattgtccgttgactgatggagtagtggtgttgtgatggacgacttgatggagttgcgagaaacaggtgcacgttcaataccatgctccgcggaggactggatcgctgccttctcaagcgctgcaaatttcctctcttcgctcttaccgtacaatacgaagtaaagtcccgctatgatcaagaccgctccaataatcctgccattagaaatatgacatgtggcacaacaaattttaaaattattcttgtttaggaccttggattttatcaagtatttatataaaccactaatattattatagtttcatacccgcccaaataaaattcttcgcctaacgcaatagaagccatgatcgcaacgacaagagtctgaacagg

SEQ ID NO: 56461 - DNA, 372 bp, Arabidopsis thaliana landsberg
  unsure (1)..(372): unsure at all n locations
cccccccccccccnccccccccccccccccccntccccccccccccccccccntccccccccccccccccncccccctccccccccccccccccccccccccnccccccccccccccctccctcgttgtttcccccccccccccccccatctatcaccccccccccccccccccccccccccccccccccccccccccccccccccccccccgcccctccccccccccccccccccctccccccccccccccccccccgcccccccccccccccccccccccccccccccccccccccccccccccccccccctcccccctccccccccccccccctccccccccccccccccccccccccccccccccccc

SEQ ID NO: 56462 - DNA, 483 bp, Arabidopsis thaliana landsberg
tttgattgtttcgcaagctgtcgctggtgcggggcgctctggcgtggtcacgcagtgcctgggcgccatgtgcggcgccggcctcgtcaaggccttccacggcgcccactggtaccttcgctacggcggcggagccaacgagctcgccgccggctactccaagggagccggtctgggcgccgagatcgtgggcaccttcgtcctcgtctacaccgtgttctcggacaccgaccccaatcgcaaggtcagggattcccacgtcccggtcctggcgccgctgcccatccgattcgcggtgttcatggtgcacctggccaccatccccgtcaccggcacgggcatcaacccggcaaggagcctggggccggcccgtgtgtacaaccagcgaaaggcgtgggacgatcactggatattctgggtcggaccactcatcggagccgtcgtcgacatgctttaccaccagatggttctgcgcgccggcgc

SEQ ID NO: 56463 - DNA, 136 bp, Arabidopsis thaliana landsberg
  unsure (1)..(136): unsure at all n locations
ccccccccccccctccccccnnccccccccctccccccctcccccccnctcccccctcccccccccccccccncccccccccccccccccnccccctcccccccccccccccccccccccnncccccccccccccc

SEQ ID NO: 56464 - DNA, 1033 bp, Arabidopsis thaliana landsberg
agttaaattatcaactaaaaaactaaaattaaagaaatagtctataaagattccccgggtttggtttggacatgggaaatggtctaaaaccggaaatgaaaattcaaaaatcaaaaactatcatcaaaacgacaaaggagtacgctttgtcgtgctgcgttttggaataaccttttgttcccttgtctctctctctttcttgctcagactcactgcccaaagccacaacacacattacccacttttctcttccctctctcacacactgtttcctcttggaatctgcaaaatacctaaaaagaaaaagaaaacttaggttttgcttctctacccacattttctttaaacaaaaattgaatcttttcttcaacctcaaacccttctcgcagcgtaagtagctcctttaattcctctgaatttggttctgatgattatattctcatgaaaacttttagttactctgtctcctgaaagttgcattagcttttcctggaaaatgtagtttcttttttgagataaagttgtgattttttccacccttttcgttgcctcttttgcatattctgcttcttcttcacatgttaagtttcagaaagctctggtcttttaggttcccttctcatttagcttaaatcataagtaaaattactaactttttactccatgtaaatgttgaaataactaggaacttgaccttttgctctgaagaaattggaccttgaaatataaaaatgtctcctttttgttcttctttttttgtttgtaattattatttcagcttttagtttacttttaaagtagaatattgggatagttcttcatatgtggtttgattaaaaaaaggaactctttttttttctttgtttttagtaacttttaaggttaaatgttgaggcttttctttgctgcactgtgattgtttgctcatgcttgctttaattaacatgatcattgcactcaagtgattttactaattagatactcctttttcctggaaaactttatccatgaaaccaaatagatttctgattcc

SEQ ID NO: 56465 - DNA, 377 bp, Arabidopsis thaliana landsberg
tttgattcttatccagactgaatgaatgtcacggagtggacggctggaaaggatataactgaactaatggatgcatgaacatataggagaacctacacacgtaggactactggtgaaaagataactatcggaccatatatatacaaaaactgatcgctacacttttatgatctcgtgacaactaacagctctgacgcattactggccggatactagtgaaagtatgaccatcatcgacattaggtatgtcattagggcccccacactcgtgaacactgcactgtgacgctagccgtatgacaacctagacgagtatatattaatctcaatagcgcacatgcatgtgttgaacgaaaagatgattctgttatgatcag

SEQ ID NO: 56466 - DNA, 815 bp, Arabidopsis thaliana landsberg
gagtgaaatactgttgtttgccttttcattctctcgaaatgatttaaagtaaaaatgtttctcgctttttcgccaaccagcttgtaccatctgctatccttgcgttgattattaacccgagtacgagttattcttacttccaccgtatcttgtgggcgttttgcgtctacacagaatctgtctctgttctacctcaacttcgattaatgcaaaatgctcaggtcagacacttttgacatatctatgtatctttagattttttttttctgtcaatgtagagactagagttagcattttaacaaactatgatatgatctagtgtttgatcagtattcgtcatgttggtctcgcggatgagtatcatccagtacaattataaattggtcaatgtagacatatttatagtggcaagaaaatttggttttcttaggtccaaaacttaggccaatgtagacaatctaaatgtaattagagattctggttgtcaacaagtctcgtgattagtctagacttaacaatttctcgaacaaccatttcagatcatagagcctttcacagctcattatgtgtttgcactcggaatagctagattcttggcatgcgctcattggattatccaggtaaatatcctttcttaatccatcaattaagcattcatgattaagctcaagagactaaatggtctgaaaatataggtcgttgtgactcgtggacattacctatggctactacgggctggttacttctggttcccggtggctctactagccgagatcgttcaaacttttatcctcgccgacttttgctactactat

SEQ ID NO: 56467 - DNA, 369 bp, Arabidopsis thaliana landsberg
cggccggatactgaacttatcattagttttgttagaatgggagtatgattaggccattcattacagtttatgattaggggcatgcgtatcccttgagctttggagtaagaaaatggggaaatggtatagatgtgaatgaagtataatttttccttcggtatcatatcaccatcatttgtccgtccattctagcccaatctctggcaggcgtctaatgttacgaccttacgtttgcatttttggctgctggctcttaaaagcgtgtgcagtaagacttaagaggacaaacgaccatcgtctgctgtaagctcataaacactttcggaccaatacgtcggtacaaatacttcattgagaaattttgagata

SEQ ID NO: 56468 - DNA, 970 bp, Arabidopsis thaliana landsberg
cccaactatatatatagttcttctttctgtgtgaaatccaaactaaaccatacttcaaacatcacaatttggtaaactggcaatcgcttcctcaacatcttagggtttcaattgtccttcttgttggaaagttatcttaccaacacttaggtcccctcattgtctctggcaacgctggcttgcgtctagcacttgatccatccgtttcgtgggagacatccctggccctcattgaagcgcattctcaattagtctccagtggttcacccatttacttgttctgttacgatgtgtaaaggctggtaatccggttgcttgctacttagagagcattaggctggcttcatttgaaaggttaatcaaagaagcaatggacatgatcgcctatatacccgatccgtcccccaaaatactttttacgaagggtctctaccatattgcggttaatagaccaaatgatgccattaccgccatgaatctatttaaactcaatgttgtctcttgccgcaacgccgattgtgtggctatgagtgttatgtccaatatcaatataattgcgccacactaacttggcttgaactggataagttggccgtgttacatgattgatccccctcgtcgatactcagaatataagaaatgcaattattgcaacccctgtcctctttgtattgattggtgggtgctgtgattatcttccagcgctttcagtcttcacgtttactttgcttccagcacttttaatgcatctttctgcgtttttactcttccactgtctaatataataattattgttctatatgtagcaattacaatcaactagttggtagtcaacatcataagttaacattacaaaaagcaatcgttcgactgaattacatccccttcccgaaagacaccccgatctgtattaaaatctggagccaaaccaaaaacttatgtggccaaaaacgtcttactaacatcaaac

SEQ ID NO: 56469 - DNA, 1383 bp, Arabidopsis thaliana landsberg
gatctagagtggatctggttttggacccaccatgcttcatgatctgctagaaccatgtgcttgtgcctatcaagataggaacaatggcatctgatttgttttccaaagttgggaaaacgaaacaggttttttcaagtagtcacaggcaacccgtagttctgaaatgttcttatctgtccatcccaaccacctgtgactatgaccataccccaagatagagagctggatgctctctggtaagaggacttgagaaacttgtaatgagatgcattcatcgcggatgtggacagaggatttgcgggtaggttttcctctggccatgtcgcactccctttggatattgatccggggacaaatccttcgttgtgagataagcatgatggagaagaaaacgggagagttgtgttgtgatctgagaatccacaccatgttgctgcaactgatgcattggcggagaaacgttcaaaagatcgaatctttttggtttctgattcctcatcattgctccatatatatacattggagtcctcacaagctgaaacaatgtgttttccatcagatgtgagagatgctgatgtgaggcttctcgtcttgcaaacgcctaaagattgaaaaaacagagatgggattagtttagaatcaataatagagctatgcaaaagaaaatgaaagttgaaggagacataaaaagaaacatacctttgtattttctgacgacattgttgccttggagaattctgactttggaatccgcggaaacaaccaggactttagtcggttcttgtggtaagaactggaaaaagcaagtacgatttgttaacatctcacaaatttcaagagaagtaaacgaagtatctagagaaagggaaagacataggagacattacctgaaaaccagttatgcgtttatttgaagacttctttttgttatgcaaatgtatctgagagtccagttctaaaaattctccagacatgttaaagaatctgcaactcccgttcagagaaccgatgattccaccttgtccatccggacgataacacactgccgatataatgtctttgagatctgcccaatcaacaacgctgcaaccggaaatgttccaaattcgaacctttccatcaattgaaccactcatgaaataattttcatttaccgggttgaactgaacagaggtttactgcaaaaagaaagttgcaggcaacaggtaatgtaagatcaatgtattaactgaaaaagaaaaagagatctataaacccactaagaagaagaagccttccataactattgtgagccaaaactccaagacaatcattgctaccaactttcccaaggcggaacagttttattcttgacgccgaaggcaaatcctacaccaagaaatt

SEQ ID NO: 56470 - DNA, 647 bp, Arabidopsis thaliana landsberg
cgaaaaagagagagaaagcagaaatatcttcaacataacggaatgattgaggacacgtgtcgtcaccaaccaccttgccagcgttattaaagcattcccgaccactggacggtgaccgtgaaagacaaccgcgacgtttctaaccgcgaacgactcacggaacctttgacacctgtccaacagtccccacatttagtagttttagtacttttgtatgtgtgagcccgcccaaaatagtaaccatcacgtgaccaacgaggctgacacgtggatggcattttcctttgtataaacattgagcagcccagccatggggccttaattatgggaacatagacaaacaagtgtgaacggacgtgtagtgcttatgcaccttgtaacgtaattaggccggtgacgatttcgtttgtctctcattaattattattctatttgtaacagcagcaacaaaaaatctctatgacgattgtcttctagtttactaggtcttttaataagcatcacattattataatcaaatccggtatttcacaaaatgaagtttatatgttaaccacggcatttttagatttttttttaagctggatattgttagattgcaagtttttaatgaatgattgcggaaaattcaccaatgcaatgaatgc

SEQ ID NO: 56471 - DNA, 1151 bp, Arabidopsis thaliana landsberg
agaaactagtggaaaaatataatgattagtttcggtttatctatttattttaaaaagtaattgattgtatttagtaattgaagcaaaaaaagttgaggaactgaagatgcttctagttttattccattagggaaagggacaaatctagtggggtactacaagttgccaacttggttaataaataaaagtcagaaaattaattttgggtttattttattggaggataaaaaaaataaaaaagtgaaatcaaaggctccagactttaatgatggtgaaccaacaaaaatattttttctgcccaattactctgatttgtaacttttggcaaagaacatagtaaaattaatatttttgcgccaaatgatgtctacggatcagagcaacatgtccttctcgcaattatatctcaggttctggagtaataactaataagcctgcacaatgaagaaaaacgatcaagacacttggtgtttacctcatattatatcttacttactgttaggatagtcgaagcttgtgatgttatatcttataattgagcatgctcgattcatcttcccgtcaactgttgagatttgaatatatcttcttcgagtagtcaatgtctcatatcgtatgcacttgctacttgaaagtcattcaaaagaatgattatgcctcttacgaagttagcaactagcaactttggtacaaggtataacaaattaacacattttatgaagaattaggttcaacaaatttgaagaatttcacacaattttagacacatatgacacattttgtcaaatgcgttttacgtgacattttgtactatgccaaacatgaaaaccatcatgatgagagactacacttgtatcatttacccacatgttaagttgaatcaccaatacttgtagaacgaaattgatccataacaacatttcattgcttggatttataatgaaaccacaatcgtgacatgacacaaaattcacaaaacataaaaaacaaaaaaaaaaaatcacgaaaatgggaatttgtaacaaatagcaattcatatattaaaaaattgagattatgatttgatgcaaacaaaaataaatataatacattgtaaacatgtagtttgtcattttggtataggtctagccagactcgcatacttttcaaac

SEQ ID NO: 56472 - DNA, 1453 bp, Arabidopsis thaliana landsberg
  unsure (1)..(1453): unsure at all n locations
gatctaatgtctggctatgactggttatctgctttcactttttttgatactcatactctcttgagctatctaggtgaaataattaaatgttccatgaaactataacaagctgttattctattggttcttttagcttttgcattatccctgttaaaaaccatccatttttgcattgtcacgaaatcatgatctaatgtctctgtaaccctgtctcctatcacctattttgaaactctcttaaactaatctatttataacactccaagaaaccataaaagctgttagtctagtggttctactaaagaaacgtgaatatgtttactaagtagaaagatggtaagagcaaagtgaaagtatcacacctcacctggttggtacaaattgacaatgagctggtcgaacagaggttctctccagagtaaatcagcagacaagaccggaagatcaacagattccagtgtctcgcgtatgagatcagatagttctgttgcccatgaagggagatcaccaaatctcatcgcctaaaaccccggacaaaagaaaaaagacagaagctttagtttatttcgtatcatctcaaacttaacaccaagcaagatgacacctaataaccatgaatctgggttattcatgcaagtatttgttaccaaatttaataagaaaacaatagaaatgaacagaatcgagtctcacttcaagaggaaacaaaagccgcctaggaaacgatgatgttcactcattcatacaccaatctaagaattttggatctatctcttattaatgcaatcgaataattaccacagaaacaaccaaacaaggtttgagagtttgaaatccagtagtttataacagttggggccaagaagagaaaagaaaagatatctaagcaaaggataagctaaaagatttctaaagcattgcctccacatctttgggaagaagagaaacgaaattttgagagttctagtacctggttaatagattcttcaacgaaccaaccttctgcagaaatttttaaatgaacaaactttagtgaaacaattcgataaagcaccaacatttaagaattagaaaccaacgaagagcaaagggtaccgtttagaatggcggagagtaaatcagactgatgagcaatagagagaaagtttctatagagccataaaccatttatctcctccactctctcccataccgccgaatctccgatccctatggtttcttttcccggccgatcnnnnnnnnnnnnnnnnnnnnnnnnnnnnnnaaaagctgctctcaaattctctgcttcttcgtccattattttatttttttgggcttcttctctatttctttgacgacctacttatcaatgaaaatcacgaaactttcatataaataaccccaagacttttacaattaattccataaaatcaaatcaaattggcaagaacgtaattaaacaaccggatcc

SEQ ID NO: 56473 - DNA, 636 bp, Arabidopsis thaliana landsberg
ttcaattttacacttttaagtacgcttcaataacaaaaaatcaaaaacgaaaaagtaatattttgtctcattaatagttttcatattacaaattgttttaatttaggagtcaacttactcacacacaattttacataaatcattggattcatacatttttagtattctttaggttataaagaaagataaattggtttttgcgataacatttataattttttctttaatgtattttaaccccaatgtgacaccaacatccatgtatatatattattaaatttcatcattagtaaaagtttttaactgatatgattatagattgatattgttctttaaaacagggtctcaaatttagtaataaaatattcgatacttgtcgtgatttgccaatgtaacaagtcatagtttacttatggaacgacggttgctgtattaacgaataatataagttttgtgatataagctaagtgatattggacacggaactaacagttccaagttccaacaattatttttctttaatcgttattggaagagatataagaaataagcaacgagctagctacgtacagtctagagatatatataaaaaaaattaatattcaaaatgtaattagattaaatgaaattacataa

SEQ ID NO: 56474 - DNA, 1165 bp, Arabidopsis thaliana landsberg
attgccatttcgattttctttagtctttcccacatttcttcttcatgcttcaaacaatttatttgagctttaagaaaatataactaccattcaacttggatacaggcagcaacagttgtaccgacatgccccgtattctgcacttaaagtttcactacgttagtttacaatagtgaagaacttctgcaacaaagtagggaaaatcaacccatataacttcgaactgtcaatctctggatctcagaaaacaaatcattacatttccaaaggaacattggtaaaccagcatcacctcatttttcagctaaagaagaagaccaaaaggttcaaagaccctccctggtttcctacacgattaacggaaaacggcatgcaagaaacacaataaaaatcacattactagccacataaaatcaaactgtggcgttcacttctaataaatcaacattagttgaagataataaaagacctttttaatctaaagaaattttaacttctttcatcaaacaagtcatccaagttgaaaagtaggataagtttttgcagtcgatacactacattgcagcatcactgaagtttggcaaacattcattcaaccttgctaaaaggttccctaagcccataccatcactgatcacaacgattcttttttcttagcggatatatggtaaagctaaattgagatgcatcctaacaaaaaatttagaacttcatgacacagttcgaccataacaaatcgatgcaatgtaaagattcttgccccatttttcctgcagaaaaaataaaatagatatattacaccccaagaagttggaaagccaaataataatggataaaggaataagagaccagcaagcaaaccttgacatgattactaggaaaagcagaggttctaagagtctcctgtgtctcatcggtaagcttccttcttggcacactaagaacaaaggcagcctgatcccaagttgcagcaactgatgtaattctgtagccattttcccatcgacgatgtataccttcactagggtatagaaaatctagttctataacctgaatcacaacaaaaaaaaaaaacatattatcaatgatgtaaaacaatgtgattcatgcttctctttaagtctagacccaaacaatatatggacttcacagaccagatcagaaa

SEQ ID NO: 56475 - DNA, 299 bp, Arabidopsis thaliana landsberg
ttattctttattattaattaaggtggacgatgggggatttgcggttaagataggataaaggaatattccattgctagcgaacaatgtgcatgttttgaccgattaaatgatcggtctaagtttgaaggacatagactatgaaacgcgctgcaagagctgcttacaactagagcgcggttagaaagactcccgctgtgtgataggatagggactattgatttaagcgttttacaggcgcttctatgatgaatctcaaaacagtatcaggctaagccgataaaagggtctaactaaaatac

SEQ ID NO: 56476 - DNA, 1464 bp, Arabidopsis thaliana landsberg
agtaaacttcctgtgtaatttcggaaatatttacaaattcaggtttttctaatgtatttcatacaacgagtgtaaatgtattattttgacaaatttgcgtatcttctagttgggttgacaatttaatatacttttaggtcaattttgcatagtatagatatggataagaaagtctatctatatacacacgcacatctacgtattataacaactgtacatcacattcacactatatacagaacattcatctaaaacaaccgtatttattgtatccacacgttttactatgggtgtgtggtccttttaattatcagttactataaattataaacaaaattccactagctaatcaatatgaaattacatttgagtttagaatagtcaataggaaatgatttaaccaaaataaaataactaattcaatttaaatcactgtttttttttgtatccatcaacaatcatatgaaccatttgactacattctctggtcaatttgaattggtatttactactactaatagatactcttataccaatttagataaataaacttaatcctgagtacggactaaaggacaatttgtacagtgagttaaaaatagaaaatttacctaacaatactttttaaatcagtcaaacattttttgactttaataagaaataatatttaatattggccttgtaaaacaagactactctcacaacagtcaacacacacagctaagcatacgcgtcagcttccggtttaaacaaaaaaaaacacaaaccgtaatttggtttccgtttcttcctcttgtaacgaccggttaaataaaatgctgacgtcaccatcttcttctatatatatcctacctggaaccaactctgtatatacgcgtcctcctctctcttcttcctcttgctatcaataaatctctctttctctctacaaacaaaataacgagaacttcaaaaatcaaatgggtctttgtgtatctgttaatcgaaacgagtacgtttcttcgtcgacgacggctaaaatcgtaacaattaacggcgatctccgtgaatacgatgtaccggtgttagcatctcaggttctggaatctgaatcgacgtcttcttcttcatcatcatcatcttcttcttattttctatgtaattccgattctctctactacgacgattttatcccagcgattgaatctgatgagattcttcaagcgaatcagatctatttcgtccttcccatctctaaacgacaataccgtctctctgcctcggatatggcggctctcgctgtaaaagccagcgtcgcgattgagaaagcagcggggaagaaaaatcgccgtcgtagaagcggaagaatctctccggttgtgacgttgaatcaggctaacgataatcggatcgccgccgtgaacaacagaattggaggcgacagacgaatatgatgatgcaaaaaggacagttccgaatagacga

SEQ ID NO: 56477 - DNA, 1327 bp, Arabidopsis thaliana landsberg
actatccacttcctctgtcatctgatgctctttcagacagtgtggcaccataagattatcagacacacgggttaccacggacctgcattacacaaaatgggatccgcttcaacagcgcaccctgaatgtaacggttgagaatttccgcgatatggtccaaagcgggctccattcgcaagggagtttcgagaggatgatcttgtactcgataagattgacattgagctactaggtcaaaccgatactggattggagttgaagacttcggatgttgttaaaccaacggttagttggaagaggcttgagaagctcatggttaggcttcttgatcatgagaatttcagggctaagcaatgtaaataagtttatgtgttgcctaactcttgattattgattttattcttccaatcattaatttttcatgaaaagagtatttggcctttgaatatctttgttctcgttcgtctaaagagttctacataaagcactatgttttgttccaaactgtcataatttgtttatcctaatgtaaagtgttctacaaataatcaaaaagttagaaatgatactcgtatcctaatgttttgtattccaaatgtatccaaaactgatcaaaactatcgaaatctaaagtaaaaagtaaaaatcaaaccaccatcgataatcgaatgaccaaatatttaaatctgcaaatagttttgtttgccgtcttttgtttactagattgatgaaatctatcgaaatgtgtggagaatgtttgcgtggtaggtaaaaacttacaaaagaaacctcggaaaatggacccaaaggcccaaacctcaacgagctagagagagtcacgcggttcgagggagcgtgaggatcaatcacatctacgagaagatattgccatgcagagcaaaaaagcagagacagagagagggaacatgatggaccggtcgcgatgcttcggctgtcgtccaacgaccaaagcaccaatttttacccactttttcctattttcaaatatcttcttcttcttttgctttcaaattattataaatcattatatgatcaacgatcctattataatcattatgctaacacatcggaattcggtctacataacacctttgtctcctaaattcactccatatattctactcggatcaatctacacagaaatcaactatgtaatcactgttaaccagataaaatttgattgtgtaagttgaatccacttatacaatgacacattgtggtcatcattttaagggacaagggttactttacattaagacttcatcgaattcgattacgtcgttatctttgaacaaacaataatatg

SEQ ID NO: 56478 - DNA, 569 bp, Arabidopsis thaliana landsberg
aaagcctatgccaaaacaacaatgaaacgaaatcaaaaccaagtaacttttgagagatgggaaaaattgattggcttttgcgtgaacaaaatataagaaattcaaatgactgctggcacctattatactattgcttgtatctaatagctcagattctgtagtctacaatctggaccacaccaatctcaatatgttcacggatgtattacctaaatgtgtaatgcagaaagatgagcggctattccaccactaaaacattgatctccatcaatccttctcctgaagtaggaaactcgggtgagatctgccattctccatgcactaagaacttcatctcgtacctaaatttcacaagaggttgataaaacgaataattcaaaacattaaaagttgacggtgaatgcacaagaataagagttgaagaaatagtaccgcccgtgacgaaagaataacgtggtggagaatttggtgaacaaagctgagtactcatgcgatagatcctcacgttggttccatgcatcacatgatgccattactttgacactcttatgtgaagattattaataaag

SEQ ID NO: 56479 - DNA, 578 bp, Arabidopsis thaliana landsberg
gttcgatcaatctggaaagggaagagacaacgatcaggtggcggtggcggtggagaagaggacgaggtttaggatgttgctgagcctaagaagaaggaagatttatgtgaggaatgcgatttctgcaggatcgatgatgatgatgaagacgaacaaaaggagaagacagtgcttgagttctcggagatgttaagcaaaattcctgatgaagatgctcacatgtttgccaaattgtcgtttctggggaatttggcttattcaatccctaaaatcaaggtgacgagattgcgtgagattataataaaagtctcaattctgtgtttctgtatctgatccttattagttttgacatttgttgcagcctgagaatctgttgaaatatcagaaactgagattcgttacattctcaattgagaagaggatgagtcttaaggttgaagagaacaacaatggcgaggaagatgaggagaagaagaagctaatcaaccctgctgttgcttacagaatcgctgcttctgcagcctctcgtttctttcccattctaagactgtgcttcctttcggatcatctaaacgtca

SEQ ID NO: 56480 - DNA, 262 bp, Arabidopsis thaliana landsberg
ctttttttttatttttaggagcatgccttgataccgaagtaaatacgcacaatttgaaaatctaactgcgttatatgtacccaaatagggggggtacgacccaaatctactaagccaagcggacataatacatatagtgtattctgaggaaccgtatgaccgtactcatgggggcgactttgtatgtgggatgacactgtccaggagactgacttgggcggctcactcgtattttatactatgcaaactgcttctgcttctg

SEQ ID NO: 56481 - DNA, 513 bp, Arabidopsis thaliana landsberg
  unsure (1)..(513): unsure at all n locations
gggatgatcggaatgaggacggcatcacactcgtgatagacctcgatagcccgttgatgaacgtagccgccgacgtcatagatacggatatccgcttcaggtgcgtcggccaggcgggcgcgaaacctgtcgccaggtgcgactcgcagatgcagcaacgtgccgtccgtcgggagcagcccgcgcttcattgagacattgtaccagcgtgtcgatgactcctgctcgtcgcaatcaatcaggagcgttcgatgtccctgctgcgcgaactcggctgcgagattgacgttcagggttgacttgccggcaccgcccttgaacgtcgaaatcgccagggaaagggggtttaactgccataagcttcttcaccatcttgtgtcgactattactgatgggcgaaggggagttgcatgtgctgcgaacgattgcagagatcgccgncacgctctggacgaaccagctcttctctcgtcatgccgaagttgggctcgtagctcgcgcttgccgcgagcg

SEQ ID NO: 56482 - DNA, 494 bp, Arabidopsis thaliana landsberg
  unsure (1)..(494): unsure at all n locations
ttatattctcgattgcacaaacaatggttctaggggtgttgtgggttttcgattttcatatcaatatttaagattttcatatattatcaggcagccattgtagcggctcaccaagataacatggtggtggcgtcagcggaggaatatagaacatagagtaggctgtagaccccggcnnnnnnnnnnnnnnnnnnnnnnnnnnnnnnnnnttgtcctggctggcaccgcacacgacacgatagcgccgaagtcgaacatcctcttgttcacccgtcctcctcaagctgcaacaacaatagtggcgtttccacggtttctggacatgcagggatgaaacaccgtgatatcagggttttaccacttagtgcctgtttcattttcgttcaaatccatgtagattgacggggaatacattcactactagttaaaatccatctttgagcttgttccgttcaccggtaatctacatatattagatggtattgaatcgtttt

SEQ ID NO: 56483 - DNA, 535 bp, Arabidopsis thaliana landsberg
  unsure (1)..(535): unsure at all n locations
atttcgacgaaacatttatgtcgagcaggctttggtttaccctgtctcgcatacaaccatatcatggcgtgcactcgagacactaccgattaacttaacgcaattaccaccacaatgcacttcgatatacacgttcgacatcacagtgcttcgacagaccccacacttccaatctacttgtcacatccaacacaccacgtgaccactgcattcttataaccaattttagcgcaattatttatgacaacacttagcgactagacgagtgaaacaccaactgattattcgtaccttcccctttgaaacactaatcatatatgacataatttatattttcaacccactctaacctacaccatgatgaaaacataaaatatatttacatagactaactcattagccgactgcggaaaccaccacatgctntacgctttattagatttaccacgactaacacactgctttatgacgaagtattttaacatacgattaataccatccacgaaccatccttgtgacacataaatgaatcatc

SEQ ID NO: 56484 - DNA, 1247 bp, Arabidopsis thaliana landsberg
ctgcaaaacatcgaaattgattttttcggtgtgaaagctataagctagattattagctcaattcaccaagtcaatattcgagatataaaaaaatggcacaaaactatagacgtttttcattgcgtctttagctattgtttaatacttttcgtgttgcttcttgatatgatttaacaactttcgattattaaactctataatatatggtgagagatgcaaaatgttacatctgctcccttctttaacgtcgtgcaacctaactcttaaacattctcgattttttgcttacagcttaaatgatttatttgtatctacttattaatttacttcctcacgtctctgtttgcggcaactatgatggtacgctacgtcgacatctagtactagcctagtactcaaaagatcagattttgtaaaacgtcaccatgtattattgggttattttatcctggtgtccgtgaaaaataaagtgcatagtaaattaccactctgaattcgatcagaagatattacacgattacatctatcacaaataaatcatattatttctgaaaaagattcatagtgaagatatgggtaaatttaatgttccttgtcagcccttcttgccaaattataatcgtattatattggttctttgagcagtccaagaaaataatagagctagagatgaataaaatataacattaccggtagagatctgaggatgacatcatcaggataaaatgtcaactacacacacttattgccttgaattgttgaccctatcttcgtttttcactttcgtcgatagatttttctatttactcgtttaattaaatatcttgttgatcatttctttctgacgagttatgaatttttgctctgtacatagacattttttcttctacttatgcaacaccacccaaaacaaaagattctaaattttctaccaaaaatatctgaaagtatcttagcaagaaaatttcagaataccaaaattgacctctgtagtttcaaccaagatactaataaaaaaactaagcattatcattgtttttggtaaaaaatttaaaagatgtacaaaaaaagaagaagctgaaaaagcaacgaatcaaaaacgaaaaagacagagagaagaaaagtgtgaaaaaacattataaaggagagggctttcgattatataataaacactaccaaaattagcaaacaaaaaacattcactcgttaactcttctcctccatccaatttcactttctctcactca

SEQ ID NO: 56485 - DNA, 117 bp, Arabidopsis thaliana landsberg
  unsure (1)..(117): unsure at all n locations
cccccccccccccccccccccgccccccccccccactctctccccccccccccctcccttcccccccncccccccccccccccttttcccnccccccccccccctctttttcccccc

SEQ ID NO: 56486 - DNA, 780 bp, Arabidopsis thaliana landsberg
gctattataacttaattaaaaactccattgaaaaaagaaaaacaataataaaaagaagaccaattttcaatttgttttcggcgacattacaatccaaaagacattcttgtgtgttgtgtttctttatttttagtattaaaaaaaaccagatttaatcgggacacgaacaaaagagaaaagaaaaatcaaaatttttgacctttatgaaccctaattttgggttggtcactctctctctctctttcctttcccaaaattggattcaaagttctttctttttgtcttcctcgtacatcacagcatcaagggttttcgacattaccagctattatgcttgaattcgtgagttttttaaaggtttcttctggggttgtttgtttgttgtctgaagaatttctctgtttccttctcgactttcgttataaagttgaaatctttgatgtattagaggtcttctttctagattctgggttttataaataggtatatttatgttgcattcgttctttgaattggagaaaatataaataaagttcgaagctttttctcgtttagcttgttccagaaattagaggatttacgaaatatgattttaaggtatcactggttgtttggtgttttcaaaaggcttaggtgatttggtgatgttagggttttagctattttatgttagcatttgtgggtaacaaaatttgtttatgtttctttgcagttttgttgttatgttaatcgtatttggcattattatcttgtgcatatgttaggaggactcaaggagtt

SEQ ID NO: 56487 - DNA, 322 bp, Arabidopsis thaliana landsberg
aaacccatatacatcccgagattgggactcaagattctagcacgaggcgaatgtctcgttgtgaacctagttacaagctgtatgaggctagtcctcaacaggctattatatagctaatacatctttagctggcacatgaggctcaagacacaacctccaagtcacatatttgaggatctcgacctacgttcacgacatatgtaggagtccgaactaagcatccttattatgggacggcccccatatactaccaaaacattcgttacatatacctttctagttcgtcgttgcgcaagtttttgtgcccctaagattagtgcac

SEQ ID NO: 56488 - DNA, 547 bp, Arabidopsis thaliana landsberg
caactcggtggcggcgtagtagatcccggccccttccagccgctcccagttgggcagcggcaaacggcggtaccgcgcaccacttgcggccaccactgccagcgcggaaaccgaggttccgtccgccaggctcatcgtaaagctcccgcccgcggccacggccaggctgtcaacgctgcacgggctggccagcagcgcgccgaaacgctgcgcctggatagtggcacgggtggtcagctccgcacctgatatcccgtcagggaacccgaggtagttctcgatgcgtgaactcgacccggcctggccgcccggcgctgtggcgtccaggacagcaacgtcgagaccttccgaggcgccgtataccgctgccgccagtcccgcgggcccggcgccgacgaccaccacatcgtggcatcgtccgtggtccgggtagcggccaagacccagcacggccgccagctcagtcgggtacgtattcatcagcacgcgggtgggcgtgatcaccactggcaagtcatccctggtcgcgccgacggcgacaaggatg

SEQ ID NO: 56489 - DNA, 575 bp, Arabidopsis thaliana landsberg
ctggatttttttttttcttctcagttattcttaaatgttcatttgtgtccgtgtattgtttgatggcaagttctagaaactgtacaaatcagcatctggaacaatcataaaccaccactttaggcacatcgttaaacctggaattcagctcaatatgtttgtttcaaaggaaacgatagggacctgcttcttgtacgttagggagtcttcaatagaactctgagaacaaggaaagagataaactctcttttattaaaactcaaaactgaatgacaaagcatcaaagctaatggaggaaaatccaaaaaaaaatgcaaatgtaaaaacaaaaaaaatccaaatttaaaataaaaccaaaaccaattttaaattaaacaccaaacggtccaaaaccagcaagtagccgtttgctttaagcgcctgtttcttgaagatgttgctgtatctatcactcctccatgaccttattatcagtttcctcagcagcaccaacattattgtgcggagaagaacaaacaaacgtttaagactcagtttgatcacactcgtagtctttctagccaatgcacttcgaa

SEQ ID NO: 56490 - DNA, 472 bp, Arabidopsis thaliana landsberg
ttttattgctggtggaaaagagggacattgtgtatggctatgggtatagaaagtaagaagcgagacttcgtttttaccagtatggtaaatgggttggaactaaacctattcatataggagatggggataccactagttatagagtatttgaataacctctttcttttttccttttcctttttttggtctaatctattttagactcgactcatccgagagggcttggtagtatagtcttaagaggggagtccatagaaagttcaccatgaaagggataattctttctattctgttagcttggaaattctctcacctgagcctgccaccgacgcacgtattgagttgagggtctgggaagaagggaagagtagtacctttcaagagtgctgatagataatttcatacatcttagcaactgcttaagaaccaggatcaagatatgcttgaagcttggatattgtgaactatttct

SEQ ID NO: 56491 - DNA, 1022 bp, Arabidopsis thaliana landsberg
atgccccagagatagagcaagctgctcgctctagaataactgataccatacgttattattatggtcgcataatcaaataattgctatatatattcactgatgtagtgatgtccaaatctttgttaacctcaaaaattaatctgataacctagtgataatcaaaagattttgtttgctaatgcccctggattgaattccataaaaatacagaaaattaaaaagttacaagaagataacgtacgtgaatcattcctcaaaaataatagctggcacctactaaactaccagaaaacttgaagaattagaagagtgtacaaataaggtaaaaatgattttattttacagctaatagcattgataataaaaaatagaagtaagtcaaaaatccaaaaatagaaagaaaaagagtgaagagtgttgttgttgttgtgtacacaaatgcaaaactcttcgttgcaaacactaaacagtcactgtgtgacttctttgctttaattgtctctctatctctctctcttaacacagagaaacccgaggcgtcacacttaaaactcttgagatttttatctctctctttcttattcccaaagccaaatcaaaattcacgttttagaaaaaaatattttcatcggaatctgaaattcgacgtgactagtttattttgatcttcgtttaatttgttcatcgtctgtgagacaaaaatgggtgcaatgctaaatcttttgctcgtcgttactgtcattctcttttcaatcttatcacccacacgtaagtcttttagactctttttggtattcttatcacaaaacgtatctttgaaaattgttttgtagggtttatgattataatttgataaaatggttgcagatggatacgatcctcttgatccgttcggaataatcattatgaaatgggatcttcttttatcatcacctggccaacaccacgtaactcttcttccttctctcggtctttttattactctccatattttctcgtaagtttatttctggtctgatata

SEQ ID NO: 56492 - DNA, 121 bp, Arabidopsis thaliana landsberg
caaccaagaggggttccaggactgccaactctaacacccacccctatatctaaaccctttccttgcccacaacattgaagtctagaacaccgtccaaaaaaaaaactgaattaaatctttg

SEQ ID NO: 56493 - DNA, 183 bp, Arabidopsis thaliana landsberg
aaacaccacacaaatcttaactaattaatctctttcaacaacaaaaacctctcaaaacatcattacaactaaacacaaaaaaacttagaaaaacattgcaaaaaacacaaatccttacaacaacaaatacataatttcccaaaaaaaaaatatcaagctaccaaaaaatccaaataaataact

SEQ ID NO: 56494 - DNA, 1049 bp, Arabidopsis thaliana landsberg
tttacaagaaatgaagaattctcgagttattttttttttgtttgtcgttgtctttagaaaagaaagaaggaagatgacgtgaaaagccccattgaaacagaaacccctttttttataatcattcttgtaaattaaaataaattaaaaaagtttttattgaccacacaaataacaacgggtttgagatgaggcagttgttgtaaaccggtaaaccggctattgacggtcacccttgtaaatttatggtaaaacactaaaacccctctctccggttaacaggctattgatggtaaccctctctctccgggaatcatcagttcataaccccttaaagaagataggtttgtcagaagaatctttattttagggatcggataaaaacaatacaacagtgctgtttgtgattggagtggggtcctttttaatatactagtactacaaaagctgtctttatcttccacgtgggtagagaaagcctgtgacaactccattgctttggtaataacgtcgtcacaaggttttttaagtgttcattcaacttgagtgataacatgaatttcttgatgagattacatgttgaagcatgtgctaatggggccaaaatgaacgtgttatgtgttttaaggtattttgtgaatgacaatgttcgcgccaatcttatggctattttagtgggactaaactactaaagcatatgcttggctaattaatgtaatgagaatcgaaatgggttgaatcaaacataaatttatggccggctgttgaatcgaattgtttgtttaattatgtccgtcttggacttctgagagtgtctgtctacttctgtggctggccttggagacttggacccttgtaaattataaccattcatgaatatgggccgcatgacgattagtaaatgggtcggatcggaccattctattggaagaggtacaaggaaaatgatcaggcatactacatacattcttcacaaacatggactaatcattctatggtccttttctaataagctttactgaattatgatagtatgaaaccatcgtgataca

SEQ ID NO: 56495 - DNA, 601 bp, Arabidopsis thaliana landsberg
acacttaacaagaaagaaaaaatataaggggattaaaaatagagtggtgaagcaacgactccaactctcccattgattagaatacatctttttccatctttacggatttataaagattttggttatttatagatacaaattaacagtataaaaaaagttatcattttttctttagaaaataaataattttttataatatggtccatgttttcattaaaaattatttgataaaaatatggtctatattacagttttactaatatatttctatctacatataaaatttagataaaatttgatttctttgctgagtttgtttggttgaactaaagtcatgttaagtttgattcgtttggttgtgagatatgtagattgagtacggtttgactataaataattggttcatttcttgctttcacttaattgattaggttggatatataattcacatgtccaaccctaatcgaaaccgaagtatttcaagttgatattatgatatatacactaaaattatctcagaacacgagctatcgtaataatttactttgtgacatcggaaatcacaaagacatttgcataggactgagctggaaaacaaaag

SEQ ID NO: 56496 - DNA, 557 bp, Arabidopsis thaliana landsberg
  unsure (1)..(557): unsure at all n locations
ggcgggctatctaagcggcgtcgccaccgtggctctgttactgaaactctctattccggtagctgttgatttctccgtgtcacgagctccgatcttgtggagctccttgttgtcatggctgaaaccaccgtatctttacgttgttaccaacggaattatcatcactatcgttgcttcttctaagtattaccgaagtcaccatgaccgtgatgaagaagatgagatcgtcgtgtacggtggtggaggttataagatccagacggaggagccgattgtgaatcaacatcaagcttctccgaggattctggaggttaaggatttggatactggtgcgattttggtttcgttgtggcgaatctggaggctgaggaactggaatcagaggcggttacggcggttgtgtttgacgatgaggaggaggagaagaagattatagatagcgcggcgacggcggaggatgaaattgaagaggagcttagagtgtgattatggtgagaattcagatctggtttgatccgatgtcatacncgcgncgatgatgatcgaatcggagaatc

SEQ ID NO: 56497 - DNA, 604 bp, Arabidopsis thaliana landsberg
ctcatgaaagaataagaagatactacatgattctatgcgatgaaatggtaagatgaaacttcttatctttgttgaatctaatatatgaagactataagagatgaaactaatgttgtttatgtaattttttaggaaatagtgattgatgcatagcttcttacatttatgatattaacatccatagagtttttgctgaaggacaatggtatttcgtgaaatgcattcacctcatattgatatgcgtttttttatcctctttcaccattcatacacattttagacctgccataaccgcttgatccgcactctttccaccaaaaccgcttgatcctcactttatctacttgatccgcttagactgctaaatccactttctctagtcggagccaaagtaaagtaggtgatatgaaaaaatgatattcttaataggtaaataaattgaattaaagtggtctaaaaagaatctttccacaagttcatgagatttcagctttcttctcattttttctctattcatttatgttcttcttcctttagtcctcttcatttaatctcagtctggcccgaccaggagttaaagtccgtgaagtaagggctttaggca

SEQ ID NO: 56498 - DNA, 1804 bp, Arabidopsis thaliana landsberg
accctttacttaaatatactgaatggggggtttcactatgttaccttcttgttcaatattagcccgtgaagcggtgaccttacatcgtcttctgaggtttggacgaggcaggttgtttcgacgtccagcggagatcgggttgatgagagctgattgtttagggaacaaagagctgagactctttgctacgttcaaagtctggagactcgacaaggactctctacaatacatattgtttttctcttctataaggcttacattcctctcatatccacttcatctatttatacaagtttcaaattatttttggtgatacagctgtgtttgattcggtagacaatataatatattttattaaagtattaacaacgtttaaaaatatccaagagttacgaataccaataattgccatgagaatatatgggtactctacgacgtttatgtccacgagtgacatcttaacttcttatgtgttgtggacaattcaatatctttttgaccttacccgatattgcatgtgatgcataggaggaccactgtatctaaagaaagatatgttaacatgtatatacccaagaatgcagctcttttcatctttatgaatttgcaattatacaaaaaaaaaatataactagttttggaggaaccggccatttaggttttggtcctgcttaaaatgaaaccaaaaaatagataagaaatcatatcctctagttttaggtggttagttttcaattcgaacatggctataacgtgataaaatggtatgttgagttttcttctcttttcttaactagtgaccgaaacaaaaacaagataactcaaaaatgtctgtccaagaagaggtattagtttattaatgatcttcttgagaaaagtgggaaatatactttgagaagttaagatcatttcctttcatgccaaaataacatagatactacctgttatattgttacttccagaatggtaattaagtatttataatcaccaaattcggattgtttatatagaaatgttggtaattatctccaatctgcataatgtttgtaataatatgagaatactagatagctaatagatgcaagtatgggtagttgaactattgttttcataaaagagcattgacgaatacaattttttatataaaagatctatcatctttattagttacgagtggtcttaattaataagaaaagaagcaaaggaggttacgttatcatatttgttgttttctagagaagtgagtattagagaacgcacgtttttgttgttgttgcccaattcaaactaatactgtaccttcgggcaattgacaccatacgtgtctctctcaatctcacgaggacgctaaattcctagtcgtgacatattagttttgtacgtacatgaactcagttattgcagtggtccaggatctgatcagttcaatattcctggtttcgagttttcaaggtcttttaaagtataataagtgaaaatagattgacaactagagcaaacgcaaatcaaagctatggagactgctcaaggaaccagatgcctgcatgcaggatgattgtttgctacacttcggtcggtcttcaagatcagcatgaatcaatgacctcacacagtcacactaggtcctgattacttttcttcaaaaaaaaaaaaaaataaaaaaataacgcgactactctaatgagcgaatgtgctccaattcgacagccacttcgccattgttgaacataatttacctttcatcctcacacaactactagcctgtcttgccgctgatgtgacttttccatggttgtgattattt

SEQ ID NO: 56499 - DNA, 1145 bp, Arabidopsis thaliana landsberg
actcatcctcaggtttgtgtgtgtgactctgtagtgtcagtgcttatttaattgttgagatgaggtttctttaagtttcgtttcattttcacaggatgggcctgagttcatggcagaggatgcaaaagttttcaaatacccatttccttacttatatgatgaggtatctttttgtctattcaatgcttttttcagggttgttagttgattatactcatattcggatcttcttgtgacattttctctcttgcctcagtcacaagaggttgcaagagaatttggagctgtttgtacacctgagtttttcttgtataagaaggtaatttgtgatcatatattttgacagcagataagtcagttgcagtgtctactttttgggtattctatgaattttgttctgctaaagcatgtaaagattaactcacaaagttgtatttgaaatatagtattatggatatatgcttaagatagccatttgttggattgggagtagataaatcatgaattcctttataagctcaaacatttaatacttcttatagaaaatcgcgtcttgttttgtttatcaactctatctcaagcttctctcgcctgtcaaatggagcaggatggccgtagaccatttgagctggtctatcatggtcaatttgatgattcccggcctagcactaactcaccagtaaccgggagcttcgttgttactgcttttaacatatgtcagagaagtcttaaagtaaaacctagggggttatatatgtgcgtgcgggtctaatcctggggattgatctttcccttagctgtcaaccaataccatcaaatcaaaagccaaggtacactgaaatctgatacatttttcttctattctatagcctttgatgaccaactgatatcctgcatttggtatcttaagtgttggttgcagcataaagtggcacccagaaacagagtcatgatctaagacatgattgtacttacaaatagcattgtacttactacttatatacatctgcacaacattattttcaattgtacttacaaatagcattgtacttactacttatatacatctgcacaacattattttcaggcaagtctcttgttctatatcacatatgttccatagactcaagtcccgaatatgtcag

SEQ ID NO: 56500 - DNA, 439 bp, Arabidopsis thaliana landsberg
  unsure (1)..(439): unsure at all n locations
aggcttcatactttgttaatgtatgattatttttatatttacatttataaacctatgttaatgtttgtttttttggggacatccgataaaaaactatattaatctttataaataaaaaataccttaataaatttttatttcaattaaaccgtgttggaacctagttcatgatccataacccgatgacctaaagtagtctggttcaccttccatacatgtggaataatattttacatataattagcaacttgaatttataacaaaaatttaaatttcaaatttacataacggtgagaaattaaagtaaactggtgaaatctctaacgatcatatgattgtgtcaaaggatacgattcaaggtcatgttactcttacattgnttagtaaaattagtattagaatttgaaaatagtataaaattttgagaaaatatcaaaac

SEQ ID NO: 56501 - DNA, 549 bp, Arabidopsis thaliana landsberg
  unsure (1)..(549): unsure at all n locations
cccccccccccccccccccccccccccccgcccccccccgccctcacgcgggcccccgccccccccccccttcccaaacccgcaccccgccccccccaccccccccccccccgcccccgcccccctttcccccccccgctgtcccccccccccccccccctattctcaccccccccccccccccccccccccccccccccccccccccccccccccccccccccccccccccccccccccccccccccccccccccccccccccccccccccccccccccccccccccccccccccccccccccccccccccccccccccccccccccccccccccccccccccccccccttcccccccctccccccccccccctccccccccccccccccccccccccccccccccctccccccccccccccctccccccccccctcgccccccccccctccctgcccccctctccccccccccccccccccccccccttctnccccccccncgcgcccccccccccccccccgccttccccccccccgcgcccctcc

SEQ ID NO: 56502 - DNA, 584 bp, Arabidopsis thaliana landsberg
gcaaaacccggaaatggctcgtatggtggccgactggcaggcccagaatgatggcctgaagaacgcgttcgcgccctacgccatctcgcgcagcaccgacggccaactgatcgcaggcaccgcggttctaagcaagcccgccctctatcgtcgcctcgcgacggccgctgccgtgggtttcatcttcatggtcggtggccttttcggacatttcgcacccatgctcatcgaaaagccgtcgacagaaggtgaggggctggcgcaggaggcacgcaacgcctacctcatctacgccagcgaggtgcgccatccggtcgaggtctttgccgaccaggaggcgcatctggcaagctggctcggcaagcgcctttcgattgccgatcttcgcattccgaacctccattcgatcggcttcaggctgattggcgggcgtcttctgccggtggccgacaagccaggtgcgttgttcatgtatgaagacaagacgggccggcgcgtgacggtcctggtcggacgtaacgaagaaaggccgaggacgagctttcgcatgcctcatccggagtgtcgagacgtttactggatcg

SEQ ID NO: 56503 - DNA, 871 bp, Arabidopsis thaliana landsberg
ttttatttataataagtctgaatttgctaaaccaggctagacaaacctactaatgtagaagacatttgtagctactgattcccctaatctagttgaaactgtatggtactaatttataggaatctttgtagttagatttataaaataattggtgtgacacaaaatttattacaaggggttagtataagaaacttgtagggtcggggtacggcacggcaaagcacggaccgtaggaccattgaaatgcgatttcaaataaaaagatttgaaagcatgtgatccatcacatggatattgattattactgtctaacaaaataaacttgtagatcgtgtccagttgttcttcaaacacatgcgtatagaaaatgtataacattttgttattaatgttacaagaaataaaagataatgatcatccatcattcatgatgtcatcttgttcacacttgcacaaacctaataagttatatacaagacatttttctagtttggttagattaggtttcttttccaaaaaccgaactatcaacttttttttgtgtcaaaattttcaaaaattaaataaaattgactgtctaaaaaatcacaaaagactatgcaaatttctctttagtaatatatcaattttgatccaaatgaaaatgtaggggtcgttatgtaaacaaatgaaaacatgaggaccctccgggcgtgtatagttcacacttgacaaataggggttttggagttaggcccttccatcctaatcgcgcttccgtcgccgacgccattttactcgccgtcgtcatctccggccacgcttgtcatcgttcgcaattaatcgaaatcgaaattttccggtaagtatcctcctttcttattaccgtatc

SEQ ID NO: 56504 - DNA, 1179 bp, Arabidopsis thaliana landsberg
  unsure (1)..(1179): unsure at all n locations
tacatcgatctcatgagatgtacaatatgaactcaagtgcgtttagtttaatccattaaaatatgcatcacttgtttctttttgtaatattttagtttgagtataacgattgtagaaacttgtattaatgtatactgtatatagcagggaacatcatacgatatatacccagctttttaatacgaaattacctatattacgttaaaatttatttgaaatatataatatttctaatacgaagattagtatattgatttgttatcaataatttacaaacgttttcctaatcgaattggtgaggtaatctgatctggcggcgagaacaagcaataaacgttgatctacgattttatatattttcgagttgtatggtcgacaactacatacggtagttttagagtttttaactttttataagtgttgtattataccatccaaaattttcatgtaagtgatgttttttttttccatttattgtcgaccgtatatattaaccgaatataacactttaaatgtatttataaaatcattaaaatatcttaagagttttttaaaaaaaaaaaaaataggggagagttgggtaataatgggtacaaacaaaggtacaaaacaaatctcaaaatgaaggcaaagaggagtggggcccagaaacctatggttgacgaccaaacccaatttcatgtgcgccacgtggaatactgcggtgtgcatgatctcagcatgaagtgtcatcatcactcctcgacgacctcgatccaatttcttccttcattgcattgtttttggtttgtagccaattttgtttttttggcgtaaactgtggactacattaacggtatagaaatttctaacgtagataataccctaaacactgaatatttcttggaaaccgatactaatatatttagtaaaaatgtttatatatgaagcataaatacaaaaatgataaggagatgtacttagaattaaaataacgaatttggttagtaattttatattattacagtatatttttgtatcggtttacttttaatcataaaacgatatcaaaaacgttattttcaaattttcaacaccgtttttttttcttttttatagntattctatatcgttaagtaaattacgtatgtgctctgacttgacatacactcattaattgatacaagaaaaaaaaaacag

SEQ ID NO: 56505 - DNA, 1681 bp, Arabidopsis thaliana landsberg
aaagaccatttttgggtctaacaactttgatgtatatacggacatgaaatttcaacccctcattacaattcaaagaattcgtaaattttggggtgttttccctattttattcaacgttggatgcattagacgtagttatgatttgaattgactcaagttgactttcttatagacttatacgatactttcataaatgtttacaatcaaatatgtagctattacataagatcgagatgataacatcattcgtaattgttaagagtcaaatatatcaaacattattcgatcgcataaagcatagattatgttaatcttgtcaatgactcacttcactatagtaaaattagtagataaaccaaacctattcaatccgtacaatcaagatagagatctaacaatgctatgaagaaaatcggttatttgatttggaataacgatatattccgtatgtttcataataaacatagaaagataaaaatggcgcagaatattttaaaaaattgtattattagaatttggaaatagagattgtagataaatatcgtaatctcaaaatagtagtgtgagagaagagagaagcgtacacggaaaaagagggggattttggagaagcaaagctgtctgtcccctctcagacttattaaagtggttttgtctctttgtgcccaaaataacgcgttttagggttttgcgttacaaatattattattcccattttaatcaaatcaaccatactcatctgttgactttgaccttttcttttcttcttgtaatcttcttgggacaaattaaaactattaaattgaaattttggtttctaaaaagtataaaaaactttgcgaggccgcaatcatcggtagatgttctcacttgacaattgtttttataagaaaaactgattttctaagtcaacaggttgttttcccgccctcttgcattttactcagaacgaatcttgacctttattcttcattttttgtttaatctgcaaatcacaatagtcgataagagatctacattgtatttttattattattattatctatataaccaatgacactactagtatatcatttagaactagctgatatctaccaaattcatatacaaatatcacactttgtctagaccatttgtatatgtggtttgatttaagttagtattcagtttcttttaagatagatgactagatctgaccactaccaatacatgttcgaaaatttgagtagtctcgaaaatctctatgtttggtttgctccgatgccagtttcatgtaatcaatcatgtatatatatgatatatccttacaaatttttaaaacacctgctttagaacatatattcatcggaattcatagtcaacgaatacagtttacatgaggaccttataattatacaaatacacacatggttcacttggcttggaccgacgatagctaactcttttgtcctttattcctttcaacatgacaagtgacatgacaatctttttcaaaactttataaattttagctttataaattaatttaaaagcatttgggttttgaattgcattggtcaaaggatattatatcgatatagataagtcagcagctcattatatatagtgagtgattggttcgatttgcagtgctattgctagattatgataaatagattttaccgtagattttttttatgta

SEQ ID NO: 56506 - DNA, 197 bp, Arabidopsis thaliana landsberg
  unsure (1)..(197): unsure at all n locations
tttatttttccagagcaattcttgtcctcatcccaagcatcgctcccagaaatccagaagaannnnnnnnnnnnnnnnnnnnnnncttgattaagctttcactaagacctttctcttattctcatttgttgtattgtgtctaaatgtctgatgaagagaagatatgtttggtactttataggggatttgagtccctt

SEQ ID NO: 56507 - DNA, 1303 bp, Arabidopsis thaliana landsberg
  unsure (1)..(1303): unsure at all n locations
caattttctttatttggtttgttttgaatcgatttacttaatctgtgttaaatttctctagtaaatttttctcatatgagaaagtttcataatccgtagaattaagaagatcgagaaattatagttacgtctaatagagtattttcatcgcctaatttaaacagacggttacaagtatgttttcaattattatagttttcaaattcaaatatgttcttatttttaatgaaacgaacattctattcgaaatatttttctcatttagtttgattcggatctagtgtccgtttcttcggatattgaaaaacattataacacttacaaaatcgacttcatttctcgaatcaaatttttgaatcgggtctatttttggtttttttgcatatataaaaaagataataccttataacaattacaaaatcgaatttatttctcgaatcaaattttggatacgagactagtttccgtttcttcggatatagaaaaagataaaaccttataacatttacaaattcgacttcatttctcgattcatatttttattcgagttatattagatcattagggttgttttggatcaatacaaattaaacttctccatagaatcctaatgtcagagattatagaagaaagaagctgtgcaagttgaggtctacactggtgttatcacaccatataaatgtggccatagtacactctgctgaggtcataaagattcctatcacaaagtttttggtcaattcggtcaaaaagtaaataataagagggtcatattaaaaatcttctaagataaatataaaagtttaagcccgcaatcgaaaaatctgaaacgcaactggtgtgagtgattctagcgttttctctcgtcgcatcttctcttttcatctttgaccctaaaactttgcaaatctcgagctttcaggtcttctcttgtttctcttcactttgcattagatatgattcctgattgattgattcactgattacagatttcgacattgtctctaggtttaatcgattttgatgttgttgctaatcccgtagaaatcaggtgcgtttcgagtcgaaatttttgagaggtttgtgagtttgtgagatttctagggtttttagatgaatctagaagtctctagaagtcgatttcgctatttacgcttagattttgttggattgtttctacatatcttgggtttttcgaattttcggcggaaaaaaatctaaaccacacacactgtagccacttttaagctgtgnttctgcatgcttctgagatttttcgcagatgttagatagcttcatagag

SEQ ID NO: 56508 - DNA, 612 bp, Arabidopsis thaliana landsberg
  unsure (1)..(612): unsure at all n locations
ggttttgaccaaagggtttaaattgataaagtgattaaaaaagattgagactttcgacacctgatcgaagacggacacgggttcttcaaaaaaatataaaacccagatccgatcgaactttggctgagaaaatttgtttgtggaaaattcgaagagaaaactagcgagcaaatccgtccactgtcccttttttattattttcaagcaatgtccacgatttcttaactcgatagataagacgttgtactttaatactttaagcactttccaatttaatgttaaatttcctaataattattgtgactgaatgtttcttaaataaatgagactaatcttccaagctaataaaatatctgtttcgaataaattttaatttatggaccaaaaaagtcgatttaacactattattatttactgcttgatttatgttaaaacgcttttatgggtaagtcatccaataatatattcccacgtaagcatcagatctcggcggcgcgaaactacgcggcgttcgcttagcacaaaaacgtagcgcagtttatttaaagcanaacaaaaaattctgttttcacacttttgcattgcagcatcttgagctaacaacatcatcgg

SEQ ID NO: 56509 - DNA, 499 bp, Arabidopsis thaliana landsberg
  unsure (1)..(499): unsure at all n locations
ctttcaactacacaatgaannnnnnnnnnnnnnnnnnnnnnnnnnnnnagtgttctttatttgatcaacacaacaagaaagtagattagcttatagctttgtggaatcaaacaaagctattgtatagtgtatcacatttctccacttaattctcaaatagactcaaaaatcaaatctctgttttccaggaatataacattccaatcttcctactcttttccagaaactataatcaaatataaccttataagatgaacaatactcaccaaaagctcgaacttggggaaaattttgattaacttaaaaagaatgaagtttataccaatctaagaagnnnnnnnnnnnnnnnnnnnnnnnnnnnnnnnnnnnnnnnnnnnnnnnnnnnnnnnnnnnnnnnncttctcaatcgccgccgcaacttnctgtggcatatacttctcatcatgcttagccaaaacttcagtcggcgagaagaaacaatcgagggtcctagcttttt

SEQ ID NO: 56510 - DNA, 1161 bp, Arabidopsis thaliana landsberg
tcttaaccatgctcttccattttcttatcactttcttcttgcttagggagttaaaagtgacgtgaggacaagctccggaatgtttctaactcatgtagaaagaagttatccaataatacaggtaagtcactctctcatatcttttaaaggcgtgccattttgatcaactttacaattttgtaaattatattccttttcgtttgctattattaggcaattgaaaagcgaattgcagtcttttctcaagtaccagcggaaaatggagaacttattcaagttctaaggtgcgtgcacaaccgcaaccttactattttttaaatctaaagtaaacgaagcttttttcttgttttgatgaatcaaaatctgctgcagtgcagatatgagccgcagcagttttacaaaccacatcacgattactttgctgacactgtaagtctttggttctgttttcatatatatatatcattagtagattggtaaagaaagcttttgctctgattaaaaaaaaaactaaaaagaggctacagtatttaacttttggtttggtcaataatgtttagttggatctgtacttcatcttctccttcttcatcatcttagaacatttagtttggaagtacgtttattgtgggtgttcatcatatttcctcgtttcttttcttatggttgctacacagttcaatctaaagcgtggtggtcagcgcgtagcaactatgcttatgtatctaactgatgacgtcgaaggaggagaaacttatttccctttggtataacactttctctctgttcatgcaaatttcagaaaacaaaataaaccaatggtgtaatatctctctctctctacttgaaatgcaggctggtgatggtgattgcacctgtggtggcaaaatcatgaaaggcatctctgttaaacccaccaaaggagacgcagttctcttctggagcatggattgtttcttcaatctctctctctatgtctctacacaaacatgaatcaattggactgctttgagttcaattacttcttgtgttattcagggactcgacggacagtcagatcctaggagcatacatggaggatgtgaagttctgtctggagaaaagaggtctgctactaaatggatgaggcaaaaagctacttcttgaagaactacttaaaac

SEQ ID NO: 56511 - DNA, 721 bp, Arabidopsis thaliana landsberg
tataaaaatcatcaatatacaatttaagaatctaattctcacgaaaaagccccataacttccaaaatcaacttttcacccccaaaaaactcatcttcttcgttgaaacgatcgaaatcgataatggcgtcgtcgaagcacgaagactatggcatcccttacacacctcttccatcatcacaaccatctcaatccgtaatccttctaactccttatcgccgtcaccgtcgtccttcacttctccgtaacctccgttgttctctcctcttcaccgccgtaatcctcctcctctccgccgccgtttacttactctacccttcagatccagacatcactgtctcacgaatcaatctcaaccacataagcgtcgttgattctcataaaatcgctttagatctctcgttttcgctcacaatcaaagttcgaaaccgagatttcttctcacttgattacgattcgcttgttgtttcgattgggtatagaggaagagagttaggtcttgttaagtctaaaggtggacatcttaaagctcgtgatagctcttatattgatgctacgcttgagcttgatggtcttgaggttgttcatgatgttatttatttgattggtgatttggctaaaggtgttattccttttgatactattgctcaagttcaaggtgatcttggtgttctcttgttcaatatcccaattcaggtatagtgactttcccattggaacat

SEQ ID NO: 56512 - DNA, 244 bp, Arabidopsis thaliana landsberg
  unsure (1)..(244): unsure at all n locations
ccccctcccccccccccccncnntcccccccccccccgtctccctccccttccctcctctcgcccccccccccccctccccccccccccccccttcctccccccccgnccnccccccccccccccccccttttttttttctcccggggttttttttgcccccccccccccccgcccccccccccccccaaccccaccccacccccccncaccccctcctccctcctcccccttccccccccccc

SEQ ID NO: 56513 - DNA, 309 bp, Arabidopsis thaliana landsberg
ttttatttttatgagcaatgcgccccaaacctaggggattggtgaatttaatgcgtacatcgctacaaagttttattatatttttttgttgcttaaatgtatcataaaactttaatggaacctcccgcatctgttgaggccactatcatccagagtttctttgtctgtacaacaagtaataacattttttaagcacgttcaacaccctgccctccatctgtctcgtagtcacctataccgatagccctacttctcttccctcgattgctgtctcatcttaagtaagaaaggttgagactcacattccta

SEQ ID NO: 56514 - DNA, 282 bp, Arabidopsis thaliana landsberg
tgtttcttttttacttcacagtcttcccaatgcggagactgtgacatcaatttattggactcaaataaacctttaacaaaacctacaagccctgtaaacttactactgtcaaactttcaataccctcagaacaaccgtaacttattactgaatgtctcaataccacacaaaagaacttacttaggctaaatcaacattcatgacatactcatatgaccaataccttatatcccactgacttgaactatccttcttgaaacaatctcacgaaaacacataata

SEQ ID NO: 56515 - DNA, 1007 bp, Arabidopsis thaliana landsberg
  unsure (1)..(1007): unsure at all n locations
ggccaggaaaataatagatttcattatttaattgatgtaacaaacaatattacttcttcacaaaaaaaaaaacaatattacagagtctatatattttgtacagaaacaaaacaatacaactatacaagcaaaaaagtagcatccttttgttgtcttaacgataatacatatacatccatgaaggcaacattaagaactgaggcaacatacagaaagtaaaaacttctactttttttactttatatattgtagaaacattaactatatatgcctctttattaaagtatggatacatagtaatatttaaaacacgatccatgcatgccttgacataatataagcaactagagagtttatcgatgcctcaagctttgtaccttggtgatattgttgtctactcaaccttatgcttcattgatccaaccaagttccattttaactcttatcataaagttttttggacgtatttagctttgatttatttgttaattcataagttttaacgtttaaaccatttctttaattacttctacctccgaaccaagttattgttattcatatcacattagaaattcacttctagttctaatacttttctttttttttgccaatagtgatgttcaacacaaaaacatgtttttatgtctgtttcactcaatcatggagtggaccagttttgatatcccggtttgctatattgtgcggtttatattaacgaattttgttttttaaaactataaaccatttaaaagcaagttcttttccgtcaataaaatatctaactttatattatccaaccaaatatatagaattatctcaaaattcttctatcctttgcatcattcaattattttaataaaacatacaaaatatgaaattgtcagtaataattttttctggtttgcttagttactcttccatgaagacgtacattggcaaaaaagcaaagttaggttcactgaactaattagtcacgtagttgcatttcatttgcacggngagttttt

SEQ ID NO: 56516 - DNA, 1098 bp, Arabidopsis thaliana landsberg
tcggtaaaatgccaacgcatgatctcaaacgtaaaaatgagattcaactatgcaaacaattgcgttaacatttctgtatagaagtctgagttttgcaacgaacaagaattacatatggttccttttgggggttgcaaagagttgtttttaggttgaaacttgaaaaatgtaaaaagattaaaggtttttagagtagtgaaaagggtaattaagtgaaaaagaaagaatggtccacgatttcgagaaaagaacaagaccttagactctctctgacccctctcacgtgccaccagcactccattgctcttcttccttctctaatccttttctcatctatgaaatatatacatatgcattttatatttatttatacactatgagttaattaaaaaaaaaaattgtacgttatgattttaggtaaaggattacaatttataaagcttgtgtcatttatttttgccaactccttaaacatatatcaaagcatggtaaacgtagtcttttcttcgaagtcgataacttcatcggttaaacctggctgaactattaacctatatcgagtacatgtggtttatgtttccattttccaaattcttatataaaataaaatatatgatcaaaatagatgactcgagaaaaagaaaaaaaaaaacatatattgagaaatcatatgatctttgtatctcttcttatcataatttaggtttgtgataataagttagtcaagtggacgaattgcaactgataatatgtggaaacatgaaaatgaatatatatgtgattatgcatgtttttatcaatagtcaagcttttacaagatttaataaaaaaaaagtatggcattcagcaaagtccataattaagttttcttcagaagtacccttccatgatagtaccgatcacaatcaaataatgtctcacatgtacacacactcagagcaccatagcttcaacgtttgtcaagaaaaaaatttccttttaatcattgccttttattttttcgaaaatgtcgttttcgcccgcaaatatttataacctttatatatttctttcgaaaacaataaattaaagatttggaatgttgctatataaatcaat

SEQ ID NO: 56517 - DNA, 1267 bp, Arabidopsis thaliana landsberg
atttgatagtttattatcgtaactcttacatacgaaagaaaaagacgtttaatttcactttttcgattatctcgtgtgttctaaataagtaaatattggttgtgtattcatgctcatcgataataactatgtaattcctgattcaacttagtaaagtaagatgttaaaagaaaaagtaatgacattgactacgacttgaaagaaacttgatatattacgacggtgacgagaaataacttgtcacgcctaaatgggaacaaagtgaaaccaaaaattgtttgtcgcttttagactttttttgaacatatgtagtaaatctgtaaataacatattttattttatttttacaaaaatatatgtattgtattagaaaagtgttcatcattgtggatctacgtgagaagtatgtggaaatctaagtagaagcttaacacgaaaagtggttacagcttcttcctcatgatcatcaatctcattaaacatggcgattccgcgagcaaaggcgaaagctcctgtccctcccactacctccataacctctttcaatttatgtgtcatgtctcggctcctaatgctaacactccccgtgtactcaggcgtctccaacgtcaagtatatcacgttaaaatccgagttagcgaagtcttcatgcgggattatgaaccctcagctttgcctacgatccttgaattattctcgggtccttccgtgagcgtgcgtcggaaaatcaatgctccttttcctcctcctctgccgtgaggttggaccatgtgctggctggaccggcgagaggagtaggaggaagatggggtgtgggtttgtagaaaatagcgggagaaggagaagaatgataccggcgggtcgtaatcaggaacaggtgacaacaaagcgagtagaaggacaataatgaaagcagtggcgacacgaatagcggaagatgattctagttaacatgatcggagaagaagaagaagagagacaaagaggagtttctaactgttctttcaacaaacctctttggttttaaaagttagattagtgattttggtataactactacttccacaacataactaaaccactaccttcttttgtcctcaagctgttattttaattctgatcaggtttagttcggtttcagtttaaaacatgtcagttctgtttttatgtctacacgctaaatacaaaaaagattctaaaataaccaatgaattgtaagcttacagtaaattcatagggtaactaacggtttagccttgagaacatg

SEQ ID NO: 56518 - DNA, 797 bp, Arabidopsis thaliana landsberg
  unsure (1)..(797): unsure at all n locations
tttactcattactaccaactcattcgcatttagtcgtaactaatttggtatatcgtatacttgaaaaatacatatatctatatcttgattttcataatccttaacgttacagtatccacatatnnnnnnnnnnnnnnnnnnnnncaaacaagagaacaatgatcaatccgttactatgatatgcacacattaaatttaaggctcctgaagtggtttcatatattataagattccatgagccatatatcacgaattaatgaaaatgcgcaaatgataagcaaaaggcaaaaaaaggaggctacgcacctgtcaatgtagccgttgcaccttctcctcctttttaaaaataaatactctttttaacatttcctcaaacgctccaattttgttggtttctctgttccaaaatagaaacgaaatcttgaatctcttgatacgatggtgagatcaatccaagaaggagtcttgatgtcttcatcttcttcctcaaccacaagcaacagcaacgactccgacggttctctcagcccatctgcgtccaccaaaagcttcgtcctcaacactctccgtccgcctatcaccggcgcgtacaagccactcgctgttctctctgctcatgtcggctctgtttcttccttagcgctctgtggtgagttcttgctgagtgcgtctcagggaaaagatatcatcgtttggcaacagcctgatctcaagatctttgcgaaattcggacaaggtgatgggtctgtgaaggctttggtcagcgtgggaagcaaagtgttcacggcgcatcaaga

SEQ ID NO: 56519 - DNA, 409 bp, Arabidopsis thaliana landsberg
  unsure (1)..(409): unsure at all n locations
tcttatcaaatctgttcattttcgaatcgagggccgagnnnnnnnnnnnnnnnnnggatgactctttctaatctaaggcgctcacccccgattggacggctcgtgttcctcttccacctcacgccgttagtgcacagtacgcgctgcaccccgcagtggagctttgtcgtcatgaagcgcacccagcaccctggtggactactgctacccccagctacgcaataagggatgtggagaacatggtagataggtttgtaagttccttactcgaatctgcacgnnnnnnnnnnnnnnnnnnnnnnnnnnnnnnnnnnnnnnnngatcgggtgttgactgcaggcaccagtggaggaactcccgatggtgcaccccacccaagaagcatatgagtgcaatcacaagggcacgg

SEQ ID NO: 56520 - DNA, 532 bp, Arabidopsis thaliana landsberg
tagacgttacctggtataaaacaagcacataataagtacctttaatcatctattctgagctataacttagaaattaagcatcttgccaaccacctagggagacaacacaaagtcatagacacttagatgctaaatcatgtttttttttttcatttctattttttaaattaggtttatggtgtgtgtctgtgtccgagcttgggcccaggtgtacaggtgtcacagagccagcagaggccatcagaccatctggagatggagttagtaagctgtctcaagtggatgtttggaatcaaatttaggtcttcccccaaagcggtaagtactcttttagctagtatttctttagcccctgagtcatgttctttagactcaaacaactttcctagtctatcccatggtgatatttttaaggagttataaaagcttattagacaccaagtaagcacaaaaggaagaaatgggggaccccaggcccgagaagagaaggagcaatgagaaccaatggctaaagaggaggcccagtcctggg

SEQ ID NO: 56521 - DNA, 1497 bp, Arabidopsis thaliana landsberg
tggtgttttagggggattggtaccccaactcttttctagcctcggcagttaggggtcaatatttcatatgcttggcccgtctgtatgtcagaagagcttatgttccctgctatgtggatggcggagcatgctagcggctagaaaactccttctatctgggatgaggaaaaacattcgatcaagctttgatactcgagtttagagcgacccatggatcccaaccacaccggcatgtccaaccaaaagtaagctcactagcacttacccaaacttctttgtcattgagctaatcaaccatgtgtcgaaggcttagaaggtagaaaagattcaagaacttatgtcacaagaagacatacctcacattcagggacttatcgttacgactctacatgaacaatcatggaagatccaaacttcaaaaaaaaaaaacgctttctatggaaaactttcaggggctgtctagcaacgtgctaacgactagctgattgtcatctaggaactaatcatttgtgcctctgatgtgggatggacgaggaaattattaaccatgttttagttgagtgtcctcctgctttccaggtttggtctttatcttgaatcctgtttatttagaacatttttcctcgtcttctctgtttgagaatctagaccatctattttgaagagcgaaggaattaggaggccgagaggagaatatcaagaatttcccttgtatcatgtggttcatttggaaggatcgtaacactaaggttttgagaacaaggatacccaccttgtagaaatgttccaacacgcatcaaaggaagtaaaatctttccatatagcgagagcccgtgagatgatccttgacccctaatcgcttcaacaacctgcagtccaaacccctttttcaatagactcttttgtctatcgagtagatggttctttggtagattcatgcactctaagtggtattggttggattgttggctcaaatggtttggtatcttatcttggtctatcaagagctggttctttggtaaattcatgcactctaagtgatatttgttggtttgttagcttaaatggtttagtatcttatcttggtttgaagagttttcgctgctacttatcacctcttcatgcagagtttgagactcttctctcggcaatgagatctcttatttctcggtctctttttaatgttgcaaagtgtcaactcattttctagacacttccgatgagtggtttgccgtcacgtcagaattagaagattttaactctttgaaactatcttttcctcttttactttgtcatttattccatgttgtaacaacacctgtgatgtgtgctttgcaaaaagacactttcatgtggtctattctttctcatgtaagctctttcctttgagacaaattgcctatttctaatttgaatggatgaattttcttttttaatggattaatttattttgccctcgaaacaaaaaaaaatattacatgagtgattgacaaattc

SEQ ID NO: 56522 - DNA, 455 bp, Arabidopsis thaliana landsberg
tttgatctttggctcttcaggagccttttcagcgggcttgtgggcatgtctcttatgcctagatgataactttctcgttccagagtgttttggccatttcctagcttcatgatcctccctatctccttttgctctcctccgatgtttctcccagacaacattagctgcccatgtcagctcctgatcgaaaaactcagcattaagaggactagaaacatcttttccaccactgttctcatcagcatttcttggtagctctgttctcaccaattcaacatattgattattagcttctttccattcatcatttccatcagaggttgctgacccttgaaaagacagagacttgcttccacgcttatccttcaaagactttcttgctacatcaatattactcttaacaactggcaaaccagctgcatagctcgacttcccttcctcttttattctattct

SEQ ID NO: 56523 - DNA, 489 bp, Arabidopsis thaliana landsberg
ttaatttattatcttcttcttcttcgaccttccaaactctctctctctttctctcgtcaacaatggatagtccgacgagcatacgtagtaaaccaccaccggagactctttctccatgcggtagtcaacgacggagaagcagctgcgactctaacccacctgagttcgagttctggcgtttaactaactcttcatttcctcaagctgattcagatcttctctccgccgacgagctttttcacgacagtgttcttctacctcttgacctcctcttcgttaaatcagagcttcagtccgacccgaatatcgcagaatgcgatccggatccatctccttcggctggtagtttgattacagagcaaaaaagtgatcttggacccgggttaggatccgagttgacccgagaaacaacggttttgaagcggtggagagatattttcagaaagagcgaaaccaaacctgccgggaagaaagagaaggtgaaagaga

SEQ ID NO: 56524 - DNA, 563 bp, Arabidopsis thaliana landsberg
tgccacccgccggaccgttcggccggtgaaaatagcgaatgctcaacgcccgggagcaccgagggtaaccaacagacaggtaagcatttaccgccctaccgttaccaggactactgaaaacagccgcgttgccgcgcctcaaacgcattcacctgccccggccaacaggccacggcgcgtgaccactcctcagcagcagagttcgaaccctcagcgccaggtcgaaactaatcgccctgtcccgacggaaagcccgaagagagctgtcgaaaacaagagcaacaggccggtaaacacgcagcctaacagtcgcccggcgccggtacgtaacgcggaacaaagaaacgctccgcgaagtactcaacgtccatcctctaataccacggccaacaggcggccggctgttcagagacaggtaagcgtgcaaagggcaaggccggcaagcgtgcaaaaccgggaagtaagcaggcaaaggccctccgttaacagggcacggcctgtacaaagggacagcagggcatacagcagtgttcgtgctcaccggagatgaaaggagcctatag

SEQ ID NO: 56525 - DNA, 483 bp, Arabidopsis thaliana landsberg
ggtgtccagcgatgagatccgcttgtcgaactccgcgcggatcgctgctatgaggttgggatcgatcggggagggtgtggttgacgccatcggggagggatcgacgaggtctttgataccaattgttagctctgggggaaggaggaagggaaagtggagaacagagaaggataggacagcgaagctggagttttcttctcagttcaggttttacaaaatgcataaaaatctctctcccagctaacagattacatatactctagttcagtccgccggcatatcttgggttgggcttcatgggccgcgtgctacggcgtggaagttgggcctccgcttcaagatttgtatctgctgatgctgtacggttcgccggagctggacgtgtaacaaggtgacattcaaatcgaatatataacttattactcatttatatatagatcaacttctttaatattttccacataaatacgaacatgggatccc

SEQ ID NO: 56526 - DNA, 856 bp, Arabidopsis thaliana landsberg
tcatgtatacgtaaacctacaatgcaaatagagtctagttcttcatcaaattaccataattaaaacttaattatctattattcataatactatttagtggaactccttgaatataaaaaaaactttaacagacaaaacaaacaatgttgagaatttcttaacgttagcactagcaaaaagctatacaaaaaaaatatttcagtttttgtcttttccttttttgttcgcccggttcaggttgtaatttgtttgatatagggaaaattacaacgaattcgacagataaaaagattcagataagtttttagattggatttttcaatttggtttggatttcgtagatacgggcttttgaagtgaacatcactagtatataccttcaagtggattaattgaaaagtaaacggtgtgaatagattggagtcaaaagttgtaggttaaaaacagatttactttttattcagcgtgaataattatgactcctttttgtaaattttcagaaagttttagttgtataatgtaaatagtcgctccaatgacggcaattttcacgaaacaacgtgggattattcaccaataaagtggttgatgcttatcgtgctcatataaaaatttatgataggtgctaattattgacttgcttaaataataaatatattaacgataacttaattgacttatctgttaaagtagtactcctattttataaccgtacagatcacagcattgggttctgtccttaggatgcggaagatgtacggtacgtctcctctctgacttaattctcatcattcaaaccattgaattttaacacacacgtcatctacatatcttgttctcgtctgtgagtactagt

SEQ ID NO: 56527 - DNA, 1253 bp, Arabidopsis thaliana landsberg
aggctttgtatctaggtcagcttttgtagtctacatgttggctttggcagtcctggttttcatcagagtgtccttttgagaagttttgcacacgagtatgtctgcagtgcttgtagtttgcgcaagggagtcaaaacactgcatataaaaatttttaggaatccaataattgatgtcaaatggttttatgcccttccatatggatatatggcaattgaatactgagactcctacatgaatctttctttacaatttttcttgatattagatatatgtctccactactcattcttgagggatgctttctagttatctgtcttcatcatttgtagcaatatatcattcagagtatcgataggtccaggcaggcaccaatgaatacagtcatttcttaaagtcacatttggattctgtagatgtccatatctcccaggatgcccatctggtcgcaatagcattgcctgtgtcgtgtccattaacttcagtctcaaaccactcttcttcatcccatcttcttctgcagctctaaattcctccctttgaatgtcgtgaaccttgagatctgcctcgggtatagtctcgtttcttctgtaaggttgtgtccgtacacagtcccctccttcgttccaagccccaccttcgaaatgttgaggagaaaaactccttaaaaatgccagacccttgaaattctcgattatagcttttagagatattcttaaagccttcctgtatccataggtcaaaggcaattcagtcgtgtttggtaacgcacagtattggcacccagaaatttgttggttttcatagaaaataactggccgggaaaaccagtggccggatgatataaccaggtagtcgagttggtcgagctgactcgtccacttcgtgtcatattcgtcgaggtataggctgaagaagttggacttcggatcaggtttagtagccttcactagaaatggtgaccacatgacatgaagagtgaagttataggatgtgtagttccatactttgaaatccgtatctggtgaaggagaaatgtcttcagggtattccacctacaaggaaataaaaaaagtcaacacattagagagatggtggttcgctggtgatcattgacaattagtttggatttttaccctagagagaaggcacaagagagattggacttggtttctgctaatggagtcaccaacaaaccccatggctttccctctaaccatttccaagaactcttgaggatcaaagatgggaag

SEQ ID NO: 56528 - DNA, 465 bp, Arabidopsis thaliana landsberg
caacaaagactctcacgttattaaaaaaccaccgtctccgtcttcttcctcctccgcggctaagcctcgtcacccggtgatcatttacacacacactccaagaatcatacacactaatcctaaagatttcatggctcttgttcaaaaactcaccggaatgacccactccgacgaagatctcggcggtggtaacgcaatgaccgatcccggggtggtaaaatcaatcaaccgaaccgtctctgaaccaaccgtcgacagaaaaaacaaccgcaatcgctgcggcggcggtaacaattaccttagaaactactccggtgccggaaacggaaaggggatattttttaataacacgatgataagtgaagatagtgaatcgtcgtcggtgataacaattgaggagaacatcggagaacatggacaggttaattcttctcttccgtattcagcggtggctattccttcaca

SEQ ID NO: 56529 - DNA, 479 bp, Arabidopsis thaliana landsberg
ggtttgaatattcaatcacgattggtaatttgcaggaggctctgggggaatcgtaaagctaattatcattcgtgggttaaaatcaagcatcttgtttcatgtcctttttccctaacgataggaccaccgttgtgaggttactcggccgagggaagtcaatttatgtgtatagtacattgcatgcttcaacaacaagtcttgttgaggtctctatcaagaatctataccattgtgtccaaacaaagaataattatcacatgaagctcgtgcttgtttttctttttggcaaatctaatttacctaggagattctgctatgctttcatgaacaagccgtttttgctgcccgatttctgatcagatactcttggaaatcttctcttattcttgtttgaaaatgatgtcagacagaatgagagagaggggaggaagaggtcatatttcacatgatgatctttgattgaaaagactacttaactt

SEQ ID NO: 56530 - DNA, 566 bp, Arabidopsis thaliana landsberg
gatggtattgaaaaacctatcaaacttttaaagttttgggtatcaagctcatgcttcacttgtggtatatatggagcatttgactcatatagccgttcccattcgactcccctaaaccaagggtgtgccttttaatgggaaacaaatcagacatctaatatgcaaaaaccattttagaatttgaaaggaaagagaaagatgttttaagtactttgatttcgtgaactcctttggtcccaagcctctgttcgacattgcagagcagtcttcggatgagatcttttacctcgatggagagcttagcttcatcagggaacttcaagcaggttttccagtttacaatctgcagagataaactgagcaattgtttgataaatataatactagtcacacgtagtagggattggacttggatcatgccataccaaaatatgactcaaaacaatttactctagtccaattaaatgataggctaattttgaggtaaatcatcaggactcgtgaataatcttataccaaactgcgcaataatgtactagcaggatatttaagccaatatatgcata

SEQ ID NO: 56531 - DNA, 554 bp, Arabidopsis thaliana landsberg
cctgcccttgggcagacactgacacctataacccgccgcgacgagcgcctggcactcgagccacaccctccggtcaaatggcaccggcaggttctggacgatgatgaggacacgacctaccacctcgcgtcacctccctatggattgtccgaggttggaagccgacgagcatccgctggccgcgttccgcttccctggcagctaatagaggaccggtgcggccgtcctgatacgcgacgcggaatgtaccggtacggccagcgaaataggagcgctgacgtatcacgcggacatcgtcacgtgtctcattgcccggcaggacagctgcgctcaggtgcccgcttgcatgtcatgccgtttgagttcctaccgactgccatgggggttacggtgagagtgctggttgccggagatcgcggctacatcggagcggtcctcgttccgttcttccgcgacgcaggccacgaggtcgaccggctcgacctcgacctgtacgagggctgcgatttcgggcaacaccagcgggcggtcagccgcccgccgatatgcgcgac

SEQ ID NO: 56532 - DNA, 172 bp, Arabidopsis thaliana landsberg
ttcatttctcagtgcactgaacctgagtctaaggggggaggggtgggatttaccactactgttagaatactatcggaaaacatcaccccatcttattataggatcgcaggatgataataaaaagaagatatctatgctaacctctattgtgaacgagctattcacaggaagc

SEQ ID NO: 56533 - DNA, 199 bp, Arabidopsis thaliana landsberg
ttataaccattaaaggcgcactctctctcacgtgggggaaatgtggattaacaggggacaccatatcaagctgaaatgcggctggaataaccgaccgtaaaaagcttatcattcagcatatgaacagacaacctgaatatgcaccatacaaagttctatctaagcgaaaagaacctatattgcaaattgttcaggagac

SEQ ID NO: 56534 - DNA, 1556 bp, Arabidopsis thaliana landsberg
ttcaaattcctatgtaaattaacatatactactgaataaaaataaataaaaagaatggtaaagggttgtttaattttgtcattgggtgaataagcaaatcgtgttggtcagtgcatgagcttcacctgtaagctgtaacgtctttctctctcacacacataaaaaaggaaaacgaacaaaaacataattaaagaaagaaaaagttattaaaatcttatttgacattatatatatataggtgcatcaactaagaaagtaaataagatttacatacgaaaggatcgtcgaaatgtttgtgattggagtggtgatggtgctattggcggttcttccagccgttctgccgccgcttccgccgccgccgatgatattgatgggaattccggtggtgctgatgctaatgcttatttacttagccatttattatccacctcatcaagctcattttctcttcatcatcttcctttgacactacttctaggcatgtaatgtgatggtagtgagacaatgagtcgatgatccagatgactcaactcacatatgtgaatgcgtcgtcgtttgatgataattgtgaatccatgcagtttctatatgattaaaatttagaccctttttatgttttttcttttcttgtcgttttagggtgattcgagttggatcgtctggtaagagtcattgtaaaatttgaagtgtaatttctaattttctaatcagttgaaccaattccgattgatcatttaattaagcatacagatatcagatatattatatcatcatgattcatgccatatattattttccagtactcagatgatcatagattcgagtttctacatttcactctgaaaataaatgcaagcatgatttttttattttttttctattttacttgttccgtaacgtcactcataagttaaggaatcagttctcgcttaacgttcttgaatcgctttggaagttcgtaagataaacttgaaaccgttttgttatttatttgtaagctaattaaaatgcatgaaacaaaattctagaagagtgggccaacaatccaccatacagtacgcatgaatcactttattatgaattatgcataactcgtctataatattgggaaaagctgaccattctatagaagaatggataattttgatcaactctgaacaatctgcctcgacgatttggtatccaattccattcgaaagaatgatcgctatagttcagagaacaaatttcatccccaaatgtaatggaaaaatttcatgagcgatttatttggaaatattaaggaaaattttggtcatgcctatatttcatgtttgtatcttagctttctcaagtttgatatgttcatatggtggtttcccatatacttcatgatttgttttcctaatgtaattctcaattactctcacgccgtttttgaaaaaggaaaaatctcacaccatatttaacaatattttataagttccgcaataaaatacttttttcatttctcgctttccaaatgtaaccacataatctattgaaaacatcacgacaaatctcgttatctaata

SEQ ID NO: 56535 - DNA, 875 bp, Arabidopsis thaliana landsberg
tcagaggaacctattttcagcgggggcttgtgacttttggagactcgagaatctaaacaacggcgatctacaaagataaagagttattgagcccactatgccaagttctgaaaaggcccacttcaaattataaaggcccagtttaagcccactatggaaacgagacagaagcaaatgggtataatcttcaagtcaagcgaacgatcggtgacggtgttatcttaccgccggagccggagtttcccactctattgtaataacagatatttcgaccggagtttctaagtgaatccaaatttgttgttcttcgttgcggctccatctctcgctgtgtatttatagtcaggtcttttgagttatcccattttgcgcgatcccgtcttcaccgtttccatcttccagcgagcacatctctgttgatcgataattttgtacctagttcaggttagttgcgtaattatacttgtgtaatttctttttttggattctctctgaactgatttgctgggcgtggaccttcggttttgttcatttcgtagtcctctatgcgaatgtttccagcgtttgatctttagatctgtagttcgattgtatgcttctaatagttattcgttgtcttgtacatttgatctataatgagaactgatgcgcggttttagtcgaacgtgacatcgtagttcggattagagagtgtactaatctttgtttaacaaagatggcatttcatcttttgactgtgtgatatgtcaaacccgcagaatccataaaagtagtttactttgatatgttttgttcttccccacccgaatgtttgtgtggtgtcttgtagaaaaagaaaggatgaacaagctgttggaacactgggagaaaagcta

SEQ ID NO: 56536 - DNA, 207 bp, Arabidopsis thaliana landsberg
ccctatggtttttccctccaatgggggcctttacctcatggggactgtgtttctctatgtgataagtacagcccactcgcctacctccggcttggaaatgtatatgctatcacaacgaacgatccccataccatccgtgaaattcttttgcggcaggacgatgtattttcattgagacccaaaacactctccgcaatccacctatcg

SEQ ID NO: 56537 - DNA, 1204 bp, Arabidopsis thaliana landsberg
tgttagtacatgaatactccaatccgatctggaattggcaatgaaatatatttgtggaccttcttgtaagaaaaaactaatggagaaaaaaacttgtagcaaccttggagcttgatgtgtctatctcaaaggattccttagacccaaatatgatgtgacagaacattaattctcgttcacatactcatatatatcagatgaaattctatttatgtttgaagataagattgaaaagaaaaattcaatgttactttttagtgataagagtgattgatatgatacattgagcctgtttttttttttttttttggtcaacgaaccatttagttttgtattaaatgtgaaaaaaaaacagtattactaagaaaagatatcttatacatttgattttaagaaaatagacatttatatatgctcttgtgtatgaaattatacagaaatcattattagttgattaatgaagaaatttataggaaattgtatgcttgattagaaaatggttgcatcaatatatgtgaaggtgcatgtcactgttccatacaactactgtacatgtcaagtcctcaaaagttttccatgcgacacatatatacacatgttgaatatataatataggttaggtgtacatggactctatgtgatgaagaacaatatgaatcaaatgataaattcttatatgttaaaataagatataagaatttatgctaacaaacagtttagaacaaagaaacaactgtaaaacatttataaaattaccttaatcctcttgttgaaattcctaaggtttcgtttgctacgatatttctcgatcttttctttcttctcctcaggactatacttgtaggctttgctcattccttctattattgcattgctctcactccacaccgtactgctctctcttctgctactcctctacacacataccaaaacagtgtcgtcttatgttatgatagaattattattattttcaaataaaaccccaaattttagtatgtttagataatttatttgtgttttggtgttttcattttacactcttgcaaaaccataaaacaaaccaacaatataatgtttcgttttataaaatgtgaaaaatttcatacgtaaacgaaaacataaaagttaacgtttgaaatctcgaaactgaaaaagtgtatataatattacttacgggtagatctccggcgctaaggggccgtct

SEQ ID NO: 56538 - DNA, 478 bp, Arabidopsis thaliana landsberg
ttatgctttgcttgcgatgcttgtttgcttatgagtgtagctgcatcgtttggtgcaggactgatccagcaatcactgaagaatgctttgaacttctgtcacttattgcaatagcgtctgaagatggggcatatgagttttgtgagcccggtgtaatagacatgatcttccttcaaatcttaagcttaacagatggtattgaattttcatgcatgtatctcaatgtcaatttagtctctaaaccgctgtgttagggctgatactttcgatgcaggtcttagctggcatatattaaatttgtgcatctagacagacgcttttgttactctgcttttgaaatgtggattgaaagcttgcctaagtgacaaactcacataacctatcgaatcctgtcttagctagtatttagcagttgtgttgtgggttcatgaataccaattctttgggtcataactcgagaaaaagtcattactgttta

SEQ ID NO: 56539 - DNA, 600 bp, Arabidopsis thaliana landsberg
tcaataaacaattttgtttaaagatataaaatccattcatcctaataaaaatagattttgttttactatttttataatataatttactaaatttacataactactttattatattattattctttcattctaaattttttatttattggtagaatattttatacagattacttgagtattataatactctctgtgactctgtatcattagattatatacgtgcatcttttttttatttcctcaattgtaaatagtattatctccttcattttagcttttgttttcctttgatttttttttaactcagctttgttttccttttatatcaattgatttcttgtagcaaaatatattgaataaaaaattcgttattttttgttttttgtcggccaaaaaaaaattcgttatttaaaaactgaattatacaaacttgttcatatctttttttatataataaaatattattaatcaacccaaactgggaatgggctttatgcccaaaggatacacagttacaaaaaaaaaaggaaagtacaataattcattagtttgttttagtaattaaatttcaatcattaacccaaattatgaatgggcttt

SEQ ID NO: 56540 - DNA, 452 bp, Arabidopsis thaliana landsberg
  unsure (1)..(452): unsure at all n locations
ccctcccctcccccctctnccccctcctcccctcccccccccccccccccccntncccccccccctctttcccccccccccccccnccccctcccccncccccccccccccccccccccccccctccccccccccccccccccccccccccccttttccccncccggcttgttcgcccccccccccccccccccccgcgcccccccacacccaccccaccccccccccccccctccccctctccttctccccccccccccccctccccccccccccccccccccccccccccccccccccccccccccctcccccccccccccccccctcccccccctccctcccccccccccccccccctcccccgcccccccccccccccccccccccctccccctcccccccccccccccccccccccccccccccccccccccccccctccccccccc

SEQ ID NO: 56541 - DNA, 604 bp, Arabidopsis thaliana landsberg
  unsure (1)..(604): unsure at all n locations
taccatacttccaggtaaagagacaacaagctattttacatatttccaccttggccaattttgcattgtattcatgagagctaatcgattttttttttcttgtagaatcttatggaaaagcgcacgaggtaatcaatccggtcttggagcgtcgagagaaagttgacaagcttcgctcgactgtggggcttctggaaccctaccgcctgttcttcaacctccccaacacattgcaggagagcatcaaacaaggaaaatatcaacaggcggcacgcgactacaataagggcaaggtgctcttggcgcaggcattcccaacaaactctggctccgcagcaagcgacagcgcttccactcattcacattcttcttcgcccagcctgaccgagacaaagcgcagagtgtttgatagggtttggtccgaagttgggagaatcgtggcaagattaagggccgatttggaatcgcagctggaagaaccttggcgtggaatggaggagcacgaaagaaatatcaagtacgattttgatactgcatccatattggtatcacaaataatcatattctttcatttccctctacttaccctcacactntaataact

SEQ ID NO: 56542 - DNA, 624 bp, Arabidopsis thaliana landsberg
  unsure (1)..(624): unsure at all n locations
cccccccccccccccccccccccccccccccccgcngggatggtttccccccccctgctcccattaacgacccccccccccgccccccccagcccacgcccccccccccccccccctttcccccccccattgttcccccccccccccacccaccacccccccccccccccccccccctccccccccccccccccccccccctccctcccctccccccccccctctcccccccccncnctcccccccccccccccccccccccccctccccccccccccccccccccccccccccccccccccctttttttttctcgcntttttgttccccanccccccccccccccccgttccacaccaactatccacccccccccccccccccctccccctctcccctcccccccctccccgnccctcccccccccccccccctcccccccctcccccccccccccccctccccccccctccccctcctccccccccccccccccccccccccccctccccccctcccccccccccctccctccccccctctccccccccccccccccccctccccccccccccccccccccccccctcctcctctcccctccccccccctcccccccccccc

SEQ ID NO: 56543 - DNA, 454 bp, Arabidopsis thaliana landsberg
ttcgtgccggtgccgggatacaatacagatcaggtctttctctttagccaggccattctctagaggagagttccgagaatgaattccaatctggtaccaatctccgaaatcgtattgtagagttcaatcaaaaggaaagaaagagttctcactttccagtgcgccagttgaagactgcagttctccagggccaacaaatcaaactgcaatcgatacccaatgagtaataatgtgtagaataaaagaacggatcgggacctacacctaagatttcggatctaactagatctggttcgcttgtggcttcaggagaagtgccagcttgatgaaccgacccaagcaatagtggcactcccttcttcgtctactgcggcacgctagtgttctcgtagattagatgaataaaagtgtgagccaagggaatccatagagatttgcatagcataaaaaatag

SEQ ID NO: 56544 - DNA, 1354 bp, Arabidopsis thaliana landsberg
gatgaccttctgacaaaatgaattttgtttagtagaagatagaattccgtttgggactgatcatgtcttaagagttgttttgcaatcatgttgtaaagtcgagttgtttacatcagcaagagaagaagaagtcaagaaactaagaaaaaaggattacactgttttatttatttaatgatgagaaaatcattgttaagtaattgtgcttaactttcaaaaccaaacccaccaaacccatatataaagtacaaatagcctaaacctaataaagcgttttgaaaaaaaacttccacatgcgttaaagtatgtaatgccttatagcctttttgccttttcttgcgaatgaaccgggcatttgttttttttctacacttctttgttaccatttctataaggttgatcgtttttaaacatatttctttcaacagtctcaaaatgtaatcagttgggttttgacttcttatccatagtattctagattcttatagatgatgttacaagtacaaaaatttataagaattgatatagctactatatttccaacacataattgggttgtttcaggtgttaagcacgtttaaaccaaaataattttttaaatatacgattactgaaaaagatttgtataatctctacttaagaatcacctgtttcacttccattgagatccagcactagtatagacctatgatactatgggcttttacatcattgttctatctaccgggccatacatgctattaaagatctattgaagcattatagtttcgaggataggttttttcaaaacctagatatatagaaactttttcttttggacaaaagatagaaactttattggtaagtatttatgaatgcttattggtgcaaactgacgatgggttagttttagtaattctatcaaagtagtttgcattttgattggtggttatagtcttatagagcccgtcttgagggcaagcaaataaagcatgtgtttgcctctgtagtataagtaagttctcggtccatttttcacaaaatatcctttaggtaagatagtgtacataattgtatacgtgaaagtactgtagggttcgaatctcacatttacctcatttcttactttttcttttagacgatcgtattttatttttttttttttaacgtctgaatttttaattagttgattatttcataggcccaatatgttttatttattgcagcccatatattttcaaggtcagttgacacagtcccaacggaaaaaaaatcttaagcgttgattttgagactaatcgacggttgttttagttttgaaaggtgaaagcaaatcaatgatctatatttattgagcgttggtgctcaaacttat

SEQ ID NO: 56545 - DNA, 554 bp, Arabidopsis thaliana landsberg
ggaccgctatagactggttcatcttccgccgtataaaaatccggcggtctttttggatccaaatagcgagtttgaaattcataagtgcctttggcgacaaacagattgataatgcacgcggtctcttcgacctgaccgcctggattatcccgcaaatccaaaaccacgcctgaaatattttgctcaatcaatccgatcaactgtgtgcgcgtctgcgaacaagcgtttttcccaaacttattgagagtgatcagtccaactcgagattgcccatcgataccgccttctaaaagcttggacgtcacgctggcgtaaactttttcgaatttaaaaatctccaggtattttttatgcccgtcgcgctcaacggtcaggcccatgcggttttgttcacgcatacgaaaagcctcggccacttgcgagggaagaagcattcccaccgaatgcccattgatcgccacaatctggtcaccctttttcattcccgccatagcagccggtgagccatcgagaactttgcgaaccaacagacgatcggtcaatcggcgcgcaac

SEQ ID NO: 56546 - DNA, 272 bp, Arabidopsis thaliana landsberg
tctggatacttatgggggtttttcattatttgggaaagtaaattttttttctgatttttttttctttctaaactataaaaattcaaataattcgggtcaattttgaaattacaaaatacaaattatgcataaatacatgtaaacaaaaacatcatttgtatgcttcaatacgaaccttatgaaaaaaaatccattggcataactaattaaattaaagtttcacacaaatacaactgaaaaaaaaagagagggacgaatgcacgtgcataaac

SEQ ID NO: 56547 - DNA, 1124 bp, Arabidopsis thaliana landsberg
tttatgttcaccgcctcttcccattctgccgttgggagatggttaatcgggcgtatatagttatcatcttgccaaacaatctccttctcactatcatctccttcattatcttcatcatcatcctcttcttccttcttttcattcttaatcgttatcttattaaaaaactgattgaaactaaacccccaaccatcagcatcttcaggccaattaggatcctcttcattcacaacaagtgggtaatcagcaagaagcttctgcatcttcctcctcttctcaaccatatcaatctcttcgtcttcttcaatatcaggatgcttatcaatcacctctcttatcgtcttcctccattcccgtctctctactggatcatcgagactcgcttctttcccgccaaaggtctcttctttcacttcatcttcctcatcttcactgtcactatcttcttctttctttctccataccttcttcccaagtttatcaactaacccaaaagctttcacatttctcctcgacctcataacattccacttctagcaatacctcagagcaaaaaaggtttcaaattagccaattcgcaacttaagtaatcaaaattagagagttaggtaatcagaaactaaccgaggaggaggcaatcttcaccgaaccaaaagagtcatatctcaacgaagtaacttcaaaacgatctcttttgcaatgggaaagtagtgaagaagggctgaatccattatcctgaacagggcaagtgaactgtgtcgaaaatggaagaatcattcctcctgaaacaaaatgaacaagattaaattaatcgaaaacccaatgagatttttcaagttcaattccaaaattaaatcgccaagaaaaaaaaaaagaattgactaaaaaatcaacaaacccagcaacagaactgtatttgccactgcttcttcttcttccccagcagcaaaaacaaaacacttaaaaccctatagaaacctctgttttgttatttgggatagaatcgtagactaaaaactatcaaataagaaaatgacacgtcatgaacatattgttgttgtaactcaaaaatgtttttttttgttttttttcgctaataacacaggacggtaagtcggtaacgg

SEQ ID NO: 56548 - DNA, 527 bp, Arabidopsis thaliana landsberg
cacctatatattgttaggacattatcagcatctactagagaaaaattcaatgttaaagaagcacactttcttttttgtcaaatagaaattgcccttcgtggttgtatatatggacgaattacaagccatccgcccaactttgtattgagacatggtaggttccttttaggttttctatagatagcatccggttgccattggaaggatatacaatgatctgtcctacatttttattattatttaataaataaagatctgcattagccgggttggggtatattaatatattatgaagattcaatttatctactccagcattatgaatcagttgaatgcaatagtcttcagtttctgcgtcagtataattaccgtaaacgtgtggtaaagttggtgcgccgaatcctcggtatgcgagctggacacgcattcatgtgtttactataaccgagggttgcgggatagtgaaataagctcttataggcgaacagcttggatcaattggaatagactatctcattagaatcgaa

SEQ ID NO: 56549 - DNA, 325 bp, Arabidopsis thaliana landsberg
ttgccggggttagcgggcgccccctccttgtttggcttaacggggacaaaatcatctccgtccctgtggatccatgttccccacaataacttcggataggaactatgccaaatgcacatttctactacaaaccgcccgaaagataagtaaagactgtctggcacctgcccggaccgttcggcctcatgtgcatgtgcggatcgttcgccccgttgaagatctctccaacccgaaggtgctggattcgatataatgaattatagtgtccacgcagaccgtccgcatcaaactttatctaaggatacatttaatgtggttatagacg

SEQ ID NO: 56550 - DNA, 1062 bp, Arabidopsis thaliana landsberg
ccaacactacaaaatacctaaaacaaaatgtgtttaatttattttgaagcttgtgatatctaaaataagtttaacattatggatattacaaaaaataaaataaaaattattatagttcatactagtaagaaaaaaagaaaaatggaaaaaagtactaacacgcatggtttacggacaactaacccactaaatgaagttaatttaaaatcatttaaaaagttgcctaacctaatccatgtctgcgcgtggaatctcatgcgtacttcagaccaattgtacgacagggtgctgtttccaattactccacccgcaaaatgaacgcgtgaaaaaccacgcgccacgtggaaaaccaagaatctttctgatggttcggaccataactccgaaacacataagacaatgacagatccaaacaaacaaaaagtaaaaccaatccccttcaattatcaactttaactgtttttgtcgtcttcctttttctttcttatcacactttcagcttgagatatccttaattaataatcatctctctttaaacttagagaaatattcgggatttatggttttcgtcttaatgaggacacaatgattattattttaatgtaagattgagatttcttctttctgtcataactcataaggttctctgccttcggtgtaatctaatcatatactttttattcaaatgatgtcggctcaactattggcgcattcttatgcgatcaattcttatgttactaatttattgatcaaaattgatactcacacactatcgattattgttttctacctaagaattattgcaatttagtcactacaaataaattaaaaaactagaggcaaacaattcgcatggaaaacaaaaactggcaatttggatgccatgaacccgaccgtgtatgacaatgacagttcatatgctcacattattactattttcttactacttttgagttatgatttctcaattatcctctttgtatctttaataaagaatcaacaatttattccgtgttccataaccccagaacacattattcgagagaaatggaatcagccaat

SEQ ID NO: 56551 - DNA, 454 bp, Arabidopsis thaliana landsberg
ttcttttagttagtttaaaggtataaagtgttaggggagggattttattgatttatattattaatggaattttttctaggtttgaagtgttacccgatatatttcgataattaaaaatgtaatttttccagtataaaaagtgagaataggttacatttacttttgtcgaaaaagtaattactgatcatgacttggatttgagtaagtatctaaggctcctactggtgaaaaaatgtacaaaaaagtagaagaattgagtggaattgtttttctcttgttttaatggatgaacttttatttttgataacactcttttcttttgtggatcaagataaaatggaggaaaaaaggttcttgtagaaaatgtactactcacttccttaaattctatagtttttttcttgataatctttttctagatacaattagtcttttgtttccaaacaaaaattta

SEQ ID NO: 56552 - DNA, 572 bp, Arabidopsis thaliana landsberg
tattccacgcttaatcaatgacaacattataagtgtcaaatattcacaaaatatctcatcaatagtttctacggttaatttcggttgtgaattgagatcattagttttgttttgtttccttttgacaaaacaaagaaagaactaatgatattaaggtaatcaaactttcataaacgtcactcagagaatcaagaataatttctacatgatcaatggaaaagatctccaaataaactatgacataaaacacataatctttcattaaattgccaattaaacataaaattccataaactgtttagatattgttgtcgacctgtccatttaactttaagtcagtcagggaaattctaaaaatatatatgttttaagagtacaatttatattttcatgatcttattccttttgtaatcggcacctacatgtatgtgtaacaataagagtgagaaacatgtacatattttttcttttggtcagcaatactcatacatgtttaattttattatacataatgttttattttttagctaaaaaaaacataactatgcttattggaaaaaatgttattaata

SEQ ID NO: 56553 - DNA, 1604 bp, Arabidopsis thaliana landsberg
agaaactatattttaaacatatctccacatatatatcttcagaatgttaaatgccccagtaacatgaaaagaatactacaaaaaaatggaaaagttatccgaggacagatgtaaaccttgagaattggcattgctccagtatagaacctgacagcatcgccataggcttctgacttgatacatttttgcagtcttgcaggtaaatcatagatgaactgctctttctcacaaaaattaatttgagtaaattcatattattgctataatgatcaggtgacaacacagcagatatataagctagcaaaaatgactcattacatacctgaactttacgaagaagattacgagtccggtgcagtttctctatatgttctctcttttcgaaagagaagtgttgaccccatcactctttgattgtactgacattatctgcatgagtcagttgggagatatactatgagtgagaagttcccataaaaaaatccaaaactacgtgtatcatatgtgttcaaaacaccttctgaagaagctggtccatattgccttccatcccgaaaatattactcttcatcctaccaggtaaagaagcaacattttgaatttaatatactaccgagtggtgaaatcaaatcatatagagaaaagtgttaaatgacacacttaacacctgaaacgatccatgaaccattacaagtaccttttgattgtatctgttgcactgataaacttgttgtaattttcatagactagcatttgcaagtctgtgtcgagatttttaatctcagcagccatttgaacatgtctttgcagaagcacctccaaattcgactttttgatctgcacaagccaataaaatcaccagactgtggcatatatctcaatcagatcgctagcactactgtcaccacacttaacacaaacctcataaacccaatttagttccgaactatcaaccattgcaggaagatctttgataagaacaactaaatttgcagaattctcataagtttgcatagaaaataaccaaaccagaccacattgatcaagagacctctacaagaaccttgcactgtaaacttcatccgaagggtagaattcaaaactagtaactatattcctgctccagaagataacagtcggatctaaacatattctaaatttcgaactaaccacttagaccaagatcaaagagccgaatctaacttcagtgaatcgaattactcaataatttgatacaatatacaagctattgacgcttgtgttgacgattcacgaatattctgacaagaaacgaagactaaccatgagatccatgtactgatcagcatcaaaggaagtgctgttgatgttatcgaaagaggcgttgatggaggaaccactcgtcgagattgaaggatccggtgcgtagaagctcgacaatagatctctcattctcttcgccttttcgtccatcggagctgcctccgtcgccatttttctaaactcctgcttcttctcgacgacgaaaatatctgttaccggaagcagaattttggcgtcggagattccgaatgtgaattgaaaaagcaagaagaaactggatccgactaatcaactgggaaacg

SEQ ID NO: 56554 - DNA, 380 bp, Arabidopsis thaliana landsberg
tgtttatcttcgaattcgcaatctttcttacttaggggaggtgtggagtaagaggtgacaccagctcaggctgcaatgcggttggcatgatcgaccgtaaaatcctgggcatccagcatctctacgggcgacctgtttatgcacgatccaaggttctttttttgttaatagcatttctattcctttttcttcaggagacttctctacctcttgtccgtacgatctctgatttctgttctcctgtggcagcaatgcagcatcgactcgccacaaaatggcccccttcctcctgatgcgccctcttggtgccaggccccttttgacccccatcttacaacgtggtggacgaggaggaccagccgtcggcggtggcgaaagtc

SEQ ID NO: 56555 - DNA, 622 bp, Arabidopsis thaliana landsberg
ccttctcaatctcactctcccgattacactccgtctgaaacctctccctctccttcccgatcacgatctgcttctccgtcttctcgcgctgctccctacggtctccgatcgagaggcggtgctggagagaataaagaaactgagaatccgtcgggaagtcggagttctaggagtcgtcaacacgctgggaatatccgtacgttcgccgatctgaaccgttctccggctgatggcgagggcagtgattcggatgaagctaatgagtattataccggtggacaaaagaggtacaattttcaacagatctgatcatagtttggaaaatacttagatgataatactgttgagaaagtgaattagggcaacatgatcatgaacttgagcaatgtgcgtagatcaatgatagtttagggattgaccatatcttgtgtatgtagctgaattgtctttcttgaaattcttatatagctggagaaagtgtatgtttgtgtagctaatagagttttgtttttggattgtgtaatgtgttgtagtgggatgatggtacaagatcctaagaaagtgaaagatgttgatgactttttgaccaactaggcagtcagctgtagacagacctgttgaa

SEQ ID NO: 56556 - DNA, 1307 bp, Arabidopsis thaliana landsberg
  unsure (1)..(1307): unsure at all n locations
caagtctcagggttttgtgtttaaatgtttctgcagtggtagtaatacttctcatcctagcttggatcggaagtttttggctcagctatgggttgcagataaaaaaaagctaaaggctatggaaaagcgatataagaaagcttctaagcataggaactacactaaaaatgatggatttgatgtccattttgaaactgttgagcctacagtggagcaaccaccggttagccagtctatgtctggtcttctgaagcctaaaacttctgatgaggtgactcattatctttcctttggctactaaatcatatttgtatgaattgtgcttgtaacttggttaggtaccatttaattctgtgacattagtgtagtctaaaactgaacaatacaatgtttttctgttaactagatggaaccaagtatgggaaacttactacagaagataaattttgttactttttagtttctgtttttgtttattaggttggaaatttagctcattgtactcttgttatccttgcatatcttgaaatgtaggagttggaaatcataatcttattcactttctttttaggccaaaattgcaactctgcttgcacgatcgaatttgctggttacaagagatattgaatgggcaaatctggttcttggttttgaacaggtattttttctgccaattctcatgttcctcatttggctatgtaataccgttgttacttgtttctgatgaactaatcataccatgtttgtaacttttacatatcaaatgtcccgttaattcctaccgtttcatctccttcctctccacatatatctgatataccactcttgtaatctacttttgtttctgcaggaaaatcgctatattgtagtagatgtttgctatcctgaggcagtaagtgctatctcaacgcatagattctgggcttacgtttacggaagttttgattgtggagggcactactattacataagaccttgagttcatataaaattttgcgaatttcaaacctcttttttctcactttcttgacagcctgtggggtctatcccagaacaannnnnnnnnnnnnnnnnnnnnnnnacattctcactctgaaattttctttctccatacctcaactaatatcattatgtgttaatactttaaattggctgtcaccaatgagcagtgtttttaagttttgacgtgttacaacacaattcattgctattcctaactagttgtgagtatacttggttagcatgtctgcactttttattccttatatgagcatatgaatgggaaggcttgaactttctttgataat

SEQ ID NO: 56557 - DNA, 461 bp, Arabidopsis thaliana landsberg
tctcgacgaagctgggacaagaagccgaaatgcggcaagctataccggccggagagggcgaagaccgacgctaatctttggttcacacctgattctacccctaaggagtatttcccctcactcaatttctaaattggagctctacgtaatctgcccacggggacagcggaaaaacttaaaggaatcgcatgttccaagcgattcacggtggtataatccaattggataggttggggagcatcacggttacctgggaatacttaaacggggaagtagaagacgtgagctaactcgaatcgcgctggtcacggaaggattcttgcggcaggcaacaaacagggaggaaaggactcgtgggttcgtcagtggaattgagccaattgaatgattgcttgagcgcgtgatgcaacaacgaagcaacgccagggcccaattattggtcggcgaccgaggatggatga

SEQ ID NO: 56558 - DNA, 365 bp, Arabidopsis thaliana landsberg
  unsure (1)..(365): unsure at all n locations
ccatctaactattgcatacacacacttttttctagaggcccatattcatctaataacacatccgggtctgcggctagtgcagtacctgaggtcaccaaaattgtttaccctccaccatatcatcgatttagatcatctgctctcgttttccatctcaagaagaaagttatgctgacttgtcgtttggtgtctctccagttcttctagaaccaatttgttacacggggggctcntancttcctgagatgtttctacatgtcttctctagtcttggtccactcttctctttctattaccgggggtggggcatctctttcaccctgaaagaatgggatatatagacatagagggaagatgagtaaagc

SEQ ID NO: 56559 - DNA, 299 bp, Arabidopsis thaliana landsberg
ctttttcattccctctccccttctctggacccaatcaagggcgaggctgctgcctcctgtcactctggtgagcttctccctcccctctctggtggcctagagtcaaattaatatagttcacaagcttcaccgcctctccacgagcacaaggcaccactttcacctttctaggcacgcccagcgaccacaccgccgtgagagcccgccacctcaccgtggaccggccgacccaagcccccaccgtccaaaattgaccccaccaccatgacccctagccctgcccgtgctaggccacctcc

SEQ ID NO: 56560 - DNA, 335 bp, Arabidopsis thaliana landsberg
  unsure (1)..(335): unsure at all n locations
tttttgaaaaaactactatttttataacacatnagattcaccatctaattgggggactaataacattaaacaacacattttatatttgcaacataaaattaaaaatagaaactacaatgtataaagtcatatgaagactactaacactattaattaacaaatttaaacaaactctaatcacataacagttaactctcgtcgaccacaaaaaaccgacaaaaataaaacattacaatataaaaaatatatctcgctttgcgcagacggcggtggttgacgactacggtggacaacaatgattgactacgtccatgtgtggaggcctcggctaccgt

SEQ ID NO: 56561 - DNA, 410 bp, Arabidopsis thaliana landsberg
  unsure (1)..(410): unsure at all n locations
ttctgtcttctgacgcttctggaggagtccgaaggggggggtagatccgaagcaaaggacccatcggcccgacgcaatcggtgtcgccttacttcctccgacctcccggcgatgctcggagtggaggagctgcttgcgggccccttacccttgtctgaggaattagggaccgcaggaggatccctaagggccacgtcagctggctgggagcctccgactggcgcaccaggaatgtggatcccccggtgggggtcccggccgccgatctgacggaccaccacnnnnnnnnnnnnnnnnnnnnnnngtcgggccagcaccgctgaccgcaaccctgggttgtcgcagagcggcgaaatgccctagggaggtatcaaggattcaggggtaaaagactcaccagtgatcccctc

SEQ ID NO: 56562 - DNA, 271 bp, Arabidopsis thaliana landsberg
  unsure (1)..(271): unsure at all n locations
ctgttcgtttcacatggaagatgtagcgatcctgagaggggagatatggctatcgctatcgtttcnnnnnnnnnnnnnnnnnnnnnnnnnnnnnnnnnnnctagcgttagtcgaagtagcgctaaactccgataacaccaccgttccacgagccaccaacgcagatatgatcgccatctactccggcaccttgttccagctcacttctccctgtaaatctcagatcttgagaacagcgattaacacaacaccccaaagtgattcgattaga

SEQ ID NO: 56563 - DNA, 1083 bp, Arabidopsis thaliana landsberg
attttattttaactccgataaacaaaggtgatgtctggtagttaaggttcatagtgtaataaaataataatgccgaatttgctgcataattacggctaaaattaaggacgtgatagagaatttcagtttaaacgaaacttataattgttgaaatgggcgcaaactaaaagggcactcagttgaagagaatggatacatacagttacaccattaaaattttatgcaactctttataaagatattcataccattaaaaaatggtaagatataattaattcattttaaggttaatcatcctaattaacaattcaaggactatgtctaatccctaataaattggattatttgcagaattgataataatagtatgtcatataataccttatctatatctataataaattggagtatttgcaaaatctgacataacataaattcaaatcaattaaattttacattgggttcttcctcaaagttaccaaaaatataacgaagtcattgattgaagatacagatgcgtcatcgttaaacatatacaagatgatctcaaaattttgtttctttaatgattcaggaatttaacgtacgataagagttaattcatgatacacattgataaacacacaaaatgtttaaactaccacgatatgacagaaagtaccgtatattcgcaatatagtgaatgagttatgttacatgaaacaatgcaataataatctgttaaatgttaactgaacaaaaactttggtacgtgtatattgtctgcagatctgcaatacatgtttacttagctattgatcacgtgtcgtctaccatctttagtttcttttattttcgaagcatcatcgagttaaaattaatgacaccaaaacattatactatagctttcaaaatacaaaatcagaatcgtttacatttgtcggtctatagaaaaatctcgaattatgttttctgaaatttccctttctaaatagacaatacattgaatgattaggagttaattagggcaatggattaatggacccacctatttccccaccaattattattgactcacgcaattaacactattcataaattaat

SEQ ID NO: 56564 - DNA, 424 bp, Arabidopsis thaliana landsberg
ttaactattgggcatgtatctattcagctcttgtgtgaaccgcggaaaccaataacaatatcgatcaattacatatttcagagacaacgaaaactccagtagaatcaggaccatgctagataaaaagactctggtgatgaaagaaagaaaaaagtaggcattgagtggtaaaaagtggagcaaagcatagttttttttacagatggttttctaattcacacatctctagtttcatgtcacacaactctactatattttccatgctacactcctgggtagtgcaggcaagcacaacgcagctgtataaaatctagaagacaatacagtttcagttatatcagcacataacttcattgtgaaaaaatgaaaacaagtgccaccattttaaaatggttactgcatcaaaaaacaaatcgggattctt

SEQ ID NO: 56565 - DNA, 580 bp, Arabidopsis thaliana landsberg
  unsure (1)..(580): unsure at all n locations
cccccccccccccccccccccccccccccccccccccgggaattcttcccccccctctcccatccccacacccccccccccccccgcgggcccccgcgccccctttcccccctgtgttctttccgnccacccaccncccccccccccccctcccctctccccccccccccccccgccttccccccccccccccctcccccctccccctcccccccccccccccccgcccccctcttcccccctccccccctcccccccccccttttttttccccccctttgtttgccnccccccccccccccccccccccccccaccaccccccccccccncccccccccccccccccnccccccccccctnncccncccccccccccccccccccccgccccccncncctccccccccccccccccccccccccccccccccccccccccccnccgctccccccccccccctcccccccccccccccccctccccctccccccccgctcctcccctcctcccctctcccccccccccccccttcctctcccccccccccccccccccccctcccccccccctccccccc

SEQ ID NO: 56566 - DNA, 1096 bp, Arabidopsis thaliana landsberg
ctcggtaattcgtaaagagacagctacacaaataaatcaatcaataggcatgatctaactgacaatatatgccgcaacacgagctatatatatccgtctatgatacatatttttctttatatcaagcttttcaaatgtataggtataagaactcaattttatgattatcgcctctacacgttgtttttgtgctttatttcttctagttttgtatatatttgggtcatgcgtgaagcggtgagagtactttcggttggtggaatgtcacgatgagcttcatcttttgaccttatcaattctagtagcggttcctaacatggaaattcacgtatacatgatacgaaaactgttacatttcgtcactttcgtcaatatttctacgcatattattcatataggttatctattttcttcgtatgtttcacaaaaaacgtattttggactttctagggtttgttaaaatctctaatagtttattcatagtatatatggaaggaatattgagacaatattactcgaaattttaattatgcatggatatattcagaccaaaatgtcaattagcctccaaaatgtataaaacaagataaaggatttatagtggtcaacccattattgttataataaaggattttgtagttaactatgatacattgtaacacatttgaattttgtggcagactagcgatgattttctgaatgacctttttcaaatcaattgttacttgtaaaaatttgtcattaacaaccgtaagtgataatcggtagtagctactaatcaaatgcagcggttaaataattgataggaaaaaaaacagcataggcattgttactttgtgtttacacttttgaataaaaagtattattaagtaaaacaaataaataataaaaaatattattaaatcttggaataaagtacaccaattttgtcataaataattaactccggcaaaactttaaagataatggagccacactatgtcacatgatcgatgctccctctaatccgcaataggtgcttacatggatgttttaccgaatttggcgaacgagggttccacgtgttttatataagacctcgattgttgtaatggca

SEQ ID NO: 56567 - DNA, 1815 bp, Arabidopsis thaliana landsberg
  unsure (1)..(1815): unsure at all n locations
gatgaaaatgggttggatacttgcatcctcaatcatgcaaatttggtcctaaattggctttaaccaaaaaaaacaaaaaacaaagtggtcctcgcagtaagcaacgtgtcgtgtgttcgttacaactgctttattggttcgggttattcaacactattacctgcaataaaatctagtaacaacttttttcatagtatatcgatcgttagatcatctatatatacataagaggacctataaataaacttacaagtccacgaagggaatatccccaaggcaagactatatttaattgccatccctagcaaactttcaacttaacctttttcagtgctaacaatatattctcagtaaattccgaatttaagtttggaaggaggaagagaaacgtatattctcagactaacacctgatttaattaatgtggtcttgttctttactaagttaatattatgagtgacacattaacactaaccgattttattaatggggtttgtcaattgtcatttggttcagtaagaagaaggagaaatatgtttttgtcgaagcgtcctcaagcttatcatttgatgcaatgcgtggtagagcacatatatgtttgcgattaaatggtaactagagcaacatgtttcattacttaatgaaaaacggcgtcaacacataaaaatatataatcatacattgtcacaatatatacgtttagtggcttgccatgaccatattttagaggatgcataaactttgatagataatttgttgcatgcaaaagctatctatagccatgtaatacttgtaaccatcggataaagaagtgttatatgcgagttgcaaaccatccatggtcatcattatattggcctgaagaacatctttaacaaaagataaaatgagtggattgaaccacctatggagattgatgaagatttcattctaaaaacatttcaaagccaagaactaatgggcatccactttttacatcaatgcaacactttttagatgagatgaagatttcattctaaacatttagttaaacgtctagtttaggcatccactttgttcatcaatgcaacactttatagatgccgattaacgcatagcacttaataaaggaaacatggattattctacacattggtttatgctaagtatatgtcacacttttcattaccccatttaacctttttgttatgtatagggaatccagaataagagaaagaaagagatctatcccacaaagatccagtaatcacaagatatttgcaaatttccccacaacttttatttcgtccaatacacccctcacacagcttctgatcccctttaacgcgatgacagactcttgtttgaactcaatggtggtataaagggagaaaaacaaaacaaagtccacttatctcagattcgacacaaagtagcatctaagttcgggagaaaaaacgagagaaaaaagaacaagttacaatattcgaccacttttgttcttctgtttgcaggaggacaaaaccagactaagtaacgagagagagactgttcttagctnnnnnnnnnnnnnnnnnnnnntcggagaagatggaggcttcaagtcagggtactgtaaaagagttaagaaagacatcatattaataaacgataacagaaacccatgtacgaactcgtaaatcataaagatacttcttcaaggatcaacggaggtccaaattataattataaacagcttaaaggtttctttatttcccaccaaaagagcccatttatgagaaagtagaacattaccgatgcatatggagagagaggtcttgaatgaggttttggttt

SEQ ID NO: 56568 - DNA, 1441 bp, Arabidopsis thaliana landsberg
cgttgtttttggttcggtctagaaaccccattggtttgattcgaagttgtgctaaatgtgtttctatttcctttgttttcatgatttggctcgcccaagatgttttagatttgggttcggccagaatctgtatatatatcgattagggagttttctctctttaccgtgctaaatgtgttacatttttaataatctttttaaaaacaagatcttcaaagtctacactcgaacttgagacattgaaaatcagtcttctaaagaaggagagtaactggagcttgaagaaggagagctttgctttgatggtcgaatcgatgaggtcgcgtcaaaatctgtaaaccggaatctgatccaactcgagaatttgaaacgatcaggcagtcggattgggcctgataggctattaatatatatagcataaagaagcccaattatataaaatgtccaaactcatcatttacacatttggttataaaatacatcaattcagctgtaacaagtggtactgtagtacataattttaataaaattcgaatttccaacacttaccaatttcacgagctactcacttaaaagctatacttttcgatgattaaaaaaaaaaagctatacttttcaaacttggccacacaaaaggcttacattaacccacacagagtaagtgtagtcagaagccaactttggtgggctttgccactagcctataataccctcggctaacatatgcttatcctctaccagtaaacattttggaaagaaaaataaatccacaatttatccttgatgttaaatttaactaaaattaggtacacttagactaatcaaacaaaaatgagattttcttggctgataaattagaaattcgtatttttttattttactttttgccgtatgttttgttatattattagaaaattgataaagaaaaggtttaacaacaaaactaaaacttggcatggtcaacttcagggcggcatggtatggcccatgaagcatcatgagttgtgttgtaaaagcccacttgacgtcaaaagttgcaacttgttgcgacaaaaggcaaaaattcctaaatttcgaacgaatcaaaaaccctaaaaagcttaccgaatttttcttgtggtaatgcagagtcaatgtacctggacataaatggtgtgatgatcaaacagattagcttcaaagcctctcttctcccattctgttctaatttccgacaaagctccggcaaaatccatcgtcctatcggagccaccatgaccacagtttcgactcagaacgagtctactcaaaaacccgtccaggtaaacttctctgtttattagtgatctttactttgatggtaaatagtcaaatgatgatgaacaaaggcatgtgttcgattctcgtgttactggtcttgaaagatctaatcttgaacgggcctcctatttgtttgggcact

SEQ ID NO: 56569 - DNA, 1559 bp, Arabidopsis thaliana landsberg
atcaccaaagattttagtctcctcccccttaacccagtgtctttgatttgctaacacagccattgagaatcattccagtctatctttcctatgtttattgtgatgtgtctagacattttagaactgtagtttagagtatgaacactagttgatgccaaaggaacacaaggctattaagcgtgaagatggaaatgaaacaagaaaagtctctctggagaccttgtttctaactttcaccttgcgttatccctgtctcttcgtctatattactggtctgattataaacagaacgaatgttagaacatccgatcgttgtctatctcttccgttttcgttagctataatgctaatatttcctgtataggtgcttctcagccacatgaattgaatagtagtcttaatatgataggattagcatttcttgtatgcgttctctttcactatattgagttctatagagtaatattgtgttagtctgctcttgtttttccttggtgtactgaaattcttctacttaaaatgtgggtttattgcgttgtgatgtgaaaacctgtacttggaagatgacataccgcgcgtgataatatgtggaataggttatggctaaagagacccttacgagaattttctgctttatcttccttatttcaggaaaaactgtaccagtggatatggagacaacaagaaggagggtcaagagtgacacctatggatattgtcaattatattcaggttcatatgagttctatctatttattctaacatgtggtcagatttgtttactgttcttgattgagtttctgatttctccaatgcagaacgagctcgaatgctgcatagacgagcctccaatatccccaagagcgccaccaccgcaaccaacaatgcatgtcacgaatcccgggctcatgaccacttcatgcacctctttcccaacagctgttccagtggttaggtccgagcaatgtgagaaccaggccaagaactcggttttctcaaacgcactttcaagcccaatacggcgtagtcttcagaactaccaaattccgcagggaggctacacatccggcggaaccaccagaagcagtgaagtgaacaggggatctaactctccaggttctattgattcttcaatggacatgcatgcagaataagaagtgtgatcataaacacaactcttgtttaatgatgtttgatctatatacaaaaaccggtttgattcctcataatgtatcaattgattcttatcttggaggtttgtttgttggtaattttgttagagtttctaaaaggtcacatgtaaatcattgtgtgtctgattattattatcacttgtttaactcttttaacttttcatcttttaaactacttgatgaccaagaattttcacatctacttgaatactcttttaaccctaaaataaactcaatggattcttctatactccaagtaaaacacttctacttcttatcatgtagtgactgtcagaacaagtcattggtctgagtgatcagggttttctgaatcttcatcttcttctccttctcttttttctgacc

SEQ ID NO: 56570 - DNA, 239 bp, Arabidopsis thaliana landsberg
  unsure (1)..(239): unsure at all n locations
ttaatactgcggaggatgtgaaatatgtcagagggtcggtgatctgcaattagttctgagcccctcgtgcggaccgtccggtgtgacgcgactcgctcatgaagcgatatcgcggactattcgcgcttccggagagagcaccgccataagatacatccgtaatgtttggctccaattccttttatatatttggaatatgcctnggaatatgttttcatgtacgcctataaattaatata

SEQ ID NO: 56571 - DNA, 1366 bp, Arabidopsis thaliana landsberg
tgctcagagttccattttataggaagtgccatttacgaggacatagtatgagatggtgttaatgttcatcataatccaaataaatgttaaaacataaagaatatgaaaaaatgatttgttataaatgtagataatgaaattataaatcttattctagaaaaattttaaatataaaaaatgaaaacttttttgaaaactttcaaaattagataagaaaattgtttatatataatttattatggtacatgaatagagaattagaataacaaaacaaaaagttgaaagaaacacaaaatgaaaaggctatacaagagaatttaaatcagccatgacgagagagtaacccaattagactatggtgatttaaatctaaactttttattttagaaagtttatattaaagaatataaatttgaatgtttgtggtgtgaaaaaattcaacttacctttattggttatgtatatatggattgaaagatgaataaattttctgagcttaatattttttaaatcataacaatgtcattttgcgtagtttaacaaagaatctcgatggaaatttagcgttgtaaatttatttcgttaggcaacttaacgaagtgtcttatttcaaaaaatcgctattaaaaaattaaaacaaaaagtaaattaaaatttgagttttattttacctaaaacagtattaacgtgtttataataacactttttaacagttggagattttgtttttctttttttttgaattagagtgagatagtgatcaagagaatgaagaaggtgttagtgcacatcatataatccaaataaatgttaaaacataaagaatatgtaaaactgattggttagaaatatacattttttttttgtaaatcgatattaagtagagaatttagtataaaaaatcttgttctagaaatttattagtagagagaaatgaaagcatgtttaaaaactttcagaattagaaaaaaaatgtttacatatagtttaatatggtacttgaatagagaagcagaaaaacatataaaaaaaattgaaagaaacacaaaactcaattttaataacaaaagcaaaaaacgccacgtcatcgatccgtgtcgtaaatcagcaccaaaatacactttcaacggtcagattttaactatctcatctgtcgacattttcgatctctctcttacactactacacacactctctctcctccaacctaactattttttatttcttatcttctccttccacaaaacttttttaattttatctgaaaaattaaaacaaccgaaacaaaaaaaaaaaactaaaaatcaaaaatctcatcaccttccttgctctgtattttttctctctcactaaatcctccatggat

SEQ ID NO: 56572 - DNA, 1532 bp, Arabidopsis thaliana landsberg
agacgtctcttatggctattaagagtcagacgcaaggatgaccggggtcattaagacgtcttatattcaaccattactccactaattgctaattaatcagattaatttgtttaatacgataatgtattttgattaagtagctctcagccaacaggcaaaggataaattttggattattcaaagatttgtgggcttccaaaagcatagggaatggctccaactacattgggaaatatattatttaaatctccattcccatttgccacagtcgttggagtttatttttattttccaagtggaagaatcaattataattgtcggaatttctaaatcctacttgttggaaaacaaacccaagcaaaattagtttagaaatgtacggaaatctactatagaattatactaaacatatcaatatagctttgactttaaaattaaaacaattattgtgggcaattagttagatattttaccagggaaataagcagcactgttcatgcactctcttcttaattactatactttgaaagaacttatatgtcactgtattgccagttgccactaatatataaacaacatttcacttgttgacatcgctgtaaatgaagtttggaacgaccctcttaacaactaatagggttaattaaccactaaatttttccaagttgtcattttgtcttaatgtgagacgtaatatctaatacgtcggtctaacctaagagttggttccgatcacaaatttttgagaagtacctttcaataaaaaatttgttgttataatttcaccgtgttaagtaaaaacttaattaggagctattttctatttgatgtgaatttgaaaatgtcttcataaaaatagtatggaaaagggaatgtaattaatatagaccacagatacaaaaagatgtcccgtgcttaacacgtctgagtcattgtcgtacccttttgccaactttttcaagtttctttcgtgaaaatgactacactttttaaaataaattgacagatgattgttgcatgcatataatattcgcaaaatgccaaattctacccttaaccaaataatgtggtaatggatataaaatagttaacataaacaaaaatttggaaattttgaaaaatagagagtaaattgatttttttttaaaagtttgaattgaagtgaaaaaatatataaataaaaattataaacctgtagtttgatatatatagttagatagctcaagtttgagtaacttgaagtcttgaattactttatatgtttttctcacagattatattattttcgttctatcccaagaattgggataatattctctatattcgaggcctctctcttaagaagtcggtgtataatcttaagcccttacttgacacaaggcctttattaaaaagcccaataataatttttcttttcaaagcccaacacgtcaacaggagcaagaagtgcgtttgcgtttggattgaaaacgtaacgggcggttggaaactgaatcttaaacccttcactcgcattcgtcttcacagtcaaa

SEQ ID NO: 56573 - DNA, 427 bp, Arabidopsis thaliana landsberg
ttttgccgcagaaggaggtttctgttcacggtgggaagccagtaccaccgaaaggaaggtcatggaatcgcaatttttgtagggtgtagggggagattccacgactgtaaatatgatgagatatgaaacagaaaagggggtggcagatcaacatcgaccttctgtaattagccagaataaaagaactagatgctttatattgagcagagctctcgtctttttgatcctccccacggtgtagtatcaagaatgaataaatcttctgtttcttgtctggttgtagcatgccagcatctgtaagttgtaacaattcagtgaatttatttaccttcagcaaagaaaggtaaaaaggttgcctcttcaagttgtttgtgggtacacatcatatgcaacgtatacctgtagcaacagtatgcaacgtgaaatt

SEQ ID NO: 56574 - DNA, 562 bp, Arabidopsis thaliana landsberg
agaaagcattaagtgttttctaagggaaatattaacaatgggtctagtgaaagtaactttatgttttacctataaggatgtataataatatgaggagagaggaaaagaaatcgccaaatagacaaagaagatataattatgattggtaggttatgtacatgctgaccaacgtcacatttttaccgagggtgcgtctttgtgttggcgtgattgataatttaacccggccaccacttgcatctgctccttaatttattcgtaattgtatgaaagcatcatcaaatcaactccataaatataagatactttataagctttcggccatattaaaataaacatttcttttttatataactcctttcttatggatattagcttaaaagatcgtataaacaaacttatatacgatcaaacaaactaaaaaagagagttctttatcaaaaacaaacaaactaaaaagagacgataaatgaaagagataacaatagtctgtcactgtccttacataaaaaaaaaatatgagccacgccaaatctaaaacgatttcgttaaacatatatag

SEQ ID NO: 56575 - DNA, 999 bp, Arabidopsis thaliana landsberg
attttcggtggatagtaatatattgatggacaatatttaatttctagactataaaatttaagagacttgaagtgtggctaagagtaaatttaattatacattttaatcatggcctgaaaaactaaacaaggaggggtagaataattaatcatctcagcagctttccatctggacacaccattcagctaaacgacattgtttaatctctaaccaaactgggctagaccgaactgggtacaaagatgggttaaactgggctaggcccaaattaatcagaacataaatttcgaacggagcgacccatttccaaaataaaaaaaatgtttttttcatatatatatatatatttttttaaatcgttgcatgcaggttggtggcgatattttttggttttgtcaccaggtggtggtgaaataaacgacgatcattgaatatttttggtgtcttgtatatgtttgtgtcattgtgtgtatttttttttggtgtgttgtaacgacgatcattgattgtatatgtttgtcagaaattaaggtttttttaatcaatcaatgccatgtgaaattgagaaaccttgaagaaaattggattacataaaactagatactatagagaagaggcacatatcagattggtggattataagtttgtgaaaataaaatcatgattgaacagatataattcacttgatacaaaaaaaagcaaagaatggatattcacaaaaaaaaaaagttggataattaagaaaatagaatataaaataaaaataaaaatcaaacagccatcagttctgacgaaaagagcccaccacggatctgtcagatttatttccttcttacatataaaaaaaatctgaatcggctcaggctcgtgtagcctcaccaactccgcttataaactttctctcttctgaacacacctctctctactttgcttcttcactcgacttgtatctatcatccatgggtatcgatttatctgtttacgatccaaaatgattca

SEQ ID NO: 56576 - DNA, 182 bp, Arabidopsis thaliana landsberg
  unsure (1)..(182): unsure at all n locations
ccccccctttncccccccccccccttttttcctctcccccttctctccccccgcccccccccccccccccccccccctccccccccccttcccgttttttcttcctcttttttctccccccncccctctctcttttctccccccttctccttctccccttccctccccctcctccccccccg

SEQ ID NO: 56577 - DNA, 336 bp, Arabidopsis thaliana landsberg
aaagttaaaaatatgatgcacaaggatccaatttccaaacacaatgtatcataaaaatttgaacacattctgttttatatattctaaccatgtactttgaaagtcaggtgtgacctaagaagatatatgaaaaacgtagatctgcatattcgctactacttgattttgataagaaatgtcatcgcgcttaccataaaacatgaactagaagattaagcttgtcaagtaatatcacttgaatgtttgtataaacgccgactcacttaggtaagagtaaaccgagtatacacgatactgcattgaatttgatatatctatgagattatgtatacatat

SEQ ID NO: 56578 - DNA, 852 bp, Arabidopsis thaliana landsberg
tttgattttctttatcgctttgttgttttcctgactattggttttgtgtttgatttcaatatctgaagaattgtttgatctctgttaaacgcatcttcgtctatccatttccatgttatatatgaatcattctatttcaatatacgttaatatggtctgatttctggttcttctttcgaaatattgttacttgacgtgttatgtgttgaatggttcacttggtcttgcaaaactgatatatcttgttatccagattgatccagcgaagtacaagagcatctcgtctggttttggaattttgctgaaagagcaaggagtcaaaggctttttccgtggatgggttcctactcttttgggttacagtgctcagggtgcctgcaagtttggattctacgagtactttaagaagacttactctgaccttgctggacctgagtacactgccaaatacaagactctcatctaccttgctggttctgcttctgctgagatcattgccgatattgcactttgcccatttgaagctgtgaaggttcgtgttcagacacagcctggatttgctagggggatgtctgatggatttcccaagtttatcaagtccgaagatacggagggtgagtttttcaataccaataacattatctcccttgttactgctagccttttggtctgatttctgatttttttgcagcttgtataagggtcttgctccactctggggacgtcagattccttgtaagttctggcctctattttgcaactgttgccaatcttttttttttattttttttgtttattgatgaaacatatgtagttctttaaaagcaaaaggtggtgatgatactatgaatt

SEQ ID NO: 56579 - DNA, 530 bp, Arabidopsis thaliana landsberg
atattcaatttttattcgactatgtagttagattcacatggagaattaatacgtaagtagataagtagttgttatcaatgaacctttttgtctcattatcataagatactcaattgttcttgttttatacaaaatggattttactactcaaatcaagaacaaaagtccaacagagtaaaatttatttgaggcttacaaaacaggacaactcttggcattttgttcatataggtcaaaatgagaaaatgagttaccgtaggatgcaagaaactggacaagaatgtgttcatgtggagccgccaagagattctgcaaatcttgattcaaccattcagctgagaagagcttcgttcttgtttaactcatccagatccacgctcacttttaaacccgagcttagcaatgtattaaccattgaaggaatcacagattttaatgaagcaggcagagcctgttcatcattacaatggaggattatgtatggttttaagatggagggctgaaacataacacatagagagaattttttt

SEQ ID NO: 56580 - DNA, 2321 bp, Arabidopsis thaliana landsberg
ctccacaaagtttgcaagtacacttgtttgtatttgatttgatgtgatagcttctccgttttggtcctctatttataccgcatttatttttttgtccccttatataaattgaaaattctcgttgacagataggtttggtcctttctaaccaaaaaaaaaaagttacgtttggtcctacaatttagaagagaagacgatcataattatgttttcttttgtcaacttattatgtgtttcttagatcgcatattgacctaatttattagcttggttttgtataacacaaaagatttcttataaagacgtagtatctcacatttctgatttatttagtttcccttctatcataatatttgttagctagttgtcataggaataggctacctatatgtatagactatagagtagttatatcacattttgttatcattgaaacccatgatatggagctttatcttattgttagtaagagaattagtggttaatcaattaataagtgaaatagtataaactaagaaaaaatgaaagagatcccttaggtaacactactgttggtcgtaggcttagtagagccaccaatcaacactttaaatcttctccttcaatgaacaacatcttttcttttcatttttcttcaaaatctacaaaagaaaacttaggcaatgatgccactaacatattttatccttttttaccaatatatgagtaattgagtatatatattaaaaaaacgaatcgaaagagtgtaaaacaatttagtccatttacaaattattatactcattgtctctccacatttttaattactaaaaaactggatacaaactcgcatgccgtgtaaaaccaaaaccaaaaaaaaacaacctcacatgtcattgtttctaagataattacatcttgcagttggtattgtatggagtatttggtacggttgtttatttgttccttttacgttatccaatttcatttcatctacttgtagatgatcaggaccatctcttgttcctcccactaaaacttccatcgtttaatatgaatttatctttttcgaattttgtgtaacttacaagtcttttagtttatttcgagatcggctaacaaattgagttttgactgtgaatggattgcttacaatattgtcctccttaaacctaactaaacgtacatcacatttaaattgctcgagattgggagaaagcaaaccattaaaatttgtttttaatataatattgagttctgaaaactcagaactctgcatcacactaatctgttcaatacttcatacaacacaagcaatgtctcaaattttccgaaaacaaaccaaaactaaaaccatccttgattcactccaatagacaaaaaccatgagattagaaaacaacaatgtagctcaacaaaaacaagagtgcagaagctaaaagggtaaaggtgaagatgaatggaacttcaattggtaaatttaagagcctcagtaccggcggaatccacggtcagcgactcgagcagacggacactcgtacgccctgtgtcctcggccaccacaattgtgacatattatcatagcactaacgccttctctgtctctgctcattctgctcaaaccacctctttgcataccaccatctcgaaccctgcttcctctgtcagagtaattgctgtcaccttttgggcagtgtctagcaacatgccccgagatactgcagatgttacaaactggatcgttcctgcaatcgcgagctatgtgacctgaagtcctgcagttcttgcacgccttgtcatttgtgcagtcagcggcaagatgtccctgtttgaagcagttgttgcagagtcttaagtctcctgcacgagaatccgaattagagcagtctctggctcgatgtccagatttaccacaggagtggcagattccttcgtttgaacagtttgaggctacgtggcccggttctctacagttccaacaacgtgattccgcagtgcattctgctgcaatgtgcctgcagagagagtttaaaaacataactcaaaagcatataaacagaggaaattcacgaatcaatttagggaggacatatataccctggaagaccacagttgttacagacggaaacattagaacagtctcttgcaaagtgaccaggtcgcttgcagttgttgcagagatttccttggctgaacaaaatcaaaaagttgtgacaattttgtcacgacattgaaacgaatcgatacaaaaagtatgtatgtaagcaaacagttgaacttaaaccaacctaacactattagttcaatcaaagaaataattgaagaccaacacccaaattaac

SEQ ID NO: 56581 - DNA, 952 bp, Arabidopsis thaliana landsberg
tcaatcattttataaaaattagagaattatcttcaatctcgatatacgaagctaaaataattgaaaacattttgtttcttgttatatatttttcttttttatcaaatttctttttatgtatataaaatatttgtgaaagtttcttccacacatataaaagattaaatttctttttttatcccaagcttgaatatcaaaacatgagacaacaagagcaagtattagccaccacaaagcaatcatcttaaaactcaaaccccaaaacaaacaaaagacaaaacccgattgtttcgagcacaaacgtcacttgtggtttacatcatcttcatcatctccataacttcatatctcctctccttccgctgccaccgttagcgatgtctttggacactgtggacaaactggtggtgttcttggccaagagagacggaatagacaagcttgtgaagacattccaatacgtggccaagctcgcgtgctggcatgttgaagccacacgacccgaagccgccgataggttcaagaagtgggaggtcgcctccggtctcagccgcaaagccttcaggtcccacatctttttaatattaatcactttatcgacaaagtggtatcatcgtaaatatagtttaatagatgaaatgaaatgaaatgttttagtcacttcttgattaatatcttatctcatctagcatatttgaatagtgactagtacgatacactttatattacaagaaaaatataattgaatagtgattatggtcgaattatgcgaacaggaccgggagatctctcacggggttcaatgcgctgagacgaaaccccggggcaaccccgatgatccgtttcttggcggtcctagccaattcaggggaaatgggttacttcttctttgatcattttctttggttatcaagaattggttcaatagacgccaagctcgccaaaaaatgag

SEQ ID NO: 56582 - DNA, 292 bp, Arabidopsis thaliana landsberg
tttgttttttttgacaatctaattggttattttgggatgggtgtttggttccgccttgtaattcattgatttatttttaattattttttgtgtttaaccaaaactaaaaccaaataaagttaaatcgaatcaaactaattttacctagattatttaatcgaacccgaggcccaaaataaaccaaaatctcctctatcaaagcttagccacttcatacgtaattagttttatttttgcagccattcagggaaatatataaggatcacaaaagacataatgtgaatttgctttc

SEQ ID NO: 56583 - DNA, 711 bp, Arabidopsis thaliana landsberg
atggtttgaatcgctagacctcgcaagcagacaaagaaaacggatgaagaaatagatgatgactaagaacttggggtacatgtttttgtaactcatggatctcttcccctgattatgcatttgcatatacacactaagtaacctaaagaataatggaagctttattcatcagtagcctgttcatttgtgtcatagcagtatggtgttcctagcttgttcaagagactacggagcatattatcgcttaatatctaagtaagcacactattaaaattggtcaattggcgtgtgaacggcttccaaagtcagaattcagaaagaacaataaatggggtcgtcagtaggactaacattcttaggttcagcaaattgcattgcttttgaattcataacaaattctcttgtatgtttcaaaacgctacatagttatatatctcatgtgatcttctcgtcactgcaggttctcagtgaggaacaacctaaaccaacctcaagatggctggggaagacaaattttgtagagactcgttccttttggcagatattccggagctttgacagaatgtggagtttctttgttttgtccctacaggttcttcttctgctttttcatcattcaaattacattcccagtagatttgcaaatgatgaatttcctatttctctttcaggcattgataattatggcttgtcatgatgtaggatctccac

SEQ ID NO: 56584 - DNA, 889 bp, Arabidopsis thaliana landsberg
  unsure (1)..(889): unsure at all n locations
aggttgctttctacacaaggaaacatacctcagatattatcatccaaggaacaggtcccattccgatggagaaagcggctacatagatctaaaatagtgaagaagagagattatttatagtattacacaagaaacatacctcagctcagacaatatattgagttctgtttttggtaaaaagtaagaaccaactaagttttacttacaagtacacctccaacggctaaggaagggacccattcaagcaacaagctctgtccctgaatccaaaatataataatttgatgtgacaacttgactttaacgcacagattaatcgatttcaaagtgaaaacagggttgagctagggttaatgatacggaccttgagtaagaaagatgtgcctgtgagtatgcatcccaagaagataccaccagctgaaatctgcagcaacatttgtacatgttataaaattgaaacttttgactcgaaagcgcatttcgtagactcaaagattttacnnnnnnnnnnnnnnnnnnnnnnnnnntatctatcaagattgttccaagaacagttattggcacctgttaaaaaggattcaatctgtttaaacactaataagagtacagatcatcatagagttatcgagtgaagcgaaaacgtttctccacctgaacacaagcgatagcgattgttcctagtttcccagaggtaaatcctgcaagtgttttaaacacatatgttagaatctaactttacttggttctgatacaagaaaagatatcgaggtctatcttatataccggcttttacaaacgtttcacttgcgtagaatccgatcccattgattccaacaaactgttggaataccatcagggaaacaccaatctgaagaacattcgatcacac

SEQ ID NO: 56585 - DNA, 906 bp, Arabidopsis thaliana landsberg
tgcagcttgaaaagtaatggggtcagtgtgagaattagcatccttggcctcgaaggtgatgtagaaaatgaatccggctccatatttcctattagccttgacagctctcactaattcaaaattagtcttgttttctccattgtatttctgaatagcaatcatggataatcggtggaccaaatctccgtcggtttccggttcatgagcaacatcactatcctcgaagataacaggatagcaaaacacaaggcgtctttgtttcgtggtgtcaaagtcgtaatactacagacaacaatcacattcatgagagaagccgacataatgcttttgaaatcacagacaaaatctcaattcgaaaaagtaagaagcgaaggagagattggtggatcattacaactacataccccgcttctttggtattcttcttcgaccaatcgttcatcttccgaatcgaaactacacgtcgactcgctgtacgaagacatctcttcgcaatcctcctcctcctcctcctccagcttctgacgcttcagatcaggctcctcagatttcttatcgaccaccacctgcggatccataactatggcagattagatgaaaccctaattctctgtttcttctatcattcaagataaaaaaaaaggtccctcttctatttatagtgtgcacaacaaacaaaaaacaaaaagaaaaaaagtgactaagaaaatatcaagcctccaagagagaaaattcgtgtagagacactaaactagctagtagatgattattgtaaaaccttatcatcattgtggttgttaaaattaatctagatcggttaaatttggttaaaaaatactcaatagttaaaaagttaaaaaaaatccaaatccggaaaattaaaagtcaaatcaaatcataactatt

SEQ ID NO: 56586 - DNA, 528 bp, Arabidopsis thaliana landsberg
tttgatcatgttgctcctctccctgttttctgaagaggctcgtgtccctgctcggccctgtctccttcccttccaaggtatcctctcgagtgcccctttctctttcctggcgccccctctccctggtgctcttacctgtagtcgtcaatcttgagtaggtcatcgtaggttccttccccgcggccatggagaaatctccaagatccattcctatcggatctggacctgctagggccaacacacgcaaagatgtcgcagaagttgcagatgggagtaggcgcacaggcattgtcgacacgagcaaaattgattatggcactagtagattacgtccgcgccatcgattatgtaggacacatgatccggtatgttttaatgtaaataacataatgtgttattatagtaacagtcaatactataatgtgatattgaatgtcattattcatttggttgtaggcgcagagatataatcgagtttgggatggtcttttagacaccattagacagatgcattatctgccgatgagt

SEQ ID NO: 56587 - DNA, 380 bp, Arabidopsis thaliana landsberg
  unsure (1)..(380): unsure at all n locations
cctacggtcgatccagaatctgatttctctttttatctgaaacatctacactggtctcggaagcannnnnnnnnnnnnnnnnnnnnnnnnnnnnnnnnnnnnnnnnnnnnnnnnnnnnnnnnnnnnnnnnnnnnnnnnnnnnnnnnnnnnnnnnnnnnnnnnnnnnnnnnnnnnnnnnnnnnnnnnnnnnnnnnnnnnnnnnnnnnnnnnnnnnnnnnnnnnnnnnnnnnnnnnnnnnnnnnnnnnnnnnnnnnnnnnnnnnnnnnnnnnnnnnnnnnnnnnnnnnnnnnnnnnnnnnnnnnnnnnngctgttctaaaacactgcgagtcggctcttaccagtatacattaacccatagacactcggtaagtggaatctt

SEQ ID NO: 56588 - DNA, 479 bp, Arabidopsis thaliana landsberg
tactttcaactttacaaacttcacagtgagcaaagggggggaggggttcccttcttcgttccaggaagttgagcttgaactatgtggccggtccaagagaaatcaggcgggtatatgctatgagactgctctataagaacctgattcatcctcaattacaaaagttcaagaaaatatcaaattgagcacaccaggaaggtagtaaatattgcataagaaaacaaaatttggaaaatatttcttcagatcttatgtaggagtgtaacctagactacatgatgcctttctagaacaaatttgaagtataaactgatcctttgcacaccgagagaagcaaacagagcaatcacaaagcagacattgtatgacatacataaaatacagactcttagactttatacacagatcataatgaattagtaagatatacataaaataatcattgatgtcacagatcgaaggatctaaacattgtgatt

SEQ ID NO: 56589 - DNA, 519 bp, Arabidopsis thaliana landsberg
ccgaagtatggtaagtttttagttctcaaagcctctcacacagaacctatggatcgttttacagaaatatacccacatacccgagaaaatacatgagacctattagtagagactcttggaacattatattgataataaataaatggttagattggaaactcataacggtacaaggtttttaataaaatagacgaccagtaagcaataaatacaaaatatattaaagtcgtagaaaatagctatatatataagtatacaaaaaatttatgagtatcgcttaaaattgtttttaggttgatattagaccatctaatattcataacgtattaaaaaaatactaataataaaaaataatataggaaaaacaaataaatattcattcctacgtgtttcaattttcttttaaattttgttctaatgcgaagcaaaatatatcactaaattttttaactgaaactttcattgatatggaaaagataatgtcccttataatctatatatatatatctatatatatat

SEQ ID NO: 56590 - DNA, 874 bp, Arabidopsis thaliana landsberg
tattatctgattcaatatgacacttgataaacgtcactcagtttatgaaacttgctagtctagaaagtagaaagtattgcataacgacattatacaaattgtttcgaagtcactacatagtttacttccgtcaaatctgtaaattgccatgagtttgttcacaagtatcatattagtaatacatattagaaatacaggatcaaaggacacaaaagctctaaccacttatacaaatccggtatcagagagcactaggaaacgaaaaattaaaggctaaaattatgcaatttttaaaattctaacaaccttcattcaccaaaagatttccaaaactgaaatcaccatagaatcttcaaactctagtcttcagaattagagtacagtctacaagcgaagaaaaaaaaaaaacttctttgcacatttgtaaacaaaaagttaggctagtaagcaaccattcaaatggtaaatgttaccaaattaccaatcaagtccacagaacatacacacaaaaacgaaagaccggattgatgggttaatggaggaaggtgggggctgaccggctgagaagtgatgtgacggatcctaataagaacagcaatcgtacacaacttgctgctgtgaaagagagaaagagaagtaccagtgacaagtggcatgccacgtgggccggcggtttaggacccaatcagagtgaaactgccacgtgagatcctctccacgtcccgacaaccatcaaaattcaaagccttcttctttctgtttcctccatcatgctctttaactcattttttccctagcatatcaatttttaaaaaatagtttgcaatttacggcaataaaatgtgggcaacaaaaaccaaactgaatatttaca

SEQ ID NO: 56591 - DNA, 1110 bp, Arabidopsis thaliana landsberg
  unsure (1)..(1110): unsure at all n locations
gcaacgcaatgatcttgagagacaataaagacgctactgatatactagaagtttcaccagcaaaggatcttgaagaaacaaacttaacttgtgaagcatcatcctttttgtctattgatatgaaatctgatgaagagaacgaaacagtgaactcaccaacgatctggagagacaatgaagacactactgatctactggaagttgtaccagcaaaggatcttgaagaaacaaacttaactagtgaatcatcatcatctctgtgtattggtatgaaatctgatgaagctttggaatcaacagcagatgcaagtttatgtaatcatcttgctgtggaagaagaagtagatgggttggctttgggttcgtttatagaagaagaagaaaagaagggagaatctgaaaagcaaaatctttctacatggaggaaccttatacagaagcacatggtcatgagagacaacagcgagggaaatcgtaatgaaactgagcaagaacacaagtggtcctatggaactgatcagatgacaggtattgatgatgctaatgctgcagctgttaaatcgattcagctagcatttgaaacgattctctcggagatacctgactcatcgtccgacgaagagagtgtttcggaatcatctaactctcttaaagaggagaaagaacatcaaggagagaccaagaggagctggaacagcttgagaaaggttatacttttgaaaagatttgtgaaaagcttggagaaagtacaggttcctaatccgagaaagatgcgtaatcttcctgttgagtctgcatttgaggcagaaaatgtattcctgagacaccgatcaataatggaaggaacaagaacagaaggagaggaaatgatgctggattatgctctgagacaagcgatatcaagattggctcctatacagagaaagaaggtagacctccttgtgcaagcctttgatattgtccttgatggccatgatacacctaaacaaaccaagaacagtgatactccccggaacaatgatgaaactaaagaaggaaaaccgacagtagaggaaggtctgtgaagtcaacaaagatgagcagaagataaanatgtctttgcaagatttc

SEQ ID NO: 56592 - DNA, 519 bp, Arabidopsis thaliana landsberg
gtttggcttgccgatcccaagacaaacggtaagattgctcctccctggcggggtcccttcgagtgatgacatctaggtgtcgttggcaaacaccaccactctgcgcacacgcggaccgtccggacactaggcacggaccgttcggctcagagcagaaaaccttgctcctgcttccaagtcgcggaccgtccggccctaggacgcagaccgtcggtgtcgagcagaacaactcccaagtatttggggtccggaccgacgccaagacactttttggtgactccgctggggacaaggcggttggatccattaaatcggcccataatggccggtcccaaggaccactccgatattttccctagcaatatcattaagccgactatagaggcactatcagctgatgaatagtagaaattcgaggagtacacgaagcaactgatcaatgaggctagggcgaaatacttggccaatttcaaggtggacaagaactagaaagtcatccgtatacgggagtgtaaagcc

SEQ ID NO: 56593 - DNA, 556 bp, Arabidopsis thaliana landsberg
tatctttggcatactgcattttactgaatagctttataattaaaacagactcaccatacaaataattttacatatattattgatttttttggcttataatacttttagtttctgaaatcaaaatttatggaaacaaaagtatcttcttatttatcaaaaagtaagtcacaacagcccaaaatatctgtaggctagaaactgcattaattattttagcatatctgatagtatgagaattgagtgtatagggggggaagatagatggacaaaacaggattcaagtccgaaagagttgggctatgttttctgctgaatacacatttcgacccaattagttaaaataattcatccttttcgttttctctagctaattaagttcctacacatatccttcgagaacaaaaatctaacacacatgcatgttagctgctgagtcatttggtaacacggttcacatacaaaagggctttttgagacaaaatatttataaatgaatgactaatcatcatatggagcattcatcattaagcaacttagattctttgtatctaacccc

SEQ ID NO: 56594 - DNA, 375 bp, Arabidopsis thaliana landsberg
ctccggggagaccaagtatcttaaccaaatctgattgccagcgcagacactactctctctcttacctagacacgaccctctcttacattcatgagagcttacctactatacattactaacaaacaagactaagccaacacgctacctgtattacttaccttctttcatggtcacaagactctcgaagtcttggcatacacactatatcatacaccatatgaccacattaatgtatggactcaaattccagcagagcacatagcaataggcaccacagaacatctccttcagaaggcatctatcacttagtcctcaacaacctagcataacgaaaatcgtacactacactgacccatacccagacacctattaact

SEQ ID NO: 56595 - DNA, 527 bp, Arabidopsis thaliana landsberg
  unsure (1)..(527): unsure at all n locations
tcatttgtttgagcccgctgtgagatctttagtatcggttgggaacactaaccggtactaaagatttaaattttagtacctattatttttgttagaacctgtgtcatcggttcatgtattgaccggtgtagattattgaatattagtaccagtcaaggacaacaattggtatgcatagatctctagaattaaaaccagcactgaaaccaatattgggctattcgcttcggattaaagccgattgtttggactgctacaactgtgatacatagaaacaaaacactgtaaaaagcagtagaaaccgatatggattaaagccaaacgaaatatcaatccaaacaaaaaaatttgttagaccaaaaccccattcttatgtaatggttggatggtaaccaatggtcgatggagaaactactgcaactntgcttcatctaccgatctgcgtatgagtacgacgtatttcctccgttccaggggcggatctccacctggtgctgcccgggctgcatgccccgtcgacagtcgca

SEQ ID NO: 56596 - DNA, 776 bp, Arabidopsis thaliana landsberg
gatcatacttatacatggcatctacaaaatatagcggcagattttgtcttttttcttgacgtgcatctaatgaactgaatcacctggaccgtcctaaggtaaggtttaagaaatcctttgttttacttgcaacccttcacttatcatttttctttttttctttttttgtccttatgtttaaaacaataaaaagatatattaaaatactgaataagctttatgcaatagacatttttagtcataacctcaacctcaatttaatttcttatcaaatatgatcgtctagatttaaagagctaattttctctttgcactatatatttaatttagtacgtaataacatcgttaagctacctaacggttaatttattcttaactttctttcttttttctaattgatttaaaaaaatcacatatcttccctgttttattgttttttctgtacgtggtactcttttttgtttttgttctctaacatagaacacggttttgtttttctttctaacctatgggttttatgattaaaaaaaaaaaaaaaacagttttgttgcctgtgtattaaagaaatttagaactgacttaaaaataaactatttcatgatttgaccatcttttatcttaatttattttatataatggaataggttgagaatttacattgtataattaagaaagacataattactgttccgttttgttttacgttttttagaccatgtctatcacattttgtaagtactaatcgtctattatacgtatttaagtacacacacgtg

SEQ ID NO: 56597 - DNA, 524 bp, Arabidopsis thaliana landsberg
agaaataaaaatgagattatcgaaacaaagatcattaagatcaaaacaattaagcaaaaaaaaaccttataaaaaaaagattaaccccaaagcaaaaaagaaaagaatagagaagaatatgagacgttgttcaagaacagctctggcactctccacaactatcgagagcccacgagcttctctcttttctcaatgctgtcgtcactaatctaaaattaaataaacagattagtaaacaaatccgtaacgcttaaagtttaaaattaatcaacaattcaaaggttttatcaaaagatgagaaactaagaaaactaaagatcgtgtcatactcttctgttcccttatatgcttacatatattaaaacgctatcgttttaagattacacaaaaacgataaaatttggattaaaactaaaaaatgttatccactgcacgatttctcaggtgtttttgagtttcggaagtaccaaatttttatagataacatttttattcgggaaatagtaattgttttttttattttt

SEQ ID NO: 56598 - DNA, 144 bp, Arabidopsis thaliana landsberg
tacgccggggcgtgaatataaacaatggtaaaaagtttttgccctgaatgggttctagtttattattgggttttagtttctggtttctggtttttggattttggtttttggtttttgatttttgtaggttatgatttttttgat

SEQ ID NO: 56599 - DNA, 593 bp, Arabidopsis thaliana landsberg
cgcccttagggactgccgctggatgcagatcagcgaacggcgcacccatgagggcggcttcaccgtcgtctatgtttacatcacggagctgcgccgccgccaggaggaactggagcttgcccgcgacgaggcgcaacgcgcgacgcaggtgaagtccgaattcctcgccaacatgagccacgagctcagaacgccgctcaacgcgatcatcggctacgcccagattctccaggaggatgccgaggacaccggccagaaggatttcctgcccgacctcaggaagatcgagagcgccggcaaccatctgctcggcctcatcaatggcattctcgacctgtcgaagatcgaggccggccgcatggaggtctacaaggaacgcttcgacgttcccgccctcgtcggcgatgtcgccgcgctgatccggccgcttgccgccaagaacggcaatgccttcgtggtggaatgccgtgacgacatcggctcgatcgagaccgacgtcacgaaggtcatgcaggcgctcctcaatcttctgagcaatgcctgcaagttcaccgagaaggggacggtgacgctcgcggtcacacggcagggaa

SEQ ID NO: 56600 - DNA, 730 bp, Arabidopsis thaliana landsberg
  unsure (1)..(730): unsure at all n locations
caattttaagatttggggtggattaaatagaaaagaatatcaggggcgttttcatctatccactttatcagaagatcattgccaaatattttaactaaagcaatttaatttactctaataatgtgcaactcatcgttacgtatttcttcttgtacaaagctaacatgcggggcatgttagattccgtgcgacaaactaaaaagtatgatttgattgataatttgatataaagagctcgattagacttgttgattgttttcttatctaaggattttatgcatccatatattcattatcaactatgaactatcaatgaataatatttccaaagtatgatatttagtaaattaaattctgaattcctgatagaagggggaaagtcttcacccgattgatgttcgagtttttggagaaaatataatcaaacttagctgagttagaaactcgttataatacatgttctttacttggtttaaaaaaagccacgaattgataaatcaatactttttaactaacgtacataaaattaatgagaactgagagttcaagactagctagattttttttttcattttatatatagcgaactcattgcttacactttcaaaactataaaaacaaaatttaaaggtgctgtagagaatagaatcgctatgtaagtataaactttaaagatggcattaatatcttatatacatcntgctcgtggtatcttgattgatgagaaaag

SEQ ID NO: 56601 - DNA, 449 bp, Arabidopsis thaliana landsberg
gtctcgacgatggatgtttggttttgttggaaatgacttgtgagtctatcttttaaaaaattattgagttaatttgtaaattatcatcggataattagattagttttatgcgatcatcggcgctcacgggtataagagatgtttggtgaatttttgagatgaatggacggaacacatagtgcagaatatgtaacatcatgacacagttctcataaacaaaggtaatgatttttggtggtaaatacctaattttaggggtaatgaggatttgatgggacatgtggggaaaacaaataagatttagtaaatttggacggtttttatggtcggactttggagagcatattttggcaaatcgtattttatgtcgtaaaatctacaaggtggcgaccatgcgggcgcataaacaccatttatcataaagatggacatatgtcgctgaaaaaaca

SEQ ID NO: 56602 - DNA, 1043 bp, Arabidopsis thaliana landsberg
gggggggaagggaggttgagggatgtggaggggagggggcggggaaaccacaaggggagaaggaatatcggtaggtgggagggaaaggggggctaggaccgcgtggaagagggtcaggagagggcttcagtggaggctacaaatgggcttgggtagggggggcaggagcaacaatcggatagcgaatagtatgagcgacgcaggttgttcatcagcaatctcttcaacaaactcatactctcctctattctcatctcttccaaaaccctaaacactaaactcgtattcacaatcactgaaggtaaacatctcttaccacaaatcctatctaacaaatcaacaacttctttcaatctcccttctttacacaacacttgaatcattatccgaatcgtaatctcgttcggataaatccttttatcaatcgcacattcgtaaatcctccacacaagatcatcaatcttcgatttcgaagagtaatgaatcaacgtgtttaaagtaatcacactaagagtaaatccacaatcacacaatctcttgaacacatcaaaccctaattccaaatacctaatcttagcgtaacattgaactaacaaatcaaacactaaaggagtagaagatgagatctcataagtatctaacaacgaatcgactaaatccgaatcgggaggagaatttaacagagacgattcaattaaagctcgagcgtcgattagtaatcgagctttgacaaggatatgaatcgtcaatgcgtaagatttgattccgtgacggagatttcgagtgtgggatgaccaatggaagaaggataaagcttgtttggcggtttcggggtttttgaatcggagaaggattgtttcgattaaggaatctgatagatctatggaggagaatttggtggagagagtttcccaggtatcgttggattggagggatttggagatgtagtcgatgaggatttgttgttgtttgtttggatttggattagttttggaggagaaggagaagaaaccctggttgagttttggagaacgggttgattg

SEQ ID NO: 56603 - DNA, 521 bp, Arabidopsis thaliana landsberg
agcggtggctacgcgcgcggccaattgcgggttgagccgatccatggccgccagttgttcggcgagcagactgtagccggcgccgtcggcgcggtggaagccgctggggttggcctgcgcccacacgccgagcacggcacgcgcgcggttggggttgcgcagggtgaaggccgggtcggccagcaacgcctcgatgcgcttgagcgcatcttcgccgggcacgcgggcgtgcgccgagaaccatttgttgagtaccagcggatggctggcgaaacgctggcggaaatcggccgattcggcctcgccgacgcccagccagagcagggtttccagcgcacccaggcgctcggtcatggtggccgcttcggcatattgcacgcgtgccagggcgttggcgcgttcgccgtcgatgcgcgccagcagattgagcaggcattgcttgaggctgcgtttggcctggctgtcggcttccagcgaggcgtccccggggatgtgcagcccgtcgtagcggcgggccagcg

SEQ ID NO: 56604 - DNA, 369 bp, Arabidopsis thaliana landsberg
  unsure (1)..(369): unsure at all n locations
gggggggggggcgggggggttggttggggggggggggggcccgttcgcggggcggtttgtgttttcccccccggggttttctnccccgcccccgcggttttttttcccggggttgttgggccccccccggggggggggctanagcgagggaaccccgcggtgggggcgttccccgcgcgccccccgttttttnnntcgcggggggcggggggggggggggggggggggggggtgggggggcgcggggggggggggggttggcggggcggggggcggggggggggggggggggggcgcgggcggctcgctcgggcggggttggcgggggggggggggggggggggggggggcgggggggggggggggggg

SEQ ID NO: 56605 - DNA, 940 bp, Arabidopsis thaliana landsberg
tctatttaatatgatgtctagtttattacgaagattggggaacttttcaattcattataagtagacaaactaggaggaggtccaatttcatattaatattttggttacatgattagaaagacatttgatgcccttgtgtcggctgattatgatataaacaattttacgtaaaaaaagaagaagacaaatcttccggaactcacatgctgtaacagtagaagccaatactacgtaaataataaataaactgcgcaaatgaataatgtcggagtctaatctaaccacaacaaaatgacaaaattttgcagttctatagtatttgttattgtaacatgttatgtgtaagaaaagagaagataatttttttaatcaaaagcagagatagccaattacttacctaactaaattagaactaataagccgctttagaagttcatgaacctcctttagttgttggattaatttattataatcaagtgattacataaagttcacagcttcatttatattgttatgatcttcattcaaagaaatttatattttatataaacgagaaaaaatgggaactccataaatttttagaagaaaaattaattgtcgtagttaaatatctaactgaaattcgttgaaagaaaagagaatatatttaaagtttctaataaatactatgaaaatcctttgaagaaaagtacaaattgaatagaacatataatctagtaagtttgtggtaatcgttacttcatcatttggattgaaatgagacaaaaaaaaaatgtgatgaaaatccaaacttataacaaaaaattcatccaaaatatagtagtttacacactcgaagtcttgaagggtcttaccacaaacgtagttaaaacgttagccaaaatttagtttaagaaaatggttatggggaaaggatgatgtatatggttgactgggataa

SEQ ID NO: 56606 - DNA, 495 bp, Arabidopsis thaliana landsberg
  unsure (1)..(495): unsure at all n locations
cactcaaagacgcagggcattatgtgtttcagtggcccaaacttgtataatcttttgcgttccgtcgtgccctgcacgaaccatcaagctgcaatcgacttcatcgtcctcacaaaagcactacgcggtatatcctgtagtgcgccgttggtaccaaactccaaagatgacatgccagtagaaaagtactttatcggattcgaaccgatgacttctgtcttaccaaggcattattctaccactaagcgannnnnnnnnnnnnnnnnnnnnnnnnnnnnnnnnnnnnnnnnnnnnnnnnnnnnnnnnnnnnnnnnnnnnnnnnnnnnnnnnnnnnnnnnnnnnnnnnnnnnnnnnnnnnnnnnnnnnnnnnnnnnnnnnnnnnnnnnnnnnnnnnnnnnnnnnnnnnnnnnnnnnnnnnnnnnnnnnnnnnnnnnnagattttctttttatatatcgagatcgagatatcgaaggttatttatggcgaggtttaaa

SEQ ID NO: 56607 - DNA, 962 bp, Arabidopsis thaliana landsberg
ctctatatacaataatttatgcaacgaccaagaaattgaacgcaacaaaagtcataatttgaatattaacttcagtagcttctatataaaccggtccagtattattgctaagaaaacaaaaatcggcttatatctctatcgaagaataatgggtttgaaaatgtcaagcaatgcacttcttctatctttgtttcttctacttctttgtctcttttctgaaattggagggagtgagacaactcaccggaaaataggtcagtgccttcctatatctcacaatagctcaagctatcaatgattttttttctcccctaaaccaaatttagcttatttaagaatatggttgtttttggaaacaaattataatcgtaggattagtaattccgcgttatttttgttgcttttgtattgtataaaatagattttattcatcattttgaacatataatttctatctgataccacattcaatcttcagtagaagaaccagtaagagggcaaattgcaacccctccatctctaacatgcggaggccaaagacttggaggaccacaaccacgtttaagtccatgcccgcgtccacggccaaggccacggccacgtacaggctcttaaagaagatttactaccgacccttgaagaagaaggaaataagaatataaatattctatctttgtgctgtaacttttatttacattttgttagagacagtacaaacaaaagttttaatccaaaaaatattcttatattatatgtttataacgagacattcccaaccctgcaagcaagaatatcttagtagggactttacaaaatcagcaattcttttaacttggattcgttacgttttttgtcctttttttcttataataaaaaacgtagactgttttctcctccagttaaaaaaagaggaactaattttgtaaatatttccttagacaatatactttctgtagaggatc

SEQ ID NO: 56608 - DNA, 306 bp, Arabidopsis thaliana landsberg
cttccaaacggtttatgaaaatacgtcaaatcccaggcatgactggcccattctcttgggagacaaggtgaaactatgcccgagcagacctctgcgaaactatcaggcgtacaagttgtttaccgacacccataggcgtgccagaatccttgttcggccaatcatgactcgcccattctcttccgccactgaccaaaattcgtccgtgatctggcggactaactggtactcttgcttaccgactgcatgctggcccctcgcataactaatggtcacccacacgaggccagccccttctactccacc
